United States Patent Application Publication US 2026/0226133 A1 - sequence listing, part 4

SEQ ID NO: 5281 - DNA, 1878 bp, synthetic construct
  source 1..1878: mol_type = other DNA
atggccttaccagtgaccgccttgctcctgccgctggccttgctgctccacgccgccaggccggagatcgtgctgacacagtctcccgccacactgtcactgtctccaggcgaaagagccacactgagctgtagcgccagcagcagcgtgtcctacatgtactggtatcagcagaagcccggacaggcccctagactgctgatctacagaaccagcaacctggcctctggcatccccgccagattttctggctctggcagcggcaccgatttcaccctgaccataagcagcctggaacctgaggacttcgccgtgtactactgccagcagtaccacagctaccccaccacctttggacagggcaccaaggtggaaatcaagcggacagttctcgagatccagaaccctgatcctgccgtgtaccagctgcgggatagcaagagcagcgacaagagcgtgtgtctgttcaccgacttcgacagccagaccaacgtgtcccagagcaaggactccgacgtgtacatcaccgataagtgcgtgctggacatgcggagcatggacttcaagagcaactccgccgtggcctggtccaacaagtccgatttcgcctgcgccaacgccttcaacaacagcattatccccgaggacacattcttcccaagccccgagagcagctgcgacgtgaagctggtggaaaagagcttcgagacagacaccaacctgaacttccagatcctgtacgagatcctgctgggcaaggccaccctgtacgccgtgctggtgtctgccctggtgctgatggctatggtcaagcggaaggacagccggggacgcgccaagagaagcggatctggcgtgaagcagaccctgaatttcgacctgctgaagctggctggcgacgtggaatccaacccaggccctactagtatggactggatttggcgcatccttttccttgtcggcgctgctaccggcgcgcattccttcgaagaagtgcagctggttgaatcaggtggcggcctggttcaacctggcggatctctgagactgtcttgtgccgccagcggcttcagcttcaacacctacgccatgaactgggtccgacaggctcctggcaaaggactggaatgggtgtcccacatcagaagcaagagcaacaacttcgccacctactacgccgacagcgtgaaggacagattcaccatcagccgggacaacgccaagaacagcctgtacctccagatgaactccctgagagccgaggacaccgccgtgtattattgcgccagacaaggcggcgacttccctatggattattggggccagggcaccctggtcaccgtttcttctacgcgtgaggacctgaagaacgtgttcccacctgaggtggccgtgttcgagcctagcgaggccgagatcagccacacccagaaagccaccctcgtgtgcctggctaccggcttctaccccgaccatgtggaactgtcttggtgggtcaacggcaaagaggtgcacagcggcgtgtgtaccgacccccagccactgaaagaacagcccgccctgaacgacagccggtactgcctgagcagcagactgagagtgtccgccaccttctggcagaacccccggaaccacttcagatgccaggtgcagttctacggcctgagcgagaacgacgagtggacccaggacagagccaagcccgtgacccagatcgtgtctgccgaagcctggggcagagccgattgcggctttaccagcgagagctaccagcagggcgtgctgagcgccaccaacctgagcgtgatcggcttcagaatcctgctgctgaaagtggccggctttaacctgctgatgaccctgcggctgtggtccagc

SEQ ID NO: 5282 - DNA, 1866 bp, synthetic construct
  source 1..1866: mol_type = other DNA
atggccttaccagtgaccgccttgctcctgccgctggccttgctgctccacgccgccaggccggacgtggtcatgacacagagcccttctagcctgtctgccagcgtgggcgacagagtgaccatcacctgtaaagccagcgaggacatctacatccggctggcctggtatcagcagaagcctggaaaggcccctaagctgctgatctacgccgccacctctctggaaacaggcgtgccaagcagattttccggcagcggctctggcaccgatttcaccctgacaatatccagcctccagcctgaggacttcgccacctactactgccagcagtattggaccacaccttggacctttggcggaggcaccaaggtggaaatcaaactcgagatccagaaccctgatcctgccgtgtaccagctgcgggatagcaagagcagcgacaagagcgtgtgtctgttcaccgacttcgacagccagaccaacgtgtcccagagcaaggactccgacgtgtacatcaccgataagtgcgtgctggacatgcggagcatggacttcaagagcaactccgccgtggcctggtccaacaagtccgatttcgcctgcgccaacgccttcaacaacagcattatccccgaggacacattcttcccaagccccgagagcagctgcgacgtgaagctggtggaaaagagcttcgagacagacaccaacctgaacttccagatcctgtacgagatcctgctgggcaaggccaccctgtacgccgtgctggtgtctgccctggtgctgatggctatggtcaagcggaaggacagccggggacgcgccaagagaagcggatctggcgtgaagcagaccctgaatttcgacctgctgaagctggctggcgacgtggaatccaacccaggccctactagtatggactggatttggcgcatccttttccttgtcggcgctgctaccggcgcgcattccttcgaacaggtgcagctccaagagtctggccctggactggtcaagcctagccagacactgagcctgacctgtaccgtgtccggctacagcatcaccatcgactacacctggaactggatcagacagcctcctggcaaaggactggaatggatcggctacatcacctacagcggcagcaccgactacaaccccagcctgaaaagccgggtgctgatctccgtggacaccagcaagaatcaggtgtccctgaagctgagcagcgtgacagccgctgataccgccgtgtactactgtgccagactgggcagaagatacgccctggattattggggccagggcaccaccgtgacagtgtcatctacgcgtgaggacctgaagaacgtgttcccacctgaggtggccgtgttcgagcctagcgaggccgagatcagccacacccagaaagccaccctcgtgtgcctggctaccggcttctaccccgaccatgtggaactgtcttggtgggtcaacggcaaagaggtgcacagcggcgtgtgtaccgacccccagccactgaaagaacagcccgccctgaacgacagccggtactgcctgagcagcagactgagagtgtccgccaccttctggcagaacccccggaaccacttcagatgccaggtgcagttctacggcctgagcgagaacgacgagtggacccaggacagagccaagcccgtgacccagatcgtgtctgccgaagcctggggcagagccgattgcggctttaccagcgagagctaccagcagggcgtgctgagcgccaccaacctgagcgtgatcggcttcagaatcctgctgctgaaagtggccggctttaacctgctgatgaccctgcggctgtggtccagc

SEQ ID NO: 5283 - DNA, 1878 bp, synthetic construct
  source 1..1878: mol_type = other DNA
atggccttaccagtgaccgccttgctcctgccgctggccttgctgctccacgccgccaggccggacatccagatgacccagaccacaagcagcctgtctgccagcctgggcgacagagtgaccatctcttgtagagccagccaggacatcagcaactacctgaactggtatcagcagaaacccgacggcaccgtgaagctgctgatctactacaccagcatcctgcacagcggcgtgcccagcagattttctggctctggcagcggcaccgactacagcctgaccatcagcaatctggaacaagaggacttcgctacctacttctgccagcaaggcaacaccctgccttggacatttggcggaggcaccaagctggaaatcaaagctctcgagatccagaaccctgatcctgccgtgtaccagctgcgggatagcaagagcagcgacaagagcgtgtgtctgttcaccgacttcgacagccagaccaacgtgtcccagagcaaggactccgacgtgtacatcaccgataagtgcgtgctggacatgcggagcatggacttcaagagcaactccgccgtggcctggtccaacaagtccgatttcgcctgcgccaacgccttcaacaacagcattatccccgaggacacattcttcccaagccccgagagcagctgcgacgtgaagctggtggaaaagagcttcgagacagacaccaacctgaacttccagatcctgtacgagatcctgctgggcaaggccaccctgtacgccgtgctggtgtctgccctggtgctgatggctatggtcaagcggaaggacagccggggacgcgccaagagaagcggatctggcgtgaagcagaccctgaatttcgacctgctgaagctggctggcgacgtggaatccaacccaggccctactagtatggactggatttggcgcatccttttccttgtcggcgctgctaccggcgcgcattccttcgaagtgcaactggttgaatctggcggcggactggttaagcctggcggatctctgaagctgagctgtgccgcctctggcttcgccttcagcatctacgatatgagctgggtccgacagacccctgagaagagactggaatgggtcgcctacatctctagcggcggagggacctactatcccgacacagtgaagggcagattcaccatctccagagacaacgccaagaacaccctgtacctccagatgagcagcctgaagtccgaggacaccgccatgtactactgcgccagacacagcggctatggcacacattggggagtgctgtttgcctactggggccagggaacactggtcacagtttctgctacgcgtgaggacctgaagaacgtgttcccacctgaggtggccgtgttcgagcctagcgaggccgagatcagccacacccagaaagccaccctcgtgtgcctggctaccggcttctaccccgaccatgtggaactgtcttggtgggtcaacggcaaagaggtgcacagcggcgtgtgtaccgacccccagccactgaaagaacagcccgccctgaacgacagccggtactgcctgagcagcagactgagagtgtccgccaccttctggcagaacccccggaaccacttcagatgccaggtgcagttctacggcctgagcgagaacgacgagtggacccaggacagagccaagcccgtgacccagatcgtgtctgccgaagcctggggcagagccgattgcggctttaccagcgagagctaccagcagggcgtgctgagcgccaccaacctgagcgtgatcggcttcagaatcctgctgctgaaagtggccggctttaacctgctgatgaccctgcggctgtggtccagc

SEQ ID NO: 5284 - DNA, 1911 bp, synthetic construct
  source 1..1911: mol_type = other DNA
atggccttaccagtgaccgccttgctcctgccgctggccttgctgctccacgccgccaggccggacatcgtgatgacacagagccctgatagcctggccgtgtctctgggagagagagccaccatcaactgcaagagcagccagagcctgctgtacagaagcaaccagaagaactacctggcctggtatcagcagaagcccggccagcctcctaagctgctgatctactgggccagcaccagagaaagcggcgtgcccgatagattttctggctctggcagcggcaccgacttcaccctgacaatttctagcctgcaagccgaggacgtggccgtgtactactgccagcagtattacaactaccccagaaccttcggccagggcaccaaggtggaaatcaagagaacagttctcgagatccagaaccctgatcctgccgtgtaccagctgcgggatagcaagagcagcgacaagagcgtgtgtctgttcaccgacttcgacagccagaccaacgtgtcccagagcaaggactccgacgtgtacatcaccgataagtgcgtgctggacatgcggagcatggacttcaagagcaactccgccgtggcctggtccaacaagtccgatttcgcctgcgccaacgccttcaacaacagcattatccccgaggacacattcttcccaagccccgagagcagctgcgacgtgaagctggtggaaaagagcttcgagacagacaccaacctgaacttccagatcctgtacgagatcctgctgggcaaggccaccctgtacgccgtgctggtgtctgccctggtgctgatggctatggtcaagcggaaggacagccggggacgcgccaagagaagcggatctggcgtgaagcagaccctgaatttcgacctgctgaagctggctggcgacgtggaatccaacccaggccctactagtatggactggatttggcgcatccttttccttgtcggcgctgctaccggcgcgcattccttcgaagaagttcagctgcttgaatcaggcggcggactggttcaacctggcggatctctgagactgagctgtgccgccagcggctacagcatcacaagcgactatgcctggaactgggtccgacaggcccctggcaaaggactggaatgggtgtcctacatcagcaacagcggcagcaccagctacaaccccagcctgaagtcccggttcaccatcagcagagacaacagcaagaacaccctgtacctccagatgaacagcctgagagctgaggacaccgccgtgtattattgcgccaaagagcggaactacgactacgacgattactactacgctatggactactggggccagggaaccctggtcacagtctcttctacgcgtgaggacctgaagaacgtgttcccacctgaggtggccgtgttcgagcctagcgaggccgagatcagccacacccagaaagccaccctcgtgtgcctggctaccggcttctaccccgaccatgtggaactgtcttggtgggtcaacggcaaagaggtgcacagcggcgtgtgtaccgacccccagccactgaaagaacagcccgccctgaacgacagccggtactgcctgagcagcagactgagagtgtccgccaccttctggcagaacccccggaaccacttcagatgccaggtgcagttctacggcctgagcgagaacgacgagtggacccaggacagagccaagcccgtgacccagatcgtgtctgccgaagcctggggcagagccgattgcggctttaccagcgagagctaccagcagggcgtgctgagcgccaccaacctgagcgtgatcggcttcagaatcctgctgctgaaagtggccggctttaacctgctgatgaccctgcggctgtggtccagc

SEQ ID NO: 5285 - DNA, 1890 bp, synthetic construct
  source 1..1890: mol_type = other DNA
atggccttaccagtgaccgccttgctcctgccgctggccttgctgctccacgccgccaggccggacgtggtcatgacacagagccctctgagcctgcctgtgacacttggacagcctgccagcatcagctgtagaagcagccagagcctgctgcacagcagcggcaatacctacctggaatggtatcagcagaggcccggacagagccccagacctctgatctacaagatcagcacccggttcagcggcgtgcccgatagattttctggctctggcagcggcaccgacttcaccctgaagattagcagagtggaagccgaggacgtgggcgtgtactactgcttccaaggcagccacgtgccatacacctttggcggcggaacaaaggtggaaatcaagagactcgagatccagaaccctgatcctgccgtgtaccagctgcgggatagcaagagcagcgacaagagcgtgtgtctgttcaccgacttcgacagccagaccaacgtgtcccagagcaaggactccgacgtgtacatcaccgataagtgcgtgctggacatgcggagcatggacttcaagagcaactccgccgtggcctggtccaacaagtccgatttcgcctgcgccaacgccttcaacaacagcattatccccgaggacacattcttcccaagccccgagagcagctgcgacgtgaagctggtggaaaagagcttcgagacagacaccaacctgaacttccagatcctgtacgagatcctgctgggcaaggccaccctgtacgccgtgctggtgtctgccctggtgctgatggctatggtcaagcggaaggacagccggggacgcgccaagagaagcggatctggcgtgaagcagaccctgaatttcgacctgctgaagctggctggcgacgtggaatccaacccaggccctactagtatggactggatttggcgcatccttttccttgtcggcgctgctaccggcgcgcattccttcgaacaagttcagctggttcagagcggagccgaagtgaagaaacctggggcctctgtgaaggtgtcctgcaaagcctctggcctgaccatcgaggactactacatgcactgggtccgacaggcccctggacaaggacttgaatggatgggctggatcgaccccgagaacggcgatacagagtacggccctaagttccagggcagagtgaccatgaccagagacaccagcatcaacaccgcctacatggaactgagccggctgagatccgatgacaccgccgtgtactattgcgccgtgcacaatgcccactacggcacttggtttgcctattggggccagggcacactggtcaccgttagctctacgcgtgaggacctgaagaacgtgttcccacctgaggtggccgtgttcgagcctagcgaggccgagatcagccacacccagaaagccaccctcgtgtgcctggctaccggcttctaccccgaccatgtggaactgtcttggtgggtcaacggcaaagaggtgcacagcggcgtgtgtaccgacccccagccactgaaagaacagcccgccctgaacgacagccggtactgcctgagcagcagactgagagtgtccgccaccttctggcagaacccccggaaccacttcagatgccaggtgcagttctacggcctgagcgagaacgacgagtggacccaggacagagccaagcccgtgacccagatcgtgtctgccgaagcctggggcagagccgattgcggctttaccagcgagagctaccagcagggcgtgctgagcgccaccaacctgagcgtgatcggcttcagaatcctgctgctgaaagtggccggctttaacctgctgatgaccctgcggctgtggtccagc

SEQ ID NO: 5286 - DNA, 1866 bp, synthetic construct
  source 1..1866: mol_type = other DNA
atggccttaccagtgaccgccttgctcctgccgctggccttgctgctccacgccgccaggccggacatccagatgacacagagccctagcagcctgtctgccagcgtgggagacagagtgaccatcacctgtagagccagcgagaacatctacagcaacctggcctggtatcagcagaagcctggcaaggcccctaagctgctgatctacgccgccaccaatctggctgatggcgtgccaagcagattttccggctctggcagcggcaccgatttcaccctgacaatatccagcctccagcctgaggacttcgccacctactactgccagcacttttggggcacccctacattcggccagggcaccaaggtggaaatcaagagaacagttctcgagatccagaaccctgatcctgccgtgtaccagctgcgggatagcaagagcagcgacaagagcgtgtgtctgttcaccgacttcgacagccagaccaacgtgtcccagagcaaggactccgacgtgtacatcaccgataagtgcgtgctggacatgcggagcatggacttcaagagcaactccgccgtggcctggtccaacaagtccgatttcgcctgcgccaacgccttcaacaacagcattatccccgaggacacattcttcccaagccccgagagcagctgcgacgtgaagctggtggaaaagagcttcgagacagacaccaacctgaacttccagatcctgtacgagatcctgctgggcaaggccaccctgtacgccgtgctggtgtctgccctggtgctgatggctatggtcaagcggaaggacagccggggacgcgccaagagaagcggatctggcgtgaagcagaccctgaatttcgacctgctgaagctggctggcgacgtggaatccaacccaggccctactagtatggactggatttggcgcatccttttccttgtcggcgctgctaccggcgcgcattccttcgaagaagtgcagctggttgaatcaggtggcggcctggttcaacctggcggatctctgagactgagctgtgccgcctctggcttcagcctgacaaattacggcgtgcactgggtccgacaggcccctggaaaaggactggaatgggtgtccgtgatttggagcggcggcagcaccgattacaacgccgccttcatcagccggttcaccatcagcgccgacaccagcaagaataccgcctacctccagatgaactccctgagagccgaggacaccgccgtgtactattgcgccagagaactgatccacgctatggacaactggggccagggaaccctggtcacagtctcttctacgcgtgaggacctgaagaacgtgttcccacctgaggtggccgtgttcgagcctagcgaggccgagatcagccacacccagaaagccaccctcgtgtgcctggctaccggcttctaccccgaccatgtggaactgtcttggtgggtcaacggcaaagaggtgcacagcggcgtgtgtaccgacccccagccactgaaagaacagcccgccctgaacgacagccggtactgcctgagcagcagactgagagtgtccgccaccttctggcagaacccccggaaccacttcagatgccaggtgcagttctacggcctgagcgagaacgacgagtggacccaggacagagccaagcccgtgacccagatcgtgtctgccgaagcctggggcagagccgattgcggctttaccagcgagagctaccagcagggcgtgctgagcgccaccaacctgagcgtgatcggcttcagaatcctgctgctgaaagtggccggctttaacctgctgatgaccctgcggctgtggtccagc

SEQ ID NO: 5287 - DNA, 1887 bp, synthetic construct
  source 1..1887: mol_type = other DNA
atggccttaccagtgaccgccttgctcctgccgctggccttgctgctccacgccgccaggccggacttcgtgatgacacagagccctctgagcctgcctgtgacacctggcgaacctgccagcatcagctgtagaagcagccagagcatcgtgcacagcaacggcaacacctacctggaatggtatctccagaagcctggacagagcccacagctgctgatctacaaggtgtccaacagattcagcggcgtgcccgacagattttctggcagcggctctggcaccgacttcaccctgaagattagcagagtggaagccgaggacgtgggcgtgtactactgcttccaaggctctcacgtgcccctgacctttggacagggcaccaagctggaaatcaagagactcgagatccagaaccctgatcctgccgtgtaccagctgcgggatagcaagagcagcgacaagagcgtgtgtctgttcaccgacttcgacagccagaccaacgtgtcccagagcaaggactccgacgtgtacatcaccgataagtgcgtgctggacatgcggagcatggacttcaagagcaactccgccgtggcctggtccaacaagtccgatttcgcctgcgccaacgccttcaacaacagcattatccccgaggacacattcttcccaagccccgagagcagctgcgacgtgaagctggtggaaaagagcttcgagacagacaccaacctgaacttccagatcctgtacgagatcctgctgggcaaggccaccctgtacgccgtgctggtgtctgccctggtgctgatggctatggtcaagcggaaggacagccggggacgcgccaagagaagcggatctggcgtgaagcagaccctgaatttcgacctgctgaagctggctggcgacgtggaatccaacccaggccctactagtatggactggatttggcgcatccttttccttgtcggcgctgctaccggcgcgcattccttcgaagaagtgcagctggttgaaagcggagccgaagtgaagaaacctggggcctctgtgaaggtgtcctgcaaggccagcggctacacctttaccagctactggattcactgggtccgacaggcccctggacaaggacttgagtggatgggcgagaacgacccctccaacggcaggaccaactacaacgagaagttcaagaaccgcgtgaccctgaccgtggacaccagcatctctaccgcctacatggaactgagccggctgagatccgatgacaccgccgtgtactattgcgccagaggacccaactacttttacagcatggactactggggccagggcacaatggtcaccgttagctctacgcgtgaggacctgaagaacgtgttcccacctgaggtggccgtgttcgagcctagcgaggccgagatcagccacacccagaaagccaccctcgtgtgcctggctaccggcttctaccccgaccatgtggaactgtcttggtgggtcaacggcaaagaggtgcacagcggcgtgtgtaccgacccccagccactgaaagaacagcccgccctgaacgacagccggtactgcctgagcagcagactgagagtgtccgccaccttctggcagaacccccggaaccacttcagatgccaggtgcagttctacggcctgagcgagaacgacgagtggacccaggacagagccaagcccgtgacccagatcgtgtctgccgaagcctggggcagagccgattgcggctttaccagcgagagctaccagcagggcgtgctgagcgccaccaacctgagcgtgatcggcttcagaatcctgctgctgaaagtggccggctttaacctgctgatgaccctgcggctgtggtccagc

SEQ ID NO: 5288 - DNA, 1866 bp, synthetic construct
  source 1..1866: mol_type = other DNA
atggccttaccagtgaccgccttgctcctgccgctggccttgctgctccacgccgccaggccggacatccagctgactcagagccctagctttctgagcgccagcgtgggcgacagagtgaccatcacatgtagcgccagatccagcatcagcttcatgtactggtatcagcagaagcccggcaaggcccctaagctgctgatctacgacaccagcaatctggcctctggcgtgcccagcagattttctggaagcggcagcggcaccgagttcaccctgacaatctctagcctggaagccgaggatgccgccacctactattgccagcagtggtccagctatcccctgacatttggacagggcaccaagctggaaatcaaactcgagatccagaaccctgatcctgccgtgtaccagctgcgggatagcaagagcagcgacaagagcgtgtgtctgttcaccgacttcgacagccagaccaacgtgtcccagagcaaggactccgacgtgtacatcaccgataagtgcgtgctggacatgcggagcatggacttcaagagcaactccgccgtggcctggtccaacaagtccgatttcgcctgcgccaacgccttcaacaacagcattatccccgaggacacattcttcccaagccccgagagcagctgcgacgtgaagctggtggaaaagagcttcgagacagacaccaacctgaacttccagatcctgtacgagatcctgctgggcaaggccaccctgtacgccgtgctggtgtctgccctggtgctgatggctatggtcaagcggaaggacagccggggacgcgccaagagaagcggatctggcgtgaagcagaccctgaatttcgacctgctgaagctggctggcgacgtggaatccaacccaggccctactagtatggactggatttggcgcatccttttccttgtcggcgctgctaccggcgcgcattccttcgaacaggttcagctggttcagtctggggccgaagtgaagaaacctggggcctctgtgaaggtgtcctgcaaggcttccggctacacctttaccggctcttggatgaactgggtccgacaggctcctggacagggactcgaatggatcggcagaatctatcctggcgacggcgagacaaactacaacggcaagttcaaggaccgcgtgacaatcaccgccgacaagagcacaagcaccgcctacatggaactgagcagcctgcggagcgaagataccgccgtgtactactgcgcccggatctacggcaacaacgtgtacttcgatgtgtggggccagggcacaaccgtgacagtctcttctacgcgtgaggacctgaagaacgtgttcccacctgaggtggccgtgttcgagcctagcgaggccgagatcagccacacccagaaagccaccctcgtgtgcctggctaccggcttctaccccgaccatgtggaactgtcttggtgggtcaacggcaaagaggtgcacagcggcgtgtgtaccgacccccagccactgaaagaacagcccgccctgaacgacagccggtactgcctgagcagcagactgagagtgtccgccaccttctggcagaacccccggaaccacttcagatgccaggtgcagttctacggcctgagcgagaacgacgagtggacccaggacagagccaagcccgtgacccagatcgtgtctgccgaagcctggggcagagccgattgcggctttaccagcgagagctaccagcagggcgtgctgagcgccaccaacctgagcgtgatcggcttcagaatcctgctgctgaaagtggccggctttaacctgctgatgaccctgcggctgtggtccagc

SEQ ID NO: 5289 - DNA, 1890 bp, synthetic construct
  source 1..1890: mol_type = other DNA
atggccttaccagtgaccgccttgctcctgccgctggccttgctgctccacgccgccaggccgcagctggtgctgacacagtctccaagcgcctctgccagcctgggatctagcgtgaagctgacctgtacactgagcagcggccacaagaccgacaccatcgactggtatcagcagcagcctggcaaggcccctagatacctgatgaagctggaaggcagcggcagctacaacaaaggctctggcgtgcccgatagattcagcggcagttcttctggcgctgattggtatctgaccatcagcagcctccagagcgaggacgaggccgattactactgcggcacagactaccccggcaactacctgtttggcggcggaacacagctgacagtgcttggcctcgagatccagaaccctgatcctgccgtgtaccagctgcgggatagcaagagcagcgacaagagcgtgtgtctgttcaccgacttcgacagccagaccaacgtgtcccagagcaaggactccgacgtgtacatcaccgataagtgcgtgctggacatgcggagcatggacttcaagagcaactccgccgtggcctggtccaacaagtccgatttcgcctgcgccaacgccttcaacaacagcattatccccgaggacacattcttcccaagccccgagagcagctgcgacgtgaagctggtggaaaagagcttcgagacagacaccaacctgaacttccagatcctgtacgagatcctgctgggcaaggccaccctgtacgccgtgctggtgtctgccctggtgctgatggctatggtcaagcggaaggacagccggggacgcgccaagagaagcggatctggcgtgaagcagaccctgaatttcgacctgctgaagctggctggcgacgtggaatccaacccaggccctactagtatggactggatttggcgcatccttttccttgtcggcgctgctaccggcgcgcattccttcgaacaagaacagctggttgaaagcggcggaggactggttcaacctggcggttctctgagactgagctgtgccgccagcggcttcaccttcagcgactactacatgagctggatcagacaggccccaggcaaaggactggaatgggtcgccacaatctaccccagcagcggcaagacctactacgccgattctgccaagggcagactgaccatctccagcgacaacgccaaggacagcctgtacctccagatgaacagcctgagagccgaggacaccgccgtgtactactgcaccagagatagctacgccgacgacgccgctctgtttgacatttggggccagggcaccaccgtgaccgtttcttctacgcgtgaggacctgaagaacgtgttcccacctgaggtggccgtgttcgagcctagcgaggccgagatcagccacacccagaaagccaccctcgtgtgcctggctaccggcttctaccccgaccatgtggaactgtcttggtgggtcaacggcaaagaggtgcacagcggcgtgtgtaccgacccccagccactgaaagaacagcccgccctgaacgacagccggtactgcctgagcagcagactgagagtgtccgccaccttctggcagaacccccggaaccacttcagatgccaggtgcagttctacggcctgagcgagaacgacgagtggacccaggacagagccaagcccgtgacccagatcgtgtctgccgaagcctggggcagagccgattgcggctttaccagcgagagctaccagcagggcgtgctgagcgccaccaacctgagcgtgatcggcttcagaatcctgctgctgaaagtggccggctttaacctgctgatgaccctgcggctgtggtccagc

SEQ ID NO: 5290 - DNA, 1866 bp, synthetic construct; identical to SEQ ID NO: 5286
  source 1..1866: mol_type = other DNA

SEQ ID NO: 5291 - DNA, 1887 bp, synthetic construct; identical to SEQ ID NO: 5287
  source 1..1887: mol_type = other DNA

SEQ ID NO: 5292 - DNA, 1866 bp, synthetic construct; identical to SEQ ID NO: 5288
  source 1..1866: mol_type = other DNA

SEQ ID NO: 5293 - DNA, 1890 bp, synthetic construct; identical to SEQ ID NO: 5289
  source 1..1890: mol_type = other DNA

SEQ ID NO: 5294 - DNA, 1887 bp, synthetic construct
  source 1..1887: mol_type = other DNA
atggccttaccagtgaccgccttgctcctgccgctggccttgctgctccacgccgccaggccggatatccagctcactcaaagcccctctagtctctctgcctcagtgggggatcgggtcagttttacttgtcaagcttcacaggatatcaacaacttccttaattggtatcagcagaagccaggaaaagcacccaagctgctcatctatgatgcctcaaatttggagacgggtgttcccagtcgattctctgggtcagggtccgggaccgactttacgtttacgatctcctctctgcagcccgaagacatcgccacatactattgtcaacagtacggcaacttgcctttcacatttgggggcgggactaaggttgaaatcaagaggctcgagatccagaaccctgatcctgccgtgtaccagctgcgggatagcaagagcagcgacaagagcgtgtgtctgttcaccgacttcgacagccagaccaacgtgtcccagagcaaggactccgacgtgtacatcaccgataagtgcgtgctggacatgcggagcatggacttcaagagcaactccgccgtggcctggtccaacaagtccgatttcgcctgcgccaacgccttcaacaacagcattatccccgaggacacattcttcccaagccccgagagcagctgcgacgtgaagctggtggaaaagagcttcgagacagacaccaacctgaacttccagatcctgtacgagatcctgctgggcaaggccaccctgtacgccgtgctggtgtctgccctggtgctgatggctatggtcaagcggaaggacagccggggacgcgccaagagaagcggatctggcgtgaagcagaccctgaatttcgacctgctgaagctggctggcgacgtggaatccaacccaggccctactagtatggactggatttggcgcatccttttccttgtcggcgctgctaccggcgcgcattccttcgaacaggtacagctgcaggaatctgggcccggacttgtcaagccaagtcagacactttctcttacatgtaccgtgagcggcggaagtataagcagtggaggcttttactggtcttggatacggcagcacccaggcaaaggcttggagtggattggatacattcatcattcaggatctacacactataatccatcccttaagtcccgggtcaccattagcattgatacgtctaagaatctgttcagtctcaggctgtcctccgtcactgctgccgacacagccgtgtactactgcgcctccttggtttactgcggaggcgactgttatagcggctttgattattgggggcaggggaccctcgtaaccgtgagctctacgcgtgaggacctgaagaacgtgttcccacctgaggtggccgtgttcgagcctagcgaggccgagatcagccacacccagaaagccaccctcgtgtgcctggctaccggcttctaccccgaccatgtggaactgtcttggtgggtcaacggcaaagaggtgcacagcggcgtgtgtaccgacccccagccactgaaagaacagcccgccctgaacgacagccggtactgcctgagcagcagactgagagtgtccgccaccttctggcagaacccccggaaccacttcagatgccaggtgcagttctacggcctgagcgagaacgacgagtggacccaggacagagccaagcccgtgacccagatcgtgtctgccgaagcctggggcagagccgattgcggctttaccagcgagagctaccagcagggcgtgctgagcgccaccaacctgagcgtgatcggcttcagaatcctgctgctgaaagtggccggctttaacctgctgatgaccctgcggctgtggtccagc

SEQ ID NO: 5295 - DNA, 1875 bp, synthetic construct
  source 1..1875: mol_type = other DNA
atggccttaccagtgaccgccttgctcctgccgctggccttgctgctccacgccgccaggccggacattcagatgacacagagccctagcagcctgagcgcctctgtgggagacagagtgaccatcacatgcaagagcagccagagcgtgctgtactccagcaatcagaagaactacctggcctggttccagcagaagcctggcaaggctcctaagctgctgatctactgggccagcaccagagaaagcggcgtgccaagcagattttctggcagcggctctggcaccgacttcaccctgacaatatccagcctccagcctgaggacttcgccacctacttttgccaccagtacctgagcagctacacattcggacagggcaccaaggtggaaatcaagcggctcgagatccagaaccctgatcctgccgtgtaccagctgcgggatagcaagagcagcgacaagagcgtgtgtctgttcaccgacttcgacagccagaccaacgtgtcccagagcaaggactccgacgtgtacatcaccgataagtgcgtgctggacatgcggagcatggacttcaagagcaactccgccgtggcctggtccaacaagtccgatttcgcctgcgccaacgccttcaacaacagcattatccccgaggacacattcttcccaagccccgagagcagctgcgacgtgaagctggtggaaaagagcttcgagacagacaccaacctgaacttccagatcctgtacgagatcctgctgggcaaggccaccctgtacgccgtgctggtgtctgccctggtgctgatggctatggtcaagcggaaggacagccggggacgcgccaagagaagcggatctggcgtgaagcagaccctgaatttcgacctgctgaagctggctggcgacgtggaatccaacccaggccctactagtatggactggatttggcgcatccttttccttgtcggcgctgctaccggcgcgcattccttcgaagaggtgcagctggttgaatctggcggaggactggttcagcctggcggatctctgagactgtcttgtgccgccagcggctacaccttcaccacctattggatgcactgggtccgacaggcccctggcaaaggacttgagtgggtcggatatatcaggcccagcaccggctacacagagtacaaccagaagttcaaggaccgcttcaccatcagcgccgacaccagcaagaataccgcctacctccagatgaacagcctgagagccgaggacaccgccgtgtactactgtgccagatccagatggctgctggactattggggccagggcacactggttacagtttctacgcgtgaggacctgaagaacgtgttcccacctgaggtggccgtgttcgagcctagcgaggccgagatcagccacacccagaaagccaccctcgtgtgcctggctaccggcttctaccccgaccatgtggaactgtcttggtgggtcaacggcaaagaggtgcacagcggcgtgtgtaccgacccccagccactgaaagaacagcccgccctgaacgacagccggtactgcctgagcagcagactgagagtgtccgccaccttctggcagaacccccggaaccacttcagatgccaggtgcagttctacggcctgagcgagaacgacgagtggacccaggacagagccaagcccgtgacccagatcgtgtctgccgaagcctggggcagagccgattgcggctttaccagcgagagctaccagcagggcgtgctgagcgccaccaacctgagcgtgatcggcttcagaatcctgctgctgaaagtggccggctttaacctgctgatgaccctgcggctgtggtccagc

SEQ ID NO: 5296 - DNA, 1866 bp, synthetic construct
  source 1..1866: mol_type = other DNA
atggccttaccagtgaccgccttgctcctgccgctggccttgctgctccacgccgccaggccggacatccagatgacacagagccctagcagcctgtctgccagcgtgggagacagagtgaccatcacctgtagagccagccaggacatcagcaactacctgaactggtatcagcagaagcccggcaaggcccctaagctgctgatctactacaccagcagactgcacagcggcgtgcccagcagattttctggctctggcagcggcaccgacttcaccctgacaatatctagcctccagcctgaggacttcgccacctactattgccagcagggcaacaccctgccttacacatttggacagggcaccaaggtggaaatcaagagactcgagatccagaaccctgatcctgccgtgtaccagctgcgggatagcaagagcagcgacaagagcgtgtgtctgttcaccgacttcgacagccagaccaacgtgtcccagagcaaggactccgacgtgtacatcaccgataagtgcgtgctggacatgcggagcatggacttcaagagcaactccgccgtggcctggtccaacaagtccgatttcgcctgcgccaacgccttcaacaacagcattatccccgaggacacattcttcccaagccccgagagcagctgcgacgtgaagctggtggaaaagagcttcgagacagacaccaacctgaacttccagatcctgtacgagatcctgctgggcaaggccaccctgtacgccgtgctggtgtctgccctggtgctgatggctatggtcaagcggaaggacagccggggacgcgccaagagaagcggatctggcgtgaagcagaccctgaatttcgacctgctgaagctggctggcgacgtggaatccaacccaggccctactagtatggactggatttggcgcatccttttccttgtcggcgctgctaccggcgcgcattccttcgaagaagtgcagctggttgaatcaggtggcggcctggttcaacctggcggatctctgagactgagctgtgccgccagcggcttcaccttcagcgactactttatgagctgggtccgacaggcccctggcaaaggacttgaatgggtcgccaccatcagcaatggcggcacctacacttactaccccgacagcgtgaagggcagattcaccatctccagagacaacagcaagaacaccctgtacctccagatgaactccctgagagccgaggacaccgccgtgtactactgcgccagattcgacggctacatcttcgactattggggccagggcaccctggtcacagtctcttctacgcgtgaggacctgaagaacgtgttcccacctgaggtggccgtgttcgagcctagcgaggccgagatcagccacacccagaaagccaccctcgtgtgcctggctaccggcttctaccccgaccatgtggaactgtcttggtgggtcaacggcaaagaggtgcacagcggcgtgtgtaccgacccccagccactgaaagaacagcccgccctgaacgacagccggtactgcctgagcagcagactgagagtgtccgccaccttctggcagaacccccggaaccacttcagatgccaggtgcagttctacggcctgagcgagaacgacgagtggacccaggacagagccaagcccgtgacccagatcgtgtctgccgaagcctggggcagagccgattgcggctttaccagcgagagctaccagcagggcgtgctgagcgccaccaacctgagcgtgatcggcttcagaatcctgctgctgaaagtggccggctttaacctgctgatgaccctgcggctgtggtccagc

SEQ ID NO: 5297 - DNA, 2262 bp, synthetic construct
  source 1..2262: mol_type = other DNA
atggccttaccagtgaccgccttgctcctgccgctggccttgctgctccacgccgccaggccggaagtgcagctggttgaatctggcggaggactggttcagcctggcggatctctgagactgtcttgtgccgccagcggcttcagcttcagcgacttttggatgagctgggtccgacaggcccctggcaaaggacttgaatgggtcgccacaatcagccaggccggcagcgagaaggactacgtggactctgtgaagggcagattcaccatcagccgggacaacgccaagaagtccctgtacctccagatgaacagcctgagagccgaggacaccgccgtgtactattgtgcctctggcgtgtacagcttcgactacagaggccagggcaccctggtcacagtctcttctggtaccggcggaggcggatctggcggcggaggtagcggtggcggaggatctgaattcgacatccagatgacacagactacatcctccctgtctgcctctctgggagacagagtcaccatcagttgcagggcaagtcaggacattagtaagtacctgaactggtatcagcagaaaccagatggaactgttaaactcctgatctaccatacatcaagattacactcaggagtcccatcaaggttcagtggcagtgggtctggaacagattattctctcaccattagcaacctggagcaagaagatattgccacttacttttgccaacagggtaatacgcttccgtacacgttcggaggggggaccaagctggagatcacactcgaggacctgaagaacgtgttcccacctgaggtggccgtgttcgagcctagcgaggccgagatcagccacacccagaaagccaccctcgtgtgcctggctaccggcttctaccccgaccatgtggaactgtcttggtgggtcaacggcaaagaggtgcacagcggcgtgtgtaccgacccccagccactgaaagaacagcccgccctgaacgacagccggtactgcctgagcagcagactgagagtgtccgccaccttctggcagaacccccggaaccacttcagatgccaggtgcagttctacggcctgagcgagaacgacgagtggacccaggacagagccaagcccgtgacccagatcgtgtctgccgaagcctggggcagagccgattgcggctttaccagcgagagctaccagcagggcgtgctgagcgccaccaacctgagcgtgatcggcttcagaatcctgctgctgaaagtggccggctttaacctgctgatgaccctgcggctgtggtccagcagggccaagcgatctggatctggagcaacaaacttctcactactcaaacaagcaggtgacgtggaggagaatcccgggcctactagtatggactggatttggcgcatccttttccttgtcggcgctgctaccggcgcgcattccttcgaagtgaaactgcaggagtcaggacctggcctggtggcgccctcacagagcctgtccgtcacatgcactgtctcaggggtctcattacccgactatggtgtaagctggattcgccagcctccacgaaagggtctggagtggctgggagtaatatggggtagtgaaaccacatactataattcagctctcaaatccagactgaccatcatcaaggacaactccaagagccaagttttcttaaaaatgaacagtctgcaaactgatgacacagccatttactactgtgccaaacattattactacggtggtagctatgctatggactactggggccaaggaacctcagtcaccgtctcctcaacgcgtatccagaaccctgatcctgccgtgtaccagctgcgggatagcaagagcagcgacaagagcgtgtgtctgttcaccgacttcgacagccagaccaacgtgtcccagagcaaggactccgacgtgtacatcaccgataagtgcgtgctggacatgcggagcatggacttcaagagcaactccgccgtggcctggtccaacaagtccgatttcgcctgcgccaacgccttcaacaacagcattatccccgaggacacattcttcccaagccccgagagcagctgcgacgtgaagctggtggaaaagagcttcgagacagacaccaacctgaacttccagatcctgtacgagatcctgctgggcaaggccaccctgtacgccgtgctggtgtctgccctggtgctgatggctatggtcaagcggaaggacagccgggga

SEQ ID NO: 5298 - DNA, 2265 bp, synthetic construct
  source 1..2265: mol_type = other DNA
atggccttaccagtgaccgccttgctcctgccgctggccttgctgctccacgccgccaggccggaagtgcagctggttgaatctggcggaggactggttcagcctggcggatctctgagactgtcttgtgccgccagcggcttcagcttcagcgacttttggatgagctgggtccgacaggcccctggcaaaggacttgaatgggtcgccacaatcagccaggccggcagcgagaaggactacgtggactctgtgaagggcagattcaccatcagccgggacaacgccaagaagtccctgtacctccagatgaacagcctgagagccgaggacaccgccgtgtactattgtgcctctggcgtgtacagcttcgactacagaggccagggcaccctggtcacagtctcttctggtaccggcggaggcggatctggcggcggaggtagcggtggcggaggatctgaattcgagatcgtgatgacccagagccctgccaccctgtctctgagccctggcgaaagagccaccctgagctgtagagccagccaggacatcagcaagtacctgaactggtatcagcagaagcccggccaggcccccagactgctgatctaccacaccagcagactgcacagcggcatccccgccagattttctggctctggcagcggcaccgactacaccctgacaatcagcagcctccagcccgaggacttcgccgtgtacttctgtcagcaaggcaacaccctgccctacaccttcggccagggcaccaagctggaaatcaagctcgaggacctgaagaacgtgttcccacctgaggtggccgtgttcgagcctagcgaggccgagatcagccacacccagaaagccaccctcgtgtgcctggctaccggcttctaccccgaccatgtggaactgtcttggtgggtcaacggcaaagaggtgcacagcggcgtgtgtaccgacccccagccactgaaagaacagcccgccctgaacgacagccggtactgcctgagcagcagactgagagtgtccgccaccttctggcagaacccccggaaccacttcagatgccaggtgcagttctacggcctgagcgagaacgacgagtggacccaggacagagccaagcccgtgacccagatcgtgtctgccgaagcctggggcagagccgattgcggctttaccagcgagagctaccagcagggcgtgctgagcgccaccaacctgagcgtgatcggcttcagaatcctgctgctgaaagtggccggctttaacctgctgatgaccctgcggctgtggtccagcagggccaagcgatctggatctggagcaacaaacttctcactactcaaacaagcaggtgacgtggaggagaatcccgggcctactagtatggactggatttggcgcatccttttccttgtcggcgctgctaccggcgcgcattccttcgaacaggtgcaactccaggaatctggccctggcctcgtgaagcccagcgagacactgagcctgacctgtaccgtgtccggcgtgtccctgcctgactatggcgtgtcctggatcagacagccccctggcaagggcctggaatggatcggagtgatttggggcagcgaaaccacctactacaacagctccctgaagtccagagtgaccatctccaaggacaactccaagaaccaggtgtccctgaagctgagcagcgtgacagccgccgacaccgccgtgtattactgcgccaagcactactactacggcggcagctacgctatggactactggggccagggaaccctcgtgaccgtgtctagtacgcgtatccagaaccctgatcctgccgtgtaccagctgcgggatagcaagagcagcgacaagagcgtgtgtctgttcaccgacttcgacagccagaccaacgtgtcccagagcaaggactccgacgtgtacatcaccgataagtgcgtgctggacatgcggagcatggacttcaagagcaactccgccgtggcctggtccaacaagtccgatttcgcctgcgccaacgccttcaacaacagcattatccccgaggacacattcttcccaagccccgagagcagctgcgacgtgaagctggtggaaaagagcttcgagacagacaccaacctgaacttccagatcctgtacgagatcctgctgggcaaggccaccctgtacgccgtgctggtgtctgccctggtgctgatggctatggtcaagcggaaggacagccgggga

SEQ ID NO: 5299 - DNA, 2268 bp, synthetic construct
  source 1..2268: mol_type = other DNA
atggccttaccagtgaccgccttgctcctgccgctggccttgctgctccacgccgccaggccggaagtgcagctggttgaatctggcggaggactggttcagcctggcggatctctgagactgtcttgtgccgccagcggcttcagcttcagcgacttttggatgagctgggtccgacaggcccctggcaaaggacttgaatgggtcgccacaatcagccaggccggcagcgagaaggactacgtggactctgtgaagggcagattcaccatcagccgggacaacgccaagaagtccctgtacctccagatgaacagcctgagagccgaggacaccgccgtgtactattgtgcctctggcgtgtacagcttcgactacagaggccagggcaccctggtcacagtctcttctggtaccggcggaggcggatctggcggcggaggtagcggtggcggaggatctgaattcgacgagatcgtgctgacacagagccccgccaccctgtcactgtctccaggcgaaagagccaccctgagctgtagcgccagcagcagcgtgtcctacatgcactggtatcagcagaagcccggccaggcccccagactgctgatctacgataccagcaagctggcctccggcatccccgccagattttctggcagcggctccggcaccgacttcaccctgacaatcagcagcctggaacccgaggacgtggccgtgtactactgttttcaaggcagcgtgtaccccttcaccttcggccagggcaccaagctggaaatcaagagactcgaggacctgaagaacgtgttcccacctgaggtggccgtgttcgagcctagcgaggccgagatcagccacacccagaaagccaccctcgtgtgcctggctaccggcttctaccccgaccatgtggaactgtcttggtgggtcaacggcaaagaggtgcacagcggcgtgtgtaccgacccccagccactgaaagaacagcccgccctgaacgacagccggtactgcctgagcagcagactgagagtgtccgccaccttctggcagaacccccggaaccacttcagatgccaggtgcagttctacggcctgagcgagaacgacgagtggacccaggacagagccaagcccgtgacccagatcgtgtctgccgaagcctggggcagagccgattgcggctttaccagcgagagctaccagcagggcgtgctgagcgccaccaacctgagcgtgatcggcttcagaatcctgctgctgaaagtggccggctttaacctgctgatgaccctgcggctgtggtccagcagggccaagcgatctggatctggagcaacaaacttctcactactcaaacaagcaggtgacgtggaggagaatcccgggcctactagtatggactggatttggcgcatccttttccttgtcggcgctgctaccggcgcgcattccttcgaacaggtgcagctccaggaatctggccctggcctcgtgaagcctagccagaccctgagcctgacctgtaccgtgtctggcggcagcatcagcacaagcggcatgggcgtgggctggatcagacagcaccctggcaagggcctggaatggatcggccacatttggtgggacgacgacaagcggtacaaccccgccctgaagtccagagtgaccatcagcgtggacaccagcaagaaccagttcagcctgaagctgagcagcgtgacagccgccgataccgccgtgtattattgcgcccggatggaactgtggtcctactacttcgactactggggccagggaaccctcgtgaccgtgtctagtacgcgtatccagaaccctgatcctgccgtgtaccagctgcgggatagcaagagcagcgacaagagcgtgtgtctgttcaccgacttcgacagccagaccaacgtgtcccagagcaaggactccgacgtgtacatcaccgataagtgcgtgctggacatgcggagcatggacttcaagagcaactccgccgtggcctggtccaacaagtccgatttcgcctgcgccaacgccttcaacaacagcattatccccgaggacacattcttcccaagccccgagagcagctgcgacgtgaagctggtggaaaagagcttcgagacagacaccaacctgaacttccagatcctgtacgagatcctgctgggcaaggccaccctgtacgccgtgctggtgtctgccctggtgctgatggctatggtcaagcggaaggacagccgggga

SEQ ID NO: 5300 - DNA, 2262 bp, synthetic construct
  source 1..2262: mol_type = other DNA
atggccttaccagtgaccgccttgctcctgccgctggccttgctgctccacgccgccaggccggaagtgcagctggttgaatctggcggaggactggttcagcctggcggatctctgagactgtcttgtgccgccagcggcttcagcttcagcgacttttggatgagctgggtccgacaggcccctggcaaaggacttgaatgggtcgccacaatcagccaggccggcagcgagaaggactacgtggactctgtgaagggcagattcaccatcagccgggacaacgccaagaagtccctgtacctccagatgaacagcctgagagccgaggacaccgccgtgtactattgtgcctctggcgtgtacagcttcgactacagaggccagggcaccctggtcacagtctcttctggtaccggcggaggcggatctggcggcggaggtagcggtggcggaggatctgaattcgactacatccacgtgacacagagccctagcagcctgtccgtgtccatcggcgatagagtgaccatcaactgccagacctctcaaggcgtgggcagcgacctgcactggtatcagcacaaacctggcagagcccctaagctgctgatccaccatgccagctctgtggaagatggcgtgcccagcagattttccggcaccggatttcacaccagcttcaacctgacaatcaacgacctccaggccgacgacatcggcacctactactgtcaagtgctccagagcttcggcagaggcagcagactggatacaaaactcgaggacctgaagaacgtgttcccacctgaggtggccgtgttcgagcctagcgaggccgagatcagccacacccagaaagccaccctcgtgtgcctggctaccggcttctaccccgaccatgtggaactgtcttggtgggtcaacggcaaagaggtgcacagcggcgtgtgtaccgacccccagccactgaaagaacagcccgccctgaacgacagccggtactgcctgagcagcagactgagagtgtccgccaccttctggcagaacccccggaaccacttcagatgccaggtgcagttctacggcctgagcgagaacgacgagtggacccaggacagagccaagcccgtgacccagatcgtgtctgccgaagcctggggcagagccgattgcggctttaccagcgagagctaccagcagggcgtgctgagcgccaccaacctgagcgtgatcggcttcagaatcctgctgctgaaagtggccggctttaacctgctgatgaccctgcggctgtggtccagcagggccaagcgatctggatctggagcaacaaacttctcactactcaaacaagcaggtgacgtggaggagaatcccgggcctactagtatggactggatttggcgcatccttttccttgtcggcgctgctaccggcgcgcattccttcgaaagggcacacctggtgcagtctggcaccgccatgaagaaacctggcgcttccgtcagagtgtcctgtcagacaagcggctacaccttcacagcccacatcctgttctggttcagacaggccccaggcagaggactggaatgggtcggatggatcaagccccagtacggggccgtgaatttcggcggaggcttcagagacagagtgaccctgaccagggacgtgtaccgggaaatcgcctacatggacatccggggcctgaagcctgatgacaccgccgtgtactactgcgccagggatagaagctacggcgacagctcttgggctctcgatgcttggggacagggcacaacagtggtggtgtctgctacgcgtatccagaaccctgatcctgccgtgtaccagctgcgggatagcaagagcagcgacaagagcgtgtgtctgttcaccgacttcgacagccagaccaacgtgtcccagagcaaggactccgacgtgtacatcaccgataagtgcgtgctggacatgcggagcatggacttcaagagcaactccgccgtggcctggtccaacaagtccgatttcgcctgcgccaacgccttcaacaacagcattatccccgaggacacattcttcccaagccccgagagcagctgcgacgtgaagctggtggaaaagagcttcgagacagacaccaacctgaacttccagatcctgtacgagatcctgctgggcaaggccaccctgtacgccgtgctggtgtctgccctggtgctgatggctatggtcaagcggaaggacagccgggga

SEQ ID NO: 5301 - DNA, 2292 bp, synthetic construct
  source 1..2292: mol_type = other DNA
atggccttaccagtgaccgccttgctcctgccgctggccttgctgctccacgccgccaggccggaagtgcagctggttgaatctggcggaggactggttcagcctggcggatctctgagactgtcttgtgccgccagcggcttcagcttcagcgacttttggatgagctgggtccgacaggcccctggcaaaggacttgaatgggtcgccacaatcagccaggccggcagcgagaaggactacgtggactctgtgaagggcagattcaccatcagccgggacaacgccaagaagtccctgtacctccagatgaacagcctgagagccgaggacaccgccgtgtactattgtgcctctggcgtgtacagcttcgactacagaggccagggcaccctggtcacagtctcttctggtaccggcggaggcggatctggcggcggaggtagcggtggcggaggatctgaattcgacgtgcagatgatccagacccccgatagcctggccgtgtccctgggacagagagccaccatctcttgcagagccagcgagagcgtggacaactacggcatcagcttcatgcactggtatcagcagaagcccggccagagccccaagctgctgatctacagagcctccaacctggaaagcggcatccccgccagattttccggcagcggcagcagaaccgacttcaccctgaccatcaaccccgtggaaaccgacgacgtggcaacctactactgccagcagaacaacaaggacccccccacctttggcggaggcaccaagctggaaatcaagctcgaggacctgaagaacgtgttcccacctgaggtggccgtgttcgagcctagcgaggccgagatcagccacacccagaaagccaccctcgtgtgcctggctaccggcttctaccccgaccatgtggaactgtcttggtgggtcaacggcaaagaggtgcacagcggcgtgtgtaccgacccccagccactgaaagaacagcccgccctgaacgacagccggtactgcctgagcagcagactgagagtgtccgccaccttctggcagaacccccggaaccacttcagatgccaggtgcagttctacggcctgagcgagaacgacgagtggacccaggacagagccaagcccgtgacccagatcgtgtctgccgaagcctggggcagagccgattgcggctttaccagcgagagctaccagcagggcgtgctgagcgccaccaacctgagcgtgatcggcttcagaatcctgctgctgaaagtggccggctttaacctgctgatgaccctgcggctgtggtccagcagggccaagcgatctggatctggagcaacaaacttctcactactcaaacaagcaggtgacgtggaggagaatcccgggcctactagtatggactggatttggcgcatccttttccttgtcggcgctgctaccggcgcgcattccttcgaagggggaggcggctctcaggtgcaactccagcagtctggcgctgagcttgtgaagcctggggccagcgtgaagattagctgcaaggccagcggctacgccttcagcagctactggatgaactgggtcaagcagcggcctggcaagggcctggaatggatcggccaaatctaccccggcgacggcgacaccacctacaacggcaagttcaagggcaaggccaccctgacagccgacaagagcagcagcaccgtgtacatgcaactgaacagcctgaccagcgaggacagcgccgtgtacttctgcgtgcggtactactacggcagctccggctacttcgactattggggccagggcaccacactgaccgtgtcctctacgcgtatccagaaccctgatcctgccgtgtaccagctgcgggatagcaagagcagcgacaagagcgtgtgtctgttcaccgacttcgacagccagaccaacgtgtcccagagcaaggactccgacgtgtacatcaccgataagtgcgtgctggacatgcggagcatggacttcaagagcaactccgccgtggcctggtccaacaagtccgatttcgcctgcgccaacgccttcaacaacagcattatccccgaggacacattcttcccaagccccgagagcagctgcgacgtgaagctggtggaaaagagcttcgagacagacaccaacctgaacttccagatcctgtacgagatcctgctgggcaaggccaccctgtacgccgtgctggtgtctgccctggtgctgatggctatggtcaagcggaaggacagccgggga

SEQ ID NO: 5302 - DNA, 2265 bp, synthetic construct
  source 1..2265: mol_type = other DNA
atggccttaccagtgaccgccttgctcctgccgctggccttgctgctccacgccgccaggccggaagtgcagctggttgaatctggcggaggactggttcagcctggcggatctctgagactgtcttgtgccgccagcggcttcagcttcagcgacttttggatgagctgggtccgacaggcccctggcaaaggacttgaatgggtcgccacaatcagccaggccggcagcgagaaggactacgtggactctgtgaagggcagattcaccatcagccgggacaacgccaagaagtccctgtacctccagatgaacagcctgagagccgaggacaccgccgtgtactattgtgcctctggcgtgtacagcttcgactacagaggccagggcaccctggtcacagtctcttctggtaccggcggaggcggatctggcggcggaggtagcggtggcggaggatctgaattcgacgtgcagatgatccagacccccagcagcctgtctgccagcctgggcgatagagtgaccatcagctgtcgggccagccaggacatcggcaactacctgaactggtatcagcagaaacccgacggcaccgtgaagctgctgatctactacaccagcagactgcacagcggcgtgcccagcagattttctggcagcggctctggcaccgagtacagcctgaccatctccaacctggaacaggaagatattgctacctacttctgtcagcaaggcagcgccctgccccctacatttggcggcggaacaaagctggaaatcaacctcgaggacctgaagaacgtgttcccacctgaggtggccgtgttcgagcctagcgaggccgagatcagccacacccagaaagccaccctcgtgtgcctggctaccggcttctaccccgaccatgtggaactgtcttggtgggtcaacggcaaagaggtgcacagcggcgtgtgtaccgacccccagccactgaaagaacagcccgccctgaacgacagccggtactgcctgagcagcagactgagagtgtccgccaccttctggcagaacccccggaaccacttcagatgccaggtgcagttctacggcctgagcgagaacgacgagtggacccaggacagagccaagcccgtgacccagatcgtgtctgccgaagcctggggcagagccgattgcggctttaccagcgagagctaccagcagggcgtgctgagcgccaccaacctgagcgtgatcggcttcagaatcctgctgctgaaagtggccggctttaacctgctgatgaccctgcggctgtggtccagcagggccaagcgatctggatctggagcaacaaacttctcactactcaaacaagcaggtgacgtggaggagaatcccgggcctactagtatggactggatttggcgcatccttttccttgtcggcgctgctaccggcgcgcattccttcgaagctctccagctccagcagtctggcgcagaactcgtgcggcctggcgcttctgtgaccctgagctgtaaagccagcggctacaccttcaccgactacgagatgcactgggtcaagcagacccctgtgcacggcctggaatggatcggagccatcgaccctgagacaggcggcaccgcctacaaccagaagttcgagggcaaggccatcctgaccgccgacaagagcagcagcacagcctacatggaactgcggagcctgacctccgaggacagccccgtgtactactgtgccagacggcggtactacggcagcagctccttcgactattggggccagggcaccaccctgaccgtgtctagtacgcgtatccagaaccctgatcctgccgtgtaccagctgcgggatagcaagagcagcgacaagagcgtgtgtctgttcaccgacttcgacagccagaccaacgtgtcccagagcaaggactccgacgtgtacatcaccgataagtgcgtgctggacatgcggagcatggacttcaagagcaactccgccgtggcctggtccaacaagtccgatttcgcctgcgccaacgccttcaacaacagcattatccccgaggacacattcttcccaagccccgagagcagctgcgacgtgaagctggtggaaaagagcttcgagacagacaccaacctgaacttccagatcctgtacgagatcctgctgggcaaggccaccctgtacgccgtgctggtgtctgccctggtgctgatggctatggtcaagcggaaggacagccgggga

SEQ ID NO: 5303 - DNA, 2277 bp, synthetic construct
  source 1..2277: mol_type = other DNA
atggccttaccagtgaccgccttgctcctgccgctggccttgctgctccacgccgccaggccggaagtgcagctggttgaatctggcggaggactggttcagcctggcggatctctgagactgtcttgtgccgccagcggcttcagcttcagcgacttttggatgagctgggtccgacaggcccctggcaaaggacttgaatgggtcgccacaatcagccaggccggcagcgagaaggactacgtggactctgtgaagggcagattcaccatcagccgggacaacgccaagaagtccctgtacctccagatgaacagcctgagagccgaggacaccgccgtgtactattgtgcctctggcgtgtacagcttcgactacagaggccagggcaccctggtcacagtctcttctggtaccggcggaggcggatctggcggcggaggtagcggtggcggaggatctgaattcgacatcgtcctgacccagtccccagccagcctggcggtgtccctgggtcaacgagctaccatttcctgcagagcctctaagtccgtatccacttccggctatagttacctgcattggtaccaacagaaaccagggcagccacccaagctgctcatctatctggcctcaaacctggagtccggcgtgcccgccagattctccggaagtgggagcggcaccgactttacattgaacatccacccagtcgaagaggaagatgctgccacttattactgtcagcactccagggagctgccatttacatttggctctggcacaaaactggagatcaaactcgaggacctgaagaacgtgttcccacctgaggtggccgtgttcgagcctagcgaggccgagatcagccacacccagaaagccaccctcgtgtgcctggctaccggcttctaccccgaccatgtggaactgtcttggtgggtcaacggcaaagaggtgcacagcggcgtgtgtaccgacccccagccactgaaagaacagcccgccctgaacgacagccggtactgcctgagcagcagactgagagtgtccgccaccttctggcagaacccccggaaccacttcagatgccaggtgcagttctacggcctgagcgagaacgacgagtggacccaggacagagccaagcccgtgacccagatcgtgtctgccgaagcctggggcagagccgattgcggctttaccagcgagagctaccagcagggcgtgctgagcgccaccaacctgagcgtgatcggcttcagaatcctgctgctgaaagtggccggctttaacctgctgatgaccctgcggctgtggtccagcagggccaagcgatctggatctggagcaacaaacttctcactactcaaacaagcaggtgacgtggaggagaatcccgggcctactagtatggactggatttggcgcatccttttccttgtcggcgctgctaccggcgcgcattccttcgaacaggttcagctggtcgagtccgggggaggtctggtacagccgggtggcagcctcaagctgtcatgtgccgcatctggttttgactttagcaggtattggatgagctgggtccgccaggccccgggcaagggacttgagtggattggagaaataaaccctacttccagcacaatcaacttcacaccttctttgaaagataaggtttttatctctcgggataacgctaaaaacacactgtacttgcagatgtctaaggtgcgaagcgaagacaccgccctctattattgcgcccggggtaattactaccgctatggggatgcgatggactattgggggcaaggtacctccgtcacggtctcaacgcgtatccagaaccctgatcctgccgtgtaccagctgcgggatagcaagagcagcgacaagagcgtgtgtctgttcaccgacttcgacagccagaccaacgtgtcccagagcaaggactccgacgtgtacatcaccgataagtgcgtgctggacatgcggagcatggacttcaagagcaactccgccgtggcctggtccaacaagtccgatttcgcctgcgccaacgccttcaacaacagcattatccccgaggacacattcttcccaagccccgagagcagctgcgacgtgaagctggtggaaaagagcttcgagacagacaccaacctgaacttccagatcctgtacgagatcctgctgggcaaggccaccctgtacgccgtgctggtgtctgccctggtgctgatggctatggtcaagcggaaggacagccgggga

SEQ ID NO: 5304 - DNA, 2271 bp, synthetic construct
  source 1..2271: mol_type = other DNA
atggccttaccagtgaccgccttgctcctgccgctggccttgctgctccacgccgccaggccggaagtgcagctggttgaatctggcggaggactggttcagcctggcggatctctgagactgtcttgtgccgccagcggcttcagcttcagcgacttttggatgagctgggtccgacaggcccctggcaaaggacttgaatgggtcgccacaatcagccaggccggcagcgagaaggactacgtggactctgtgaagggcagattcaccatcagccgggacaacgccaagaagtccctgtacctccagatgaacagcctgagagccgaggacaccgccgtgtactattgtgcctctggcgtgtacagcttcgactacagaggccagggcaccctggtcacagtctcttctggtaccggcggaggcggatctggcggcggaggtagcggtggcggaggatctgaattcgacatccagatgacccagagccctagctcactgagcgccagcgtgggcgacagggtgaccattacctgctccgccagccaggacatcagcaactacctgaactggtaccagcagaagcccggcaaggcccccaagctgctgatctactacacctccaacctgcactccggcgtgcccagcaggttcagcggaagcggcagcggcaccgatttcaccctgaccatctccagcctgcagcccgaggacttcgccacctactactgccagcagtacaggaagctcccctggactttcggccagggcaccaaactggagatcaagcgtctcgaggacctgaagaacgtgttcccacctgaggtggccgtgttcgagcctagcgaggccgagatcagccacacccagaaagccaccctcgtgtgcctggctaccggcttctaccccgaccatgtggaactgtcttggtgggtcaacggcaaagaggtgcacagcggcgtgtgtaccgacccccagccactgaaagaacagcccgccctgaacgacagccggtactgcctgagcagcagactgagagtgtccgccaccttctggcagaacccccggaaccacttcagatgccaggtgcagttctacggcctgagcgagaacgacgagtggacccaggacagagccaagcccgtgacccagatcgtgtctgccgaagcctggggcagagccgattgcggctttaccagcgagagctaccagcagggcgtgctgagcgccaccaacctgagcgtgatcggcttcagaatcctgctgctgaaagtggccggctttaacctgctgatgaccctgcggctgtggtccagcagggccaagcgatctggatctggagcaacaaacttctcactactcaaacaagcaggtgacgtggaggagaatcccgggcctactagtatggactggatttggcgcatccttttccttgtcggcgctgctaccggcgcgcattccttcgaacaggtgcagctggtccagagcggcgccgaagtgaagaagcccggcagctccgtgaaagtgagctgcaaggccagcggcggcaccttcagcaactactggatgcactgggtgaggcaggcccccggacagggcctggagtggatgggcgccacctacaggggccacagcgacacctactacaaccagaagttcaagggccgggtgaccatcaccgccgacaagagcaccagcaccgcctacatggaactgagcagcctcaggagcgaggacaccgctgtgtattactgcgccaggggcgccatctacgacggctacgacgtgctggacaactggggccagggcacactggtgaccgtgtccagcacgcgtatccagaaccctgatcctgccgtgtaccagctgcgggatagcaagagcagcgacaagagcgtgtgtctgttcaccgacttcgacagccagaccaacgtgtcccagagcaaggactccgacgtgtacatcaccgataagtgcgtgctggacatgcggagcatggacttcaagagcaactccgccgtggcctggtccaacaagtccgatttcgcctgcgccaacgccttcaacaacagcattatccccgaggacacattcttcccaagccccgagagcagctgcgacgtgaagctggtggaaaagagcttcgagacagacaccaacctgaacttccagatcctgtacgagatcctgctgggcaaggccaccctgtacgccgtgctggtgtctgccctggtgctgatggctatggtcaagcggaaggacagccgggga

SEQ ID NO: 5305 - DNA, 2271 bp, synthetic construct
  source 1..2271: mol_type = other DNA
atggccttaccagtgaccgccttgctcctgccgctggccttgctgctccacgccgccaggccggaagtgcagctggttgaatctggcggaggactggttcagcctggcggatctctgagactgtcttgtgccgccagcggcttcagcttcagcgacttttggatgagctgggtccgacaggcccctggcaaaggacttgaatgggtcgccacaatcagccaggccggcagcgagaaggactacgtggactctgtgaagggcagattcaccatcagccgggacaacgccaagaagtccctgtacctccagatgaacagcctgagagccgaggacaccgccgtgtactattgtgcctctggcgtgtacagcttcgactacagaggccagggcaccctggtcacagtctcttctggtaccggcggaggcggatctggcggcggaggtagcggtggcggaggatctgaattcgacatcgtgctgacacagagccctgccaccctgtctctgagccctggcgatagagccaccatcagctgtagagccagcgagagcgtgaccatcctgggcagccacctgatctactggtatcagcagaagcccggccagccccccagactgctgattcagctggcctccaatgtgcagaccggcgtgccagccagattttccggcagcggcagcagaaccgacttcaccctgaccatcagcagcgtggaacccgaggacttcgccgtgtactactgcctccagagccggaccatccccagaacattcggccagggcaccaagctggaaatcaagagactcgaggacctgaagaacgtgttcccacctgaggtggccgtgttcgagcctagcgaggccgagatcagccacacccagaaagccaccctcgtgtgcctggctaccggcttctaccccgaccatgtggaactgtcttggtgggtcaacggcaaagaggtgcacagcggcgtgtgtaccgacccccagccactgaaagaacagcccgccctgaacgacagccggtactgcctgagcagcagactgagagtgtccgccaccttctggcagaacccccggaaccacttcagatgccaggtgcagttctacggcctgagcgagaacgacgagtggacccaggacagagccaagcccgtgacccagatcgtgtctgccgaagcctggggcagagccgattgcggctttaccagcgagagctaccagcagggcgtgctgagcgccaccaacctgagcgtgatcggcttcagaatcctgctgctgaaagtggccggctttaacctgctgatgaccctgcggctgtggtccagcagggccaagcgatctggatctggagcaacaaacttctcactactcaaacaagcaggtgacgtggaggagaatcccgggcctactagtatggactggatttggcgcatccttttccttgtcggcgctgctaccggcgcgcattccttcgaacaggtgcagctggtgcagtctggccccgaagtgaagaaacccggcgagtccgtgaagatcagctgcaaggccagcggctacaccttccggcactacagcatgaactgggtcaagcaggccccaggccagggcctgaagtggatgggcagaatcaacaccgagagcggcgtgcccatctacgccgacgacttcaagggccggttcagcttcaccgtggacaccagcgccagcaccgcctacctggaaatctccagcctgaccagcgaggataccgccgtgtatttctgctccaacgactacctgtacagcctggatttctggggccagggaaccaccctgacagtgtcctctacgcgtatccagaaccctgatcctgccgtgtaccagctgcgggatagcaagagcagcgacaagagcgtgtgtctgttcaccgacttcgacagccagaccaacgtgtcccagagcaaggactccgacgtgtacatcaccgataagtgcgtgctggacatgcggagcatggacttcaagagcaactccgccgtggcctggtccaacaagtccgatttcgcctgcgccaacgccttcaacaacagcattatccccgaggacacattcttcccaagccccgagagcagctgcgacgtgaagctggtggaaaagagcttcgagacagacaccaacctgaacttccagatcctgtacgagatcctgctgggcaaggccaccctgtacgccgtgctggtgtctgccctggtgctgatggctatggtcaagcggaaggacagccgggga

SEQ ID NO: 5306 - DNA, 2274 bp, synthetic construct
  source 1..2274: mol_type = other DNA
atggccttaccagtgaccgccttgctcctgccgctggccttgctgctccacgccgccaggccggaagtgcagctggttgaatctggcggaggactggttcagcctggcggatctctgagactgtcttgtgccgccagcggcttcagcttcagcgacttttggatgagctgggtccgacaggcccctggcaaaggacttgaatgggtcgccacaatcagccaggccggcagcgagaaggactacgtggactctgtgaagggcagattcaccatcagccgggacaacgccaagaagtccctgtacctccagatgaacagcctgagagccgaggacaccgccgtgtactattgtgcctctggcgtgtacagcttcgactacagaggccagggcaccctggtcacagtctcttctggtaccggcggaggcggatctggcggcggaggtagcggtggcggaggatctgaattccagtctgtgctgacacagcctcctagtgtgtctggcgctcctggacagagagtgaccatcagctgtacaggcagcagcagcaatatcggagccggctttgacgtgcactggtatcagcagctgcctggcacagcccctaaactgctgatctacggcaacagcaacagacccagcggcgtgcccgatagattttccggctctaagagcggcacaagcgccagcctggctattactggactccaggccgaggacgaggccgactactactgtcagagctacgacagcagcctgagcggctacgttttcggcaccggcaccaaagtgacagtgcttggtctcgaggacctgaagaacgtgttcccacctgaggtggccgtgttcgagcctagcgaggccgagatcagccacacccagaaagccaccctcgtgtgcctggctaccggcttctaccccgaccatgtggaactgtcttggtgggtcaacggcaaagaggtgcacagcggcgtgtgtaccgacccccagccactgaaagaacagcccgccctgaacgacagccggtactgcctgagcagcagactgagagtgtccgccaccttctggcagaacccccggaaccacttcagatgccaggtgcagttctacggcctgagcgagaacgacgagtggacccaggacagagccaagcccgtgacccagatcgtgtctgccgaagcctggggcagagccgattgcggctttaccagcgagagctaccagcagggcgtgctgagcgccaccaacctgagcgtgatcggcttcagaatcctgctgctgaaagtggccggctttaacctgctgatgaccctgcggctgtggtccagcagggccaagcgatctggatctggagcaacaaacttctcactactcaaacaagcaggtgacgtggaggagaatcccgggcctactagtatggactggatttggcgcatccttttccttgtcggcgctgctaccggcgcgcattccttcgaacaagttcagctggttcagagcggagccgaagtgaagaaacctggggcctctgtgaaggtgtcctgcaaggcttccggctacacctttaccgattactacatgcactgggtccgacaggctcccggccaaagacttgaatggatgggctggatcaaccccaacagcggcggcacaaattacgcccagaagttccaggaccggatcaccgtgaccagagacaccagctccaacaccggctacatggaactgacccggctgagatccgatgacaccgccgtgtactactgcgctagaagcccttactccggcgtgctggataagtggggacagggcacactggtcaccgtgtcatctacgcgtatccagaaccctgatcctgccgtgtaccagctgcgggatagcaagagcagcgacaagagcgtgtgtctgttcaccgacttcgacagccagaccaacgtgtcccagagcaaggactccgacgtgtacatcaccgataagtgcgtgctggacatgcggagcatggacttcaagagcaactccgccgtggcctggtccaacaagtccgatttcgcctgcgccaacgccttcaacaacagcattatccccgaggacacattcttcccaagccccgagagcagctgcgacgtgaagctggtggaaaagagcttcgagacagacaccaacctgaacttccagatcctgtacgagatcctgctgggcaaggccaccctgtacgccgtgctggtgtctgccctggtgctgatggctatggtcaagcggaaggacagccgggga

SEQ ID NO: 5307 - DNA, 2265 bp, synthetic construct
  source 1..2265: mol_type = other DNA
atggccttaccagtgaccgccttgctcctgccgctggccttgctgctccacgccgccaggccggaagtgcagctggttgaatctggcggaggactggttcagcctggcggatctctgagactgtcttgtgccgccagcggcttcagcttcagcgacttttggatgagctgggtccgacaggcccctggcaaaggacttgaatgggtcgccacaatcagccaggccggcagcgagaaggactacgtggactctgtgaagggcagattcaccatcagccgggacaacgccaagaagtccctgtacctccagatgaacagcctgagagccgaggacaccgccgtgtactattgtgcctctggcgtgtacagcttcgactacagaggccagggcaccctggtcacagtctcttctggtaccggcggaggcggatctggcggcggaggtagcggtggcggaggatctgaattccaggctgttctgacacagcctccatctgcctctggcacacctggacagagagtgaccatctcctgtagcggcagcagcagcaacatcggcagctacaccgtgtcctggtatcagcagctccctggaacagcccctaagttcctgatctacagcaacaaccagcggcctagcggcgtgcccgatagattttctggcagcaagagcggcacaagcgccagcctggctatttctggactccagtctgaggacgaggccgactactattgtgccgcctgggacgatagcctgaacggctatgtgtttggcaccggcaccaaagtgacagtgcttggtctcgaggacctgaagaacgtgttcccacctgaggtggccgtgttcgagcctagcgaggccgagatcagccacacccagaaagccaccctcgtgtgcctggctaccggcttctaccccgaccatgtggaactgtcttggtgggtcaacggcaaagaggtgcacagcggcgtgtgtaccgacccccagccactgaaagaacagcccgccctgaacgacagccggtactgcctgagcagcagactgagagtgtccgccaccttctggcagaacccccggaaccacttcagatgccaggtgcagttctacggcctgagcgagaacgacgagtggacccaggacagagccaagcccgtgacccagatcgtgtctgccgaagcctggggcagagccgattgcggctttaccagcgagagctaccagcagggcgtgctgagcgccaccaacctgagcgtgatcggcttcagaatcctgctgctgaaagtggccggctttaacctgctgatgaccctgcggctgtggtccagcagggccaagcgatctggatctggagcaacaaacttctcactactcaaacaagcaggtgacgtggaggagaatcccgggcctactagtatggactggatttggcgcatccttttccttgtcggcgctgctaccggcgcgcattccttcgaagttcaactggttcagagcggagccgaagtgaagaagcctggcgagagcctgaagattagctgcaaaggcagcggctacgacttcaccacctactggatcggctgggtccgacagatgcctggcaaaggactggaatggatgggcatcatctaccccggcgacagcgacaccagatacagccctagcgttagaggccgcgtgaccatcagcgccgacaagtctatcaacaccgcctacctccagtggtccagcctggaagcctctgacaccgccatgtactactgcgccagaatgtggaccttcagccaggatggatggggccagggaacactggtcacagtgtcatctacgcgtatccagaaccctgatcctgccgtgtaccagctgcgggatagcaagagcagcgacaagagcgtgtgtctgttcaccgacttcgacagccagaccaacgtgtcccagagcaaggactccgacgtgtacatcaccgataagtgcgtgctggacatgcggagcatggacttcaagagcaactccgccgtggcctggtccaacaagtccgatttcgcctgcgccaacgccttcaacaacagcattatccccgaggacacattcttcccaagccccgagagcagctgcgacgtgaagctggtggaaaagagcttcgagacagacaccaacctgaacttccagatcctgtacgagatcctgctgggcaaggccaccctgtacgccgtgctggtgtctgccctggtgctgatggctatggtcaagcggaaggacagccgggga

SEQ ID NO: 5308 - DNA, 2274 bp, synthetic construct
  source 1..2274: mol_type = other DNA
atggccttaccagtgaccgccttgctcctgccgctggccttgctgctccacgccgccaggccggaagtgcagctggttgaatctggcggaggactggttcagcctggcggatctctgagactgtcttgtgccgccagcggcttcagcttcagcgacttttggatgagctgggtccgacaggcccctggcaaaggacttgaatgggtcgccacaatcagccaggccggcagcgagaaggactacgtggactctgtgaagggcagattcaccatcagccgggacaacgccaagaagtccctgtacctccagatgaacagcctgagagccgaggacaccgccgtgtactattgtgcctctggcgtgtacagcttcgactacagaggccagggcaccctggtcacagtctcttctggtaccggcggaggcggatctggcggcggaggtagcggtggcggaggatctgaattcgacatcgtgatgacccagagccccgatagcctggccgtgtctctgggagagagagccaccatcaactgcaagagcagccagagcatcctgtacagcagcaaccagaagaactacctggcctggtatcagcagaagcccggccagagccctaagctgctgatctactgggccagcaccagagaaagcggcgtgcccgatagattcagcggcagcggctctggcaccgacttcaccctgaccatcagttctcttcaggccgaggacgtggccgtgtactactgccaccagtacatcagctcctacaccttcggccagggcaccaagctggaaatcaagctcgaggacctgaagaacgtgttcccacctgaggtggccgtgttcgagcctagcgaggccgagatcagccacacccagaaagccaccctcgtgtgcctggctaccggcttctaccccgaccatgtggaactgtcttggtgggtcaacggcaaagaggtgcacagcggcgtgtgtaccgacccccagccactgaaagaacagcccgccctgaacgacagccggtactgcctgagcagcagactgagagtgtccgccaccttctggcagaacccccggaaccacttcagatgccaggtgcagttctacggcctgagcgagaacgacgagtggacccaggacagagccaagcccgtgacccagatcgtgtctgccgaagcctggggcagagccgattgcggctttaccagcgagagctaccagcagggcgtgctgagcgccaccaacctgagcgtgatcggcttcagaatcctgctgctgaaagtggccggctttaacctgctgatgaccctgcggctgtggtccagcagggccaagcgatctggatctggagcaacaaacttctcactactcaaacaagcaggtgacgtggaggagaatcccgggcctactagtatggactggatttggcgcatccttttccttgtcggcgctgctaccggcgcgcattccttcgaacaggtgcagctggtgcagtctggcgctgaagtgaagaaacctggggccagcgtgaaggtgtcctgcaaggccagcggctacacctttgccagccagtggatgcactggatgagacaggcccctggacagggcctggaatggatcggctggatcaaccccggcaacgtgaacaccaagtacaacgagaagttcaagggcagagccaccctgacagtggacaccagcaccaacaccgcctacatggaactgagcagcctgcggagcgaggacaccgccgtgtattattgcgccagaagcacctggtacagacccctggattattggggccagggaacccttgtgaccgtgtcctctacgcgtatccagaaccctgatcctgccgtgtaccagctgcgggatagcaagagcagcgacaagagcgtgtgtctgttcaccgacttcgacagccagaccaacgtgtcccagagcaaggactccgacgtgtacatcaccgataagtgcgtgctggacatgcggagcatggacttcaagagcaactccgccgtggcctggtccaacaagtccgatttcgcctgcgccaacgccttcaacaacagcattatccccgaggacacattcttcccaagccccgagagcagctgcgacgtgaagctggtggaaaagagcttcgagacagacaccaacctgaacttccagatcctgtacgagatcctgctgggcaaggccaccctgtacgccgtgctggtgtctgccctggtgctgatggctatggtcaagcggaaggacagccgggga

SEQ ID NO: 5309 - DNA, 2274 bp, synthetic construct
  source 1..2274: mol_type = other DNA
atggccttaccagtgaccgccttgctcctgccgctggccttgctgctccacgccgccaggccggaagtgcagctggttgaatctggcggaggactggttcagcctggcggatctctgagactgtcttgtgccgccagcggcttcagcttcagcgacttttggatgagctgggtccgacaggcccctggcaaaggacttgaatgggtcgccacaatcagccaggccggcagcgagaaggactacgtggactctgtgaagggcagattcaccatcagccgggacaacgccaagaagtccctgtacctccagatgaacagcctgagagccgaggacaccgccgtgtactattgtgcctctggcgtgtacagcttcgactacagaggccagggcaccctggtcacagtctcttctggtaccggcggaggcggatctggcggcggaggtagcggtggcggaggatctgaattcgaccacatcgtgctgacccagagccctagcagcctgtctgccagcctgggcgacagagtgaccatcagctgtagagccagccaggacatcagcacctacctgaactggtatcagcagaaacccgacggcaccgtgaagctgctgatcttctacaccagcagactgcacgccggggtgcccagcagattttctggcagcggctctggcacccaccacagcctgaccatctccaacctggaacaggaagatattgctacctacttctgtcagcaaggcaacagcctgcccttcaccttcggcagcggcaccaagctggaaatcaagagactcgaggacctgaagaacgtgttcccacctgaggtggccgtgttcgagcctagcgaggccgagatcagccacacccagaaagccaccctcgtgtgcctggctaccggcttctaccccgaccatgtggaactgtcttggtgggtcaacggcaaagaggtgcacagcggcgtgtgtaccgacccccagccactgaaagaacagcccgccctgaacgacagccggtactgcctgagcagcagactgagagtgtccgccaccttctggcagaacccccggaaccacttcagatgccaggtgcagttctacggcctgagcgagaacgacgagtggacccaggacagagccaagcccgtgacccagatcgtgtctgccgaagcctggggcagagccgattgcggctttaccagcgagagctaccagcagggcgtgctgagcgccaccaacctgagcgtgatcggcttcagaatcctgctgctgaaagtggccggctttaacctgctgatgaccctgcggctgtggtccagcagggccaagcgatctggatctggagcaacaaacttctcactactcaaacaagcaggtgacgtggaggagaatcccgggcctactagtatggactggatttggcgcatccttttccttgtcggcgctgctaccggcgcgcattccttcgaacaggtgcagctgaaagagagcggccctgagctggaaaagcctggggccagcgtgaagattagctgcaaggccagcggctacagcttcaccgcctacagcatgaactgggtcaagcagaacaacggcatgagcctggaatggatcggcagcatcgacccctactacggcgacaccaaatacgcccagaagttcaagggcaaggccaccctgaccgtggataaggccagcagcaccgcctacctccagctgaagtctctgaccagcgaggacagcgccgtgtactactgcgccagacggatgattaccaccggcgactggtacttcgacgtgtggggagccggaaccaccgtgacagtgtctagcacgcgtatccagaaccctgatcctgccgtgtaccagctgcgggatagcaagagcagcgacaagagcgtgtgtctgttcaccgacttcgacagccagaccaacgtgtcccagagcaaggactccgacgtgtacatcaccgataagtgcgtgctggacatgcggagcatggacttcaagagcaactccgccgtggcctggtccaacaagtccgatttcgcctgcgccaacgccttcaacaacagcattatccccgaggacacattcttcccaagccccgagagcagctgcgacgtgaagctggtggaaaagagcttcgagacagacaccaacctgaacttccagatcctgtacgagatcctgctgggcaaggccaccctgtacgccgtgctggtgtctgccctggtgctgatggctatggtcaagcggaaggacagccgggga

SEQ ID NO: 5310 - DNA, 2274 bp, synthetic construct; identical to SEQ ID NO: 5309
  source 1..2274: mol_type = other DNA

SEQ ID NO: 5311 - DNA, 2274 bp, synthetic construct
  source 1..2274: mol_type = other DNA
atggccttaccagtgaccgccttgctcctgccgctggccttgctgctccacgccgccaggccggaagtgcagctggttgaatctggcggaggactggttcagcctggcggatctctgagactgtcttgtgccgccagcggcttcagcttcagcgacttttggatgagctgggtccgacaggcccctggcaaaggacttgaatgggtcgccacaatcagccaggccggcagcgagaaggactacgtggactctgtgaagggcagattcaccatcagccgggacaacgccaagaagtccctgtacctccagatgaacagcctgagagccgaggacaccgccgtgtactattgtgcctctggcgtgtacagcttcgactacagaggccagggcaccctggtcacagtctcttctggtaccggcggaggcggatctggcggcggaggtagcggtggcggaggatctgaattcgacgagatcgtgctgacacagagccctgccaccctgtctctgagccctggcgaaagagccaccctgagctgtagagccagccagagcgtgtccagctacctggcctggtatcagcagaagcccggccaggctccccggctgctgatctacgatgccagcaatagagccaccggcatccccgccagattttccggctctggcagcggcaccgacttcaccctgaccatcagctccctggaacccgaggacttcgccgtgtactactgccagcagcggagcaactggcccatcacattcggccagggcacccggctggaaatcaaactcgaggacctgaagaacgtgttcccacctgaggtggccgtgttcgagcctagcgaggccgagatcagccacacccagaaagccaccctcgtgtgcctggctaccggcttctaccccgaccatgtggaactgtcttggtgggtcaacggcaaagaggtgcacagcggcgtgtgtaccgacccccagccactgaaagaacagcccgccctgaacgacagccggtactgcctgagcagcagactgagagtgtccgccaccttctggcagaacccccggaaccacttcagatgccaggtgcagttctacggcctgagcgagaacgacgagtggacccaggacagagccaagcccgtgacccagatcgtgtctgccgaagcctggggcagagccgattgcggctttaccagcgagagctaccagcagggcgtgctgagcgccaccaacctgagcgtgatcggcttcagaatcctgctgctgaaagtggccggctttaacctgctgatgaccctgcggctgtggtccagcagggccaagcgatctggatctggagcaacaaacttctcactactcaaacaagcaggtgacgtggaggagaatcccgggcctactagtatggactggatttggcgcatccttttccttgtcggcgctgctaccggcgcgcattccttcgaagaagtgcagctggtggaatcaggcggcggactggtgcagcctggcagaagcctgagactgagctgtgccgccagcggcttcaccttcaacgactacgccatgcactgggtgcgccaggcccctggaaaaggactggaatgggtgtccacaatcagctggaacagcggcagcatcggctacgccgatagcgtgaagggccggttcaccatcagccgggacaacgccaagaagtccctgtacctccagatgaacagcctgcgggccgaggacacagccctgtactattgcgccaaggacatccagtacggcaactactactacggcatggacgtgtggggccagggaaccaccgtgaccgtgtcatctacgcgtatccagaaccctgatcctgccgtgtaccagctgcgggatagcaagagcagcgacaagagcgtgtgtctgttcaccgacttcgacagccagaccaacgtgtcccagagcaaggactccgacgtgtacatcaccgataagtgcgtgctggacatgcggagcatggacttcaagagcaactccgccgtggcctggtccaacaagtccgatttcgcctgcgccaacgccttcaacaacagcattatccccgaggacacattcttcccaagccccgagagcagctgcgacgtgaagctggtggaaaagagcttcgagacagacaccaacctgaacttccagatcctgtacgagatcctgctgggcaaggccaccctgtacgccgtgctggtgtctgccctggtgctgatggctatggtcaagcggaaggacagccgggga

SEQ ID NO: 5312 - DNA, 2280 bp, synthetic construct
  source 1..2280: mol_type = other DNA
atggccttaccagtgaccgccttgctcctgccgctggccttgctgctccacgccgccaggccggaagtgcagctggttgaatctggcggaggactggttcagcctggcggatctctgagactgtcttgtgccgccagcggcttcagcttcagcgacttttggatgagctgggtccgacaggcccctggcaaaggacttgaatgggtcgccacaatcagccaggccggcagcgagaaggactacgtggactctgtgaagggcagattcaccatcagccgggacaacgccaagaagtccctgtacctccagatgaacagcctgagagccgaggacaccgccgtgtactattgtgcctctggcgtgtacagcttcgactacagaggccagggcaccctggtcacagtctcttctggtaccggcggaggcggatctggcggcggaggtagcggtggcggaggatctgaattcgacatcgtgatgacccagacccccctgagcctgcctgtgacacctggcgagcctgccagcatctcctgcagaagcagcaagagcctgctgcacagcaacggcatcacctacctgtactggtatctgcagaaacccggccagagcccccaactgctgatctaccagatgagcaacctggtgtccggcgtgcccgacagattttctggcagcggctccggcaccgacttcaccctgaagatcagccgggtggaagccgaggacgtgggcgtgtactactgcgcccagaacctggaactgccctacacctttggcggcggaacaaaggtggaaatcaagcggctcgaggacctgaagaacgtgttcccacctgaggtggccgtgttcgagcctagcgaggccgagatcagccacacccagaaagccaccctcgtgtgcctggctaccggcttctaccccgaccatgtggaactgtcttggtgggtcaacggcaaagaggtgcacagcggcgtgtgtaccgacccccagccactgaaagaacagcccgccctgaacgacagccggtactgcctgagcagcagactgagagtgtccgccaccttctggcagaacccccggaaccacttcagatgccaggtgcagttctacggcctgagcgagaacgacgagtggacccaggacagagccaagcccgtgacccagatcgtgtctgccgaagcctggggcagagccgattgcggctttaccagcgagagctaccagcagggcgtgctgagcgccaccaacctgagcgtgatcggcttcagaatcctgctgctgaaagtggccggctttaacctgctgatgaccctgcggctgtggtccagcagggccaagcgatctggatctggagcaacaaacttctcactactcaaacaagcaggtgacgtggaggagaatcccgggcctactagtatggactggatttggcgcatccttttccttgtcggcgctgctaccggcgcgcattccttcgaacaggtgcaactggtgcagagcggagccgaagtgaaaaagcccggcagcagcgtgaaggtgtcctgcaaggccagcggctacgccttcagctactcctggatcaactgggtgcgccaggcccctggacagggcctggaatggatgggcagaatcttccccggcgacggcgacaccgactacaacggcaagttcaagggcagagtgaccatcaccgccgacaagagcaccagcaccgcctacatggaactgagcagcctgcggagcgaggataccgccgtgtactattgtgccagaaacgtgttcgacggctactggctggtgtactggggccagggaacacttgtgaccgtgtccagcacgcgtatccagaaccctgatcctgccgtgtaccagctgcgggatagcaagagcagcgacaagagcgtgtgtctgttcaccgacttcgacagccagaccaacgtgtcccagagcaaggactccgacgtgtacatcaccgataagtgcgtgctggacatgcggagcatggacttcaagagcaactccgccgtggcctggtccaacaagtccgatttcgcctgcgccaacgccttcaacaacagcattatccccgaggacacattcttcccaagccccgagagcagctgcgacgtgaagctggtggaaaagagcttcgagacagacaccaacctgaacttccagatcctgtacgagatcctgctgggcaaggccaccctgtacgccgtgctggtgtctgccctggtgctgatggctatggtcaagcggaaggacagccgggga

SEQ ID NO: 5313 - DNA, 2283 bp, synthetic construct
  source 1..2283: mol_type = other DNA
atggccttaccagtgaccgccttgctcctgccgctggccttgctgctccacgccgccaggccggaagtgcagctggttgaatctggcggaggactggttcagcctggcggatctctgagactgtcttgtgccgccagcggcttcagcttcagcgacttttggatgagctgggtccgacaggcccctggcaaaggacttgaatgggtcgccacaatcagccaggccggcagcgagaaggactacgtggactctgtgaagggcagattcaccatcagccgggacaacgccaagaagtccctgtacctccagatgaacagcctgagagccgaggacaccgccgtgtactattgtgcctctggcgtgtacagcttcgactacagaggccagggcaccctggtcacagtctcttctggtaccggcggaggcggatctggcggcggaggtagcggtggcggaggatctgaattcgacatccagatgacccagagccccagcagcctgtctgccagcgtgggcgacagagtgaccatcacctgtcggagcagccagagcatcgtgcactccgtgggcaacaccttcctggaatggtatcagcagaagcccggcaaggcccccaagctgctgatctacaaggtgtccaacagattcagcggcgtgcccagcaggtttagcggctctggcagcggcaccgacttcaccctgaccatctctagcctccagcccgaggacttcgccacctactactgttttcaaggcagccagttcccctacaccttcggccagggaacaaaggtggaaatcaagcggctcgaggacctgaagaacgtgttcccacctgaggtggccgtgttcgagcctagcgaggccgagatcagccacacccagaaagccaccctcgtgtgcctggctaccggcttctaccccgaccatgtggaactgtcttggtgggtcaacggcaaagaggtgcacagcggcgtgtgtaccgacccccagccactgaaagaacagcccgccctgaacgacagccggtactgcctgagcagcagactgagagtgtccgccaccttctggcagaacccccggaaccacttcagatgccaggtgcagttctacggcctgagcgagaacgacgagtggacccaggacagagccaagcccgtgacccagatcgtgtctgccgaagcctggggcagagccgattgcggctttaccagcgagagctaccagcagggcgtgctgagcgccaccaacctgagcgtgatcggcttcagaatcctgctgctgaaagtggccggctttaacctgctgatgaccctgcggctgtggtccagcagggccaagcgatctggatctggagcaacaaacttctcactactcaaacaagcaggtgacgtggaggagaatcccgggcctactagtatggactggatttggcgcatccttttccttgtcggcgctgctaccggcgcgcattccttcgaagaagtgcaactggtggaaagcggaggcggcctggtgcagcctggcggatctctgagactgagctgtgccgccagcggctacgagttcagccggtcctggatgaactgggtgcgccaggcccctggcaagggactggaatgggtgggaagaatctaccccggcgacggcgacaccaactacagcggcaagttcaagggccggttcaccatcagcgccgacaccagcaagaacaccgcctacctccagatgaacagcctgcgggccgaggataccgccgtgtactactgtgccagagatggcagctcctgggactggtacttcgacgtgtggggacagggaacccttgtgaccgtgtccagcacgcgtatccagaaccctgatcctgccgtgtaccagctgcgggatagcaagagcagcgacaagagcgtgtgtctgttcaccgacttcgacagccagaccaacgtgtcccagagcaaggactccgacgtgtacatcaccgataagtgcgtgctggacatgcggagcatggacttcaagagcaactccgccgtggcctggtccaacaagtccgatttcgcctgcgccaacgccttcaacaacagcattatccccgaggacacattcttcccaagccccgagagcagctgcgacgtgaagctggtggaaaagagcttcgagacagacaccaacctgaacttccagatcctgtacgagatcctgctgggcaaggccaccctgtacgccgtgctggtgtctgccctggtgctgatggctatggtcaagcggaaggacagccgggga

SEQ ID NO: 5314 - DNA, 2277 bp, synthetic construct
  source 1..2277: mol_type = other DNA
atggccttaccagtgaccgccttgctcctgccgctggccttgctgctccacgccgccaggccggaagtgcagctggttgaatctggcggaggactggttcagcctggcggatctctgagactgtcttgtgccgccagcggcttcagcttcagcgacttttggatgagctgggtccgacaggcccctggcaaaggacttgaatgggtcgccacaatcagccaggccggcagcgagaaggactacgtggactctgtgaagggcagattcaccatcagccgggacaacgccaagaagtccctgtacctccagatgaacagcctgagagccgaggacaccgccgtgtactattgtgcctctggcgtgtacagcttcgactacagaggccagggcaccctggtcacagtctcttctggtaccggcggaggcggatctggcggcggaggtagcggtggcggaggatctgaattcgacatccagatgacccagagccccagcagcctgtctgccagcgtgggcgacagagtgaccatcacctgtagagccagccagaccatctggtcctacctgaactggtatcagcagaggcccggcaaggcccccaacctgctgatctatgccgccagctctctccagagcggcgtgcccagcagattttccggcagaggcagcggcaccgacttcaccctgaccatcagttccttgcaggccgaggacttcgccacctactactgccagcagagctacagcatcccccagattttcggccagggcaccaagctggaaatcaagctcgaggacctgaagaacgtgttcccacctgaggtggccgtgttcgagcctagcgaggccgagatcagccacacccagaaagccaccctcgtgtgcctggctaccggcttctaccccgaccatgtggaactgtcttggtgggtcaacggcaaagaggtgcacagcggcgtgtgtaccgacccccagccactgaaagaacagcccgccctgaacgacagccggtactgcctgagcagcagactgagagtgtccgccaccttctggcagaacccccggaaccacttcagatgccaggtgcagttctacggcctgagcgagaacgacgagtggacccaggacagagccaagcccgtgacccagatcgtgtctgccgaagcctggggcagagccgattgcggctttaccagcgagagctaccagcagggcgtgctgagcgccaccaacctgagcgtgatcggcttcagaatcctgctgctgaaagtggccggctttaacctgctgatgaccctgcggctgtggtccagcagggccaagcgatctggatctggagcaacaaacttctcactactcaaacaagcaggtgacgtggaggagaatcccgggcctactagtatggactggatttggcgcatccttttccttgtcggcgctgctaccggcgcgcattccttcgaacaggtgcagctccagcagtctggacccggcctcgtgaagcctagccagacactgagcctgacctgcgccatcagcggcgatagcgtgtccagcaatagcgccgcctggaactggatcagacagtccccctctcggggcctggaatggctgggccggacctactaccgcagcaagtggtacaacgactacgccgtgtccgtgaagtcccggatcaccatcaaccccgacaccagcaagaaccagttctccttgcaactgaacagcgtgacccccgaggacaccgccgtgtactactgcgccagagaagtgaccggcgacctggaagatgccttcgacatctggggccagggaacaatggtcacagtgtccagcacgcgtatccagaaccctgatcctgccgtgtaccagctgcgggatagcaagagcagcgacaagagcgtgtgtctgttcaccgacttcgacagccagaccaacgtgtcccagagcaaggactccgacgtgtacatcaccgataagtgcgtgctggacatgcggagcatggacttcaagagcaactccgccgtggcctggtccaacaagtccgatttcgcctgcgccaacgccttcaacaacagcattatccccgaggacacattcttcccaagccccgagagcagctgcgacgtgaagctggtggaaaagagcttcgagacagacaccaacctgaacttccagatcctgtacgagatcctgctgggcaaggccaccctgtacgccgtgctggtgtctgccctggtgctgatggctatggtcaagcggaaggacagccgggga

SEQ ID NO: 5315 - DNA, 2256 bp, synthetic construct
  source 1..2256: mol_type = other DNA
atggccttaccagtgaccgccttgctcctgccgctggccttgctgctccacgccgccaggccggaagtgcagctggttgaatctggcggaggactggttcagcctggcggatctctgagactgtcttgtgccgccagcggcttcagcttcagcgacttttggatgagctgggtccgacaggcccctggcaaaggacttgaatgggtcgccacaatcagccaggccggcagcgagaaggactacgtggactctgtgaagggcagattcaccatcagccgggacaacgccaagaagtccctgtacctccagatgaacagcctgagagccgaggacaccgccgtgtactattgtgcctctggcgtgtacagcttcgactacagaggccagggcaccctggtcacagtctcttctggtaccggcggaggcggatctggcggcggaggtagcggtggcggaggatctgaattcgacatccagatgacccagagccccgccaccatcgagaacacaagcctgtctgccagcgtgggcgacagagtgaccatcacctgtagagccagccagggcatcagctcttggctgacctggtatcagcagaagcccgagaaggcccccaagagcctgatctacgccgccagctctctgcagtctggcgtgcccagcagattttccggcagcggctctggcaccgacttcaccctgacaatcagcagcctgcagcccgaggacttcgccacctactactgccagcagtacgacagctaccccatcaccttcggccagggcacccggctggaaatcaagctcgaggacctgaagaacgtgttcccacctgaggtggccgtgttcgagcctagcgaggccgagatcagccacacccagaaagccaccctcgtgtgcctggctaccggcttctaccccgaccatgtggaactgtcttggtgggtcaacggcaaagaggtgcacagcggcgtgtgtaccgacccccagccactgaaagaacagcccgccctgaacgacagccggtactgcctgagcagcagactgagagtgtccgccaccttctggcagaacccccggaaccacttcagatgccaggtgcagttctacggcctgagcgagaacgacgagtggacccaggacagagccaagcccgtgacccagatcgtgtctgccgaagcctggggcagagccgattgcggctttaccagcgagagctaccagcagggcgtgctgagcgccaccaacctgagcgtgatcggcttcagaatcctgctgctgaaagtggccggctttaacctgctgatgaccctgcggctgtggtccagcagggccaagcgatctggatctggagcaacaaacttctcactactcaaacaagcaggtgacgtggaggagaatcccgggcctactagtatggactggatttggcgcatccttttccttgtcggcgctgctaccggcgcgcattccttcgaacaggtgcaactgcagcagtggggagccggactgctgaagcctagcgagacactgagcctgacctgcgccgtgtacggcggcagcttcagcgcctactattggagctggatcagacagccccctggcaagggcctggaatggatcggcgacatcaatcacggcggaggcaccaactacaaccccagcctgaagtcccgcgtgaccatctccgtggacaccagcaagaaccagttctccctgaagctgaacagcgtgacagccgccgacacagccgtgtactactgtgccagcctgaccgcctattggggccagggatctcttgtgaccgtgtccagcacgcgtatccagaaccctgatcctgccgtgtaccagctgcgggatagcaagagcagcgacaagagcgtgtgtctgttcaccgacttcgacagccagaccaacgtgtcccagagcaaggactccgacgtgtacatcaccgataagtgcgtgctggacatgcggagcatggacttcaagagcaactccgccgtggcctggtccaacaagtccgatttcgcctgcgccaacgccttcaacaacagcattatccccgaggacacattcttcccaagccccgagagcagctgcgacgtgaagctggtggaaaagagcttcgagacagacaccaacctgaacttccagatcctgtacgagatcctgctgggcaaggccaccctgtacgccgtgctggtgtctgccctggtgctgatggctatggtcaagcggaaggacagccgggga

SEQ ID NO: 5316 - DNA, 2271 bp, synthetic construct
  source 1..2271: mol_type = other DNA
atggccttaccagtgaccgccttgctcctgccgctggccttgctgctccacgccgccaggccggaagtgcagctggttgaatctggcggaggactggttcagcctggcggatctctgagactgtcttgtgccgccagcggcttcagcttcagcgacttttggatgagctgggtccgacaggcccctggcaaaggacttgaatgggtcgccacaatcagccaggccggcagcgagaaggactacgtggactctgtgaagggcagattcaccatcagccgggacaacgccaagaagtccctgtacctccagatgaacagcctgagagccgaggacaccgccgtgtactattgtgcctctggcgtgtacagcttcgactacagaggccagggcaccctggtcacagtctcttctggtaccggcggaggcggatctggcggcggaggtagcggtggcggaggatctgaattcgacgagatcgtgctgacccagagccctgatagcctggccgtgtctctgggcgagagagccaccatcaactgcaaggccagccagagcgtggacttcgacggcgacagctacctgaactggtatcagcagaagcccggccagccccccaaggtgctgatctatgccgccagcacactgcagagcggcgtgcccagcagattttctggcagcggctccggcaccgacttcaccctgaccatcaacagcctggaagccgaggacgccgccacctactactgccagcagagcaacgaggacccctggacctttggcggcggaacaaaggtggaaatcaagctcgaggacctgaagaacgtgttcccacctgaggtggccgtgttcgagcctagcgaggccgagatcagccacacccagaaagccaccctcgtgtgcctggctaccggcttctaccccgaccatgtggaactgtcttggtgggtcaacggcaaagaggtgcacagcggcgtgtgtaccgacccccagccactgaaagaacagcccgccctgaacgacagccggtactgcctgagcagcagactgagagtgtccgccaccttctggcagaacccccggaaccacttcagatgccaggtgcagttctacggcctgagcgagaacgacgagtggacccaggacagagccaagcccgtgacccagatcgtgtctgccgaagcctggggcagagccgattgcggctttaccagcgagagctaccagcagggcgtgctgagcgccaccaacctgagcgtgatcggcttcagaatcctgctgctgaaagtggccggctttaacctgctgatgaccctgcggctgtggtccagcagggccaagcgatctggatctggagcaacaaacttctcactactcaaacaagcaggtgacgtggaggagaatcccgggcctactagtatggactggatttggcgcatccttttccttgtcggcgctgctaccggcgcgcattccttcgaacaggtgcaactggtgcagtccggcgctgaagtgaagaaacctggggccagcgtgaaggtgtcctgcaaggtgtccggctacacctttaccgactactacattacctgggtgcgccaggcccctggacaggccctggaatggatgggctggatctaccccggcagcggcaacaccaagtacagccagaagttccagggcagattcgtgttcagcgtggacaccagcgccagcaccgcctacctgcaactgtctagcctgaaggccgaagataccgccgtgtactactgcgccaactacggcaactattggttcgcctattggggccagggaacccttgtgaccgtgtcctctacgcgtatccagaaccctgatcctgccgtgtaccagctgcgggatagcaagagcagcgacaagagcgtgtgtctgttcaccgacttcgacagccagaccaacgtgtcccagagcaaggactccgacgtgtacatcaccgataagtgcgtgctggacatgcggagcatggacttcaagagcaactccgccgtggcctggtccaacaagtccgatttcgcctgcgccaacgccttcaacaacagcattatccccgaggacacattcttcccaagccccgagagcagctgcgacgtgaagctggtggaaaagagcttcgagacagacaccaacctgaacttccagatcctgtacgagatcctgctgggcaaggccaccctgtacgccgtgctggtgtctgccctggtgctgatggctatggtcaagcggaaggacagccgggga

SEQ ID NO: 5317 - DNA, 2262 bp, synthetic construct
  source 1..2262: mol_type = other DNA
atggccttaccagtgaccgccttgctcctgccgctggccttgctgctccacgccgccaggccggaagtgcagctggttgaatctggcggaggactggttcagcctggcggatctctgagactgtcttgtgccgccagcggcttcagcttcagcgacttttggatgagctgggtccgacaggcccctggcaaaggacttgaatgggtcgccacaatcagccaggccggcagcgagaaggactacgtggactctgtgaagggcagattcaccatcagccgggacaacgccaagaagtccctgtacctccagatgaacagcctgagagccgaggacaccgccgtgtactattgtgcctctggcgtgtacagcttcgactacagaggccagggcaccctggtcacagtctcttctggtaccggcggaggcggatctggcggcggaggtagcggtggcggaggatctgaattcgacatccagatgacccagagccccagcagcctgtctgccagcgtgggcgacagagtgaccatcacctgtagagccagccagggcatcagctcttggctggcctggtatcagcagaagcccgagaaggcccccaagagcctgatctacgccgcctctagtctccagagcggcgtgcccagcagattttctggcagcggctccggcaccgacttcaccctgacaatcagctccctccagcccgaggacttcgccacctactactgccagcagtacaacagctaccctcccacctttggcggaggcaccaaggtggaaatcaagctcgaggacctgaagaacgtgttcccacctgaggtggccgtgttcgagcctagcgaggccgagatcagccacacccagaaagccaccctcgtgtgcctggctaccggcttctaccccgaccatgtggaactgtcttggtgggtcaacggcaaagaggtgcacagcggcgtgtgtaccgacccccagccactgaaagaacagcccgccctgaacgacagccggtactgcctgagcagcagactgagagtgtccgccaccttctggcagaacccccggaaccacttcagatgccaggtgcagttctacggcctgagcgagaacgacgagtggacccaggacagagccaagcccgtgacccagatcgtgtctgccgaagcctggggcagagccgattgcggctttaccagcgagagctaccagcagggcgtgctgagcgccaccaacctgagcgtgatcggcttcagaatcctgctgctgaaagtggccggctttaacctgctgatgaccctgcggctgtggtccagcagggccaagcgatctggatctggagcaacaaacttctcactactcaaacaagcaggtgacgtggaggagaatcccgggcctactagtatggactggatttggcgcatccttttccttgtcggcgctgctaccggcgcgcattccttcgaagaagtgcaactggtgcagtctggcggagggctggtgcatcctgggggaagcctgagactgagctgtgccggctctggcttcgccttcagcagcagcaccatgcactggatcagacaggcccctggcaagggcctggaatggatcagcctgatcggaagcggagggggcatctactacggcgacagcgtgaagggccggttcaccatcagccgggacaacgccaagaacagcctgtacctccagatgaactccctgcgggccgaggacatggccgtgtactattgtgtgcggggctacttcgactgggtggactacttcgattactggggccagggcaccctcgtgaccgtgtcatctacgcgtatccagaaccctgatcctgccgtgtaccagctgcgggatagcaagagcagcgacaagagcgtgtgtctgttcaccgacttcgacagccagaccaacgtgtcccagagcaaggactccgacgtgtacatcaccgataagtgcgtgctggacatgcggagcatggacttcaagagcaactccgccgtggcctggtccaacaagtccgatttcgcctgcgccaacgccttcaacaacagcattatccccgaggacacattcttcccaagccccgagagcagctgcgacgtgaagctggtggaaaagagcttcgagacagacaccaacctgaacttccagatcctgtacgagatcctgctgggcaaggccaccctgtacgccgtgctggtgtctgccctggtgctgatggctatggtcaagcggaaggacagccgggga

SEQ ID NO: 5318 - DNA, 2292 bp, synthetic construct
  source 1..2292: mol_type = other DNA
atggccttaccagtgaccgccttgctcctgccgctggccttgctgctccacgccgccaggccggaagtgcagctggttgaatctggcggaggactggttcagcctggcggatctctgagactgtcttgtgccgccagcggcttcagcttcagcgacttttggatgagctgggtccgacaggcccctggcaaaggacttgaatgggtcgccacaatcagccaggccggcagcgagaaggactacgtggactctgtgaagggcagattcaccatcagccgggacaacgccaagaagtccctgtacctccagatgaacagcctgagagccgaggacaccgccgtgtactattgtgcctctggcgtgtacagcttcgactacagaggccagggcaccctggtcacagtctcttctggtaccggcggaggcggatctggcggcggaggtagcggtggcggaggatctgaattcgacgacatcgtgatgacacagtcaccagatagcctcaccgtctccctgggggagcggaccaccattaattgtaaatccagccaaagcgtgctggactcaagcaagaacaagaatagcctcgcctggtatcagcagaagcccggtcagcctccaaagctgctgctttcttgggcctccaccagagagtccgggattcctgataggtttagtggttcaggctccggcacagattttactctgaccattgattctctccagccagaggattctgcaacttattactgccagcaaagcgcccactttcctataacttttggccagggaacccgacttgaaatcaagctcgaggacctgaagaacgtgttcccacctgaggtggccgtgttcgagcctagcgaggccgagatcagccacacccagaaagccaccctcgtgtgcctggctaccggcttctaccccgaccatgtggaactgtcttggtgggtcaacggcaaagaggtgcacagcggcgtgtgtaccgacccccagccactgaaagaacagcccgccctgaacgacagccggtactgcctgagcagcagactgagagtgtccgccaccttctggcagaacccccggaaccacttcagatgccaggtgcagttctacggcctgagcgagaacgacgagtggacccaggacagagccaagcccgtgacccagatcgtgtctgccgaagcctggggcagagccgattgcggctttaccagcgagagctaccagcagggcgtgctgagcgccaccaacctgagcgtgatcggcttcagaatcctgctgctgaaagtggccggctttaacctgctgatgaccctgcggctgtggtccagcagggccaagcgatctggatctggagcaacaaacttctcactactcaaacaagcaggtgacgtggaggagaatcccgggcctactagtatggactggatttggcgcatccttttccttgtcggcgctgctaccggcgcgcattccttcgaacaggtgcagctggtgcagagcggtgccgaagtgaagaaaccaggtgcatccgttaaagtttcatgtaaggctagtggatataccttcaccaattacggaatgaactgggtgaaacaggcccctggccagggactgaagtggatggggtggattaacacctacaccggggagccgacttatgcagacgactttaaggggcgggtcacgatgacctccgacacctccaccagtaccgcctacctggagctgcacaaccttaggtcagacgataccgccgtgtattactgtgcccgatggtcttggtccgacggatactatgtctacttcgactattggggccaggggaccacagttaccgtgtcctctacgcgtatccagaaccctgatcctgccgtgtaccagctgcgggatagcaagagcagcgacaagagcgtgtgtctgttcaccgacttcgacagccagaccaacgtgtcccagagcaaggactccgacgtgtacatcaccgataagtgcgtgctggacatgcggagcatggacttcaagagcaactccgccgtggcctggtccaacaagtccgatttcgcctgcgccaacgccttcaacaacagcattatccccgaggacacattcttcccaagccccgagagcagctgcgacgtgaagctggtggaaaagagcttcgagacagacaccaacctgaacttccagatcctgtacgagatcctgctgggcaaggccaccctgtacgccgtgctggtgtctgccctggtgctgatggctatggtcaagcggaaggacagccgggga

SEQ ID NO: 5319 - DNA, 2280 bp, synthetic construct
  source 1..2280: mol_type = other DNA
atggccttaccagtgaccgccttgctcctgccgctggccttgctgctccacgccgccaggccggaagtgcagctggttgaatctggcggaggactggttcagcctggcggatctctgagactgtcttgtgccgccagcggcttcagcttcagcgacttttggatgagctgggtccgacaggcccctggcaaaggacttgaatgggtcgccacaatcagccaggccggcagcgagaaggactacgtggactctgtgaagggcagattcaccatcagccgggacaacgccaagaagtccctgtacctccagatgaacagcctgagagccgaggacaccgccgtgtactattgtgcctctggcgtgtacagcttcgactacagaggccagggcaccctggtcacagtctcttctggtaccggcggaggcggatctggcggcggaggtagcggtggcggaggatctgaattcgacgagatcgtgctgacacagagccctggaagcctggccgtgtctcctggcgagcgcgtgacaatgagctgcaagagcagccagagcgtgttcttcagcagctcccagaagaactacctggcctggtatcagcagatccccggccagagccccagactgctgatctactgggccagcaccagagaaagcggcgtgcccgatagattcaccggcagcggctctggcaccgacttcaccctgacaatcagcagcgtgcagcccgaggacctggctatctactactgccaccagtacctgagcagccggaccttcggccagggcaccaagctggaaatcaagagactcgaggacctgaagaacgtgttcccacctgaggtggccgtgttcgagcctagcgaggccgagatcagccacacccagaaagccaccctcgtgtgcctggctaccggcttctaccccgaccatgtggaactgtcttggtgggtcaacggcaaagaggtgcacagcggcgtgtgtaccgacccccagccactgaaagaacagcccgccctgaacgacagccggtactgcctgagcagcagactgagagtgtccgccaccttctggcagaacccccggaaccacttcagatgccaggtgcagttctacggcctgagcgagaacgacgagtggacccaggacagagccaagcccgtgacccagatcgtgtctgccgaagcctggggcagagccgattgcggctttaccagcgagagctaccagcagggcgtgctgagcgccaccaacctgagcgtgatcggcttcagaatcctgctgctgaaagtggccggctttaacctgctgatgaccctgcggctgtggtccagcagggccaagcgatctggatctggagcaacaaacttctcactactcaaacaagcaggtgacgtggaggagaatcccgggcctactagtatggactggatttggcgcatccttttccttgtcggcgctgctaccggcgcgcattccttcgaacaggtgcaactgcagcagcctggcgctgaggtcgtgaagccaggcgcttccgtgaagatgtcctgcaaggccagcggctacaccttcaccagctactacatccactggatcaagcagacccctggacagggcctggaatgggtgggagtgatctaccccggcaacgacgacatcagctacaaccagaagttccagggcaaggccaccctgaccgccgacaagtctagcaccaccgcctacatgcaactgtccagcctgaccagcgaggacagcgccgtgtactactgcgccagagaagtgcggctgcggtacttcgatgtgtggggccagggaaccaccgtgaccgtgtcatctacgcgtatccagaaccctgatcctgccgtgtaccagctgcgggatagcaagagcagcgacaagagcgtgtgtctgttcaccgacttcgacagccagaccaacgtgtcccagagcaaggactccgacgtgtacatcaccgataagtgcgtgctggacatgcggagcatggacttcaagagcaactccgccgtggcctggtccaacaagtccgatttcgcctgcgccaacgccttcaacaacagcattatccccgaggacacattcttcccaagccccgagagcagctgcgacgtgaagctggtggaaaagagcttcgagacagacaccaacctgaacttccagatcctgtacgagatcctgctgggcaaggccaccctgtacgccgtgctggtgtctgccctggtgctgatggctatggtcaagcggaaggacagccgggga

SEQ ID NO: 5320 - DNA, 2292 bp, synthetic construct
  source 1..2292: mol_type = other DNA
atggccttaccagtgaccgccttgctcctgccgctggccttgctgctccacgccgccaggccggaagtgcagctggttgaatctggcggaggactggttcagcctggcggatctctgagactgtcttgtgccgccagcggcttcagcttcagcgacttttggatgagctgggtccgacaggcccctggcaaaggacttgaatgggtcgccacaatcagccaggccggcagcgagaaggactacgtggactctgtgaagggcagattcaccatcagccgggacaacgccaagaagtccctgtacctccagatgaacagcctgagagccgaggacaccgccgtgtactattgtgcctctggcgtgtacagcttcgactacagaggccagggcaccctggtcacagtctcttctggtaccggcggaggcggatctggcggcggaggtagcggtggcggaggatctgaattcgatgtgctgctgacccagagccctctgagcctgcctgtgacactgggacagcctgccagcatctcctgtcggagcagccagaccatcgtgcacagcaacggcaacacctacctggaatggttccagcagcggccaggccagagccccagactgctgatctaccaggtgtccaacagattcagcggcgtgcccgacagattctccggcagcggctctggcaccgacttcaccctgaagatcagccgggtggaagccgaggacgtgggcgtgtactactgttttcaaggcagccacgtgccccggacctttggcggaggaacaaaggtggaaatcaagagagccctcgaggacctgaagaacgtgttcccacctgaggtggccgtgttcgagcctagcgaggccgagatcagccacacccagaaagccaccctcgtgtgcctggctaccggcttctaccccgaccatgtggaactgtcttggtgggtcaacggcaaagaggtgcacagcggcgtgtgtaccgacccccagccactgaaagaacagcccgccctgaacgacagccggtactgcctgagcagcagactgagagtgtccgccaccttctggcagaacccccggaaccacttcagatgccaggtgcagttctacggcctgagcgagaacgacgagtggacccaggacagagccaagcccgtgacccagatcgtgtctgccgaagcctggggcagagccgattgcggctttaccagcgagagctaccagcagggcgtgctgagcgccaccaacctgagcgtgatcggcttcagaatcctgctgctgaaagtggccggctttaacctgctgatgaccctgcggctgtggtccagcagggccaagcgatctggatctggagcaacaaacttctcactactcaaacaagcaggtgacgtggaggagaatcccgggcctactagtatggactggatttggcgcatccttttccttgtcggcgctgctaccggcgcgcattccttcgaacagatccaactggtgcagagcggcagcgagctgaagaaacctggggccagcgtgaaggtgtcctgcaaggccagcggctacacctttaccaactacggcatgaactgggtgcgccaggcccctggacagggcctgaaatggatgggctggatcaacaccaacaccggcgagcctaagtacgccgaagagttcaagggcagattcgccctgagcctggacaccagcgtgtccacagcctacctccagatcaacagcctgaaggccgaggataccgccgtgtacttctgcgccagaggctacggcaactacgccagaggggcttggctggcctattggggccagggaacactcgtgaccgtgtcctctacgcgtatccagaaccctgatcctgccgtgtaccagctgcgggatagcaagagcagcgacaagagcgtgtgtctgttcaccgacttcgacagccagaccaacgtgtcccagagcaaggactccgacgtgtacatcaccgataagtgcgtgctggacatgcggagcatggacttcaagagcaactccgccgtggcctggtccaacaagtccgatttcgcctgcgccaacgccttcaacaacagcattatccccgaggacacattcttcccaagccccgagagcagctgcgacgtgaagctggtggaaaagagcttcgagacagacaccaacctgaacttccagatcctgtacgagatcctgctgggcaaggccaccctgtacgccgtgctggtgtctgccctggtgctgatggctatggtcaagcggaaggacagccgggga

SEQ ID NO: 5321 - DNA, 2247 bp, synthetic construct
  source 1..2247: mol_type = other DNA
atggccttaccagtgaccgccttgctcctgccgctggccttgctgctccacgccgccaggccggaagtgcagctggttgaatctggcggaggactggttcagcctggcggatctctgagactgtcttgtgccgccagcggcttcagcttcagcgacttttggatgagctgggtccgacaggcccctggcaaaggacttgaatgggtcgccacaatcagccaggccggcagcgagaaggactacgtggactctgtgaagggcagattcaccatcagccgggacaacgccaagaagtccctgtacctccagatgaacagcctgagagccgaggacaccgccgtgtactattgtgcctctggcgtgtacagcttcgactacagaggccagggcaccctggtcacagtctcttctggtaccggcggaggcggatctggcggcggaggtagcggtggcggaggatctgaattcgacgagatcgtgctgacacagagccctgccacactctctctgagccctggcgaaagagccaccctgagctgtagcgccagcagcagcatcaactacatctactggctccagcagaagcccggccaggcccccagaatcctgatctacctgaccagcaacctggcctccggcgtgccagccagattttctggcagcggctccggcaccgacttcaccctgacaatcagcagcctggaacccgaggacttcgccgtgtactactgcctccagtggtccagcaaccccctgacctttggcggaggcaccaaggtggaaatcaagctcgaggacctgaagaacgtgttcccacctgaggtggccgtgttcgagcctagcgaggccgagatcagccacacccagaaagccaccctcgtgtgcctggctaccggcttctaccccgaccatgtggaactgtcttggtgggtcaacggcaaagaggtgcacagcggcgtgtgtaccgacccccagccactgaaagaacagcccgccctgaacgacagccggtactgcctgagcagcagactgagagtgtccgccaccttctggcagaacccccggaaccacttcagatgccaggtgcagttctacggcctgagcgagaacgacgagtggacccaggacagagccaagcccgtgacccagatcgtgtctgccgaagcctggggcagagccgattgcggctttaccagcgagagctaccagcagggcgtgctgagcgccaccaacctgagcgtgatcggcttcagaatcctgctgctgaaagtggccggctttaacctgctgatgaccctgcggctgtggtccagcagggccaagcgatctggatctggagcaacaaacttctcactactcaaacaagcaggtgacgtggaggagaatcccgggcctactagtatggactggatttggcgcatccttttccttgtcggcgctgctaccggcgcgcattccttcgaagaagtgcaactggtggaaagcgggggaggacttgtgaagcctggcggctctctgagactgagctgtgccgcctctggcttcaccttcagcagctacgacatgagctgggtgcgccaggctcctggcaagggactggaatgggtgtccaccatcagcagcggcggcagctacacctactacctggacagcatcaagggccggttcaccatctccagagacaacgccaagaacagcctgtacctccagatgaactccctgcgggccgaggacacagccgtgtattattgcgccagacagggcctggattactggggcagaggcacccttgtgaccgtgtcctctacgcgtatccagaaccctgatcctgccgtgtaccagctgcgggatagcaagagcagcgacaagagcgtgtgtctgttcaccgacttcgacagccagaccaacgtgtcccagagcaaggactccgacgtgtacatcaccgataagtgcgtgctggacatgcggagcatggacttcaagagcaactccgccgtggcctggtccaacaagtccgatttcgcctgcgccaacgccttcaacaacagcattatccccgaggacacattcttcccaagccccgagagcagctgcgacgtgaagctggtggaaaagagcttcgagacagacaccaacctgaacttccagatcctgtacgagatcctgctgggcaaggccaccctgtacgccgtgctggtgtctgccctggtgctgatggctatggtcaagcggaaggacagccgggga

SEQ ID NO: 5322 - DNA, 2274 bp, synthetic construct
  source 1..2274: mol_type = other DNA
atggccttaccagtgaccgccttgctcctgccgctggccttgctgctccacgccgccaggccggaagtgcagctggttgaatctggcggaggactggttcagcctggcggatctctgagactgtcttgtgccgccagcggcttcagcttcagcgacttttggatgagctgggtccgacaggcccctggcaaaggacttgaatgggtcgccacaatcagccaggccggcagcgagaaggactacgtggactctgtgaagggcagattcaccatcagccgggacaacgccaagaagtccctgtacctccagatgaacagcctgagagccgaggacaccgccgtgtactattgtgcctctggcgtgtacagcttcgactacagaggccagggcaccctggtcacagtctcttctggtaccggcggaggcggatctggcggcggaggtagcggtggcggaggatctgaattcgacatcgtgatgacccagagccccgatagcctggccgtgtctctgggagagagagccaccatcaactgccgggccagcaagagcgtgtccaccagcggctacagcttcatgcactggtatcagcagaagcccggccagccccccaagctgctgatctacctggcctccaacctggaaagcggcgtgcccgatagattcagcggcagcggctctggcaccgacttcaccctgaccatcagttctcttcaggccgaggacgtggccgtgtactactgccagcacagcagagaggtgccctggacattcggccagggcacaaaggtggaaatcaagcggctcgaggacctgaagaacgtgttcccacctgaggtggccgtgttcgagcctagcgaggccgagatcagccacacccagaaagccaccctcgtgtgcctggctaccggcttctaccccgaccatgtggaactgtcttggtgggtcaacggcaaagaggtgcacagcggcgtgtgtaccgacccccagccactgaaagaacagcccgccctgaacgacagccggtactgcctgagcagcagactgagagtgtccgccaccttctggcagaacccccggaaccacttcagatgccaggtgcagttctacggcctgagcgagaacgacgagtggacccaggacagagccaagcccgtgacccagatcgtgtctgccgaagcctggggcagagccgattgcggctttaccagcgagagctaccagcagggcgtgctgagcgccaccaacctgagcgtgatcggcttcagaatcctgctgctgaaagtggccggctttaacctgctgatgaccctgcggctgtggtccagcagggccaagcgatctggatctggagcaacaaacttctcactactcaaacaagcaggtgacgtggaggagaatcccgggcctactagtatggactggatttggcgcatccttttccttgtcggcgctgctaccggcgcgcattccttcgaacaggtgcagctggtgcagtctggggccgaagtgaagaaacctggggccagcgtgaaggtgtcctgcaaggccagcggatacacctttaccaactacggcatgaactgggtgcgccaggcccctggacagggcctggaatggatgggctggatcaacacctacaccggcgagcccacatacgccgacgccttcaagggcagattcgccttcagcctggacaccagcacctccaccgcctacctccagatcaacagcctgcggagcgacgacaccgccgtgtattattgcgccagagattacggcgactacgggatggactattggggccagggaaccaccgtgaccgtgtcctctacgcgtatccagaaccctgatcctgccgtgtaccagctgcgggatagcaagagcagcgacaagagcgtgtgtctgttcaccgacttcgacagccagaccaacgtgtcccagagcaaggactccgacgtgtacatcaccgataagtgcgtgctggacatgcggagcatggacttcaagagcaactccgccgtggcctggtccaacaagtccgatttcgcctgcgccaacgccttcaacaacagcattatccccgaggacacattcttcccaagccccgagagcagctgcgacgtgaagctggtggaaaagagcttcgagacagacaccaacctgaacttccagatcctgtacgagatcctgctgggcaaggccaccctgtacgccgtgctggtgtctgccctggtgctgatggctatggtcaagcggaaggacagccgggga

SEQ ID NO: 5323 - DNA, 2262 bp, synthetic construct
  source 1..2262: mol_type = other DNA
atggccttaccagtgaccgccttgctcctgccgctggccttgctgctccacgccgccaggccggaagtgcagctggttgaatctggcggaggactggttcagcctggcggatctctgagactgtcttgtgccgccagcggcttcagcttcagcgacttttggatgagctgggtccgacaggcccctggcaaaggacttgaatgggtcgccacaatcagccaggccggcagcgagaaggactacgtggactctgtgaagggcagattcaccatcagccgggacaacgccaagaagtccctgtacctccagatgaacagcctgagagccgaggacaccgccgtgtactattgtgcctctggcgtgtacagcttcgactacagaggccagggcaccctggtcacagtctcttctggtaccggcggaggcggatctggcggcggaggtagcggtggcggaggatctgaattcgacatcgtgatgacccagacccccctgaccctgagcgtgacaatcggacagcctgccagcatctcctgcaagagcagccagagcctgctggacagcgacggcaagacctacctgaactggctgctgcagaggccaggccagagccccgagagactgatctacctggtgtccaagctggactccggcgtgcccgatagattcacaggcagcggctccggcaccgacttcaccctgaagatcagccgggtggaagccgaggacctgggcgtgtactgttgttggcagggcacccacttcccttacaccttcggcggagggaccaaggtggaaatcaagggcctcgaggacctgaagaacgtgttcccacctgaggtggccgtgttcgagcctagcgaggccgagatcagccacacccagaaagccaccctcgtgtgcctggctaccggcttctaccccgaccatgtggaactgtcttggtgggtcaacggcaaagaggtgcacagcggcgtgtgtaccgacccccagccactgaaagaacagcccgccctgaacgacagccggtactgcctgagcagcagactgagagtgtccgccaccttctggcagaacccccggaaccacttcagatgccaggtgcagttctacggcctgagcgagaacgacgagtggacccaggacagagccaagcccgtgacccagatcgtgtctgccgaagcctggggcagagccgattgcggctttaccagcgagagctaccagcagggcgtgctgagcgccaccaacctgagcgtgatcggcttcagaatcctgctgctgaaagtggccggctttaacctgctgatgaccctgcggctgtggtccagcagggccaagcgatctggatctggagcaacaaacttctcactactcaaacaagcaggtgacgtggaggagaatcccgggcctactagtatggactggatttggcgcatccttttccttgtcggcgctgctaccggcgcgcattccttcgaacaggtgcaactgcagcagcctggcgctgaacttgtgcggccaggcgcctctgtgaagctgagctgtaaagccagcggctacaccttcaccagctactggatgaactgggtcaagcagcgcccaggccagggcctggaatggatcggaatgatcgaccccagcgacagcgagacacactacaaccacatcttcaaggacaaggccaccctgaccgtggacaagtccagcagcacagcctacctgcaactgtccagcctgaccagcgaggacagcgccgtgtactactgcgcccggaacctgtatctgtggggccagggaacaagcgtgaccgtgtctagcacgcgtatccagaaccctgatcctgccgtgtaccagctgcgggatagcaagagcagcgacaagagcgtgtgtctgttcaccgacttcgacagccagaccaacgtgtcccagagcaaggactccgacgtgtacatcaccgataagtgcgtgctggacatgcggagcatggacttcaagagcaactccgccgtggcctggtccaacaagtccgatttcgcctgcgccaacgccttcaacaacagcattatccccgaggacacattcttcccaagccccgagagcagctgcgacgtgaagctggtggaaaagagcttcgagacagacaccaacctgaacttccagatcctgtacgagatcctgctgggcaaggccaccctgtacgccgtgctggtgtctgccctggtgctgatggctatggtcaagcggaaggacagccgggga

SEQ ID NO: 5324 - DNA, 2286 bp, synthetic construct
  source 1..2286: mol_type = other DNA
atggccttaccagtgaccgccttgctcctgccgctggccttgctgctccacgccgccaggccggaagtgcagctggttgaatctggcggaggactggttcagcctggcggatctctgagactgtcttgtgccgccagcggcttcagcttcagcgacttttggatgagctgggtccgacaggcccctggcaaaggacttgaatgggtcgccacaatcagccaggccggcagcgagaaggactacgtggactctgtgaagggcagattcaccatcagccgggacaacgccaagaagtccctgtacctccagatgaacagcctgagagccgaggacaccgccgtgtactattgtgcctctggcgtgtacagcttcgactacagaggccagggcaccctggtcacagtctcttctggtaccggcggaggcggatctggcggcggaggtagcggtggcggaggatctgaattcgacatcgtgatgacccagagccccgatagcctggccgtgtctctgggagagagagccaccatcaactgcgagagcagccagagcctgctgaacagcggcaaccagaagaactacctgacctggtatcagcagaagcccggccagccccccaagcccctgatctattgggccagcaccagagaaagcggcgtgcccgatagattcagcggcagcggaagcggcaccgacttcaccctgaccatcagttctcttcaggccgaggacgtggccgtgtactactgccagaacgactacagctacccctacaccttcggccagggcaccaagctggaaatcaagagactcgaggacctgaagaacgtgttcccacctgaggtggccgtgttcgagcctagcgaggccgagatcagccacacccagaaagccaccctcgtgtgcctggctaccggcttctaccccgaccatgtggaactgtcttggtgggtcaacggcaaagaggtgcacagcggcgtgtgtaccgacccccagccactgaaagaacagcccgccctgaacgacagccggtactgcctgagcagcagactgagagtgtccgccaccttctggcagaacccccggaaccacttcagatgccaggtgcagttctacggcctgagcgagaacgacgagtggacccaggacagagccaagcccgtgacccagatcgtgtctgccgaagcctggggcagagccgattgcggctttaccagcgagagctaccagcagggcgtgctgagcgccaccaacctgagcgtgatcggcttcagaatcctgctgctgaaagtggccggctttaacctgctgatgaccctgcggctgtggtccagcagggccaagcgatctggatctggagcaacaaacttctcactactcaaacaagcaggtgacgtggaggagaatcccgggcctactagtatggactggatttggcgcatccttttccttgtcggcgctgctaccggcgcgcattccttcgaagaagtgcagctggtgcagtctggggccgaagtgaagaagcctggcgagagcctgaagatcagctgcaagggcagcggctacagcttcaccgactactacatgaagtgggccagacagatgcccggcaagggcctggaatggatgggcgacatcatccccagcaacggggccaccttctacaaccagaaattcaagggccaagtgaccatctccgccgacaagagcatcagcaccacctacctccagtggtccagcctgaaggccagcgacaccgccatgtactattgcgccagaagccatctgctgcgggccagttggttcgcctattggggccagggaacaatggtcacagtgtccagcacgcgtatccagaaccctgatcctgccgtgtaccagctgcgggatagcaagagcagcgacaagagcgtgtgtctgttcaccgacttcgacagccagaccaacgtgtcccagagcaaggactccgacgtgtacatcaccgataagtgcgtgctggacatgcggagcatggacttcaagagcaactccgccgtggcctggtccaacaagtccgatttcgcctgcgccaacgccttcaacaacagcattatccccgaggacacattcttcccaagccccgagagcagctgcgacgtgaagctggtggaaaagagcttcgagacagacaccaacctgaacttccagatcctgtacgagatcctgctgggcaaggccaccctgtacgccgtgctggtgtctgccctggtgctgatggctatggtcaagcggaaggacagccgggga

SEQ ID NO: 5325 - DNA, 2271 bp, synthetic construct
  source 1..2271: mol_type = other DNA
atggccttaccagtgaccgccttgctcctgccgctggccttgctgctccacgccgccaggccggaagtgcagctggttgaatctggcggaggactggttcagcctggcggatctctgagactgtcttgtgccgccagcggcttcagcttcagcgacttttggatgagctgggtccgacaggcccctggcaaaggacttgaatgggtcgccacaatcagccaggccggcagcgagaaggactacgtggactctgtgaagggcagattcaccatcagccgggacaacgccaagaagtccctgtacctccagatgaacagcctgagagccgaggacaccgccgtgtactattgtgcctctggcgtgtacagcttcgactacagaggccagggcaccctggtcacagtctcttctggtaccggcggaggcggatctggcggcggaggtagcggtggcggaggatctgaattcgacatccagatgacccagtctaccagttccctgagtgcatccctcggagacagggtgacgatcagttgcagcgcaagccaagggatcaataactatctgaactggtatcagcagaaaccggacggaacagtcgaactcctgatttattacaccagcacccttcagagtggcgtcccttcccggttcagtggctccggaagcgggaccgattactccctgaccatttctaatctggagccagaggacataggaacgtattattgccagcagtatagtaaactgccacgaacttttggaggggggacgaaactggagatcaaactcgaggacctgaagaacgtgttcccacctgaggtggccgtgttcgagcctagcgaggccgagatcagccacacccagaaagccaccctcgtgtgcctggctaccggcttctaccccgaccatgtggaactgtcttggtgggtcaacggcaaagaggtgcacagcggcgtgtgtaccgacccccagccactgaaagaacagcccgccctgaacgacagccggtactgcctgagcagcagactgagagtgtccgccaccttctggcagaacccccggaaccacttcagatgccaggtgcagttctacggcctgagcgagaacgacgagtggacccaggacagagccaagcccgtgacccagatcgtgtctgccgaagcctggggcagagccgattgcggctttaccagcgagagctaccagcagggcgtgctgagcgccaccaacctgagcgtgatcggcttcagaatcctgctgctgaaagtggccggctttaacctgctgatgaccctgcggctgtggtccagcagggccaagcgatctggatctggagcaacaaacttctcactactcaaacaagcaggtgacgtggaggagaatcccgggcctactagtatggactggatttggcgcatccttttccttgtcggcgctgctaccggcgcgcattccttcgaacaggtgcaactccagcagtccggaagcgagcttatgatgccaggggcatcagtgaagatcagctgcaaggctactggctacaccttctctaattactggatagagtgggttaaacaaaggccagggcacggcctggaatggatcggcgagatcctgcctgggacaggccgaaccatttataacgagaagttcaaaggcaaggctactttcaccgcagatataagctctaatacagtgcaaatgcagctctcttccctgacaagtgaggatagtgccgtgtattattgcgcacgaagagattactatggaaatttttattacgctatggattattggggtcaaggaacaagtgtgaccgttagcagcacgcgtatccagaaccctgatcctgccgtgtaccagctgcgggatagcaagagcagcgacaagagcgtgtgtctgttcaccgacttcgacagccagaccaacgtgtcccagagcaaggactccgacgtgtacatcaccgataagtgcgtgctggacatgcggagcatggacttcaagagcaactccgccgtggcctggtccaacaagtccgatttcgcctgcgccaacgccttcaacaacagcattatccccgaggacacattcttcccaagccccgagagcagctgcgacgtgaagctggtggaaaagagcttcgagacagacaccaacctgaacttccagatcctgtacgagatcctgctgggcaaggccaccctgtacgccgtgctggtgtctgccctggtgctgatggctatggtcaagcggaaggacagccgggga

SEQ ID NO: 5326 - DNA, 2256 bp, synthetic construct
  source 1..2256: mol_type = other DNA
atggccttaccagtgaccgccttgctcctgccgctggccttgctgctccacgccgccaggccggaagtgcagctggttgaatctggcggaggactggttcagcctggcggatctctgagactgtcttgtgccgccagcggcttcagcttcagcgacttttggatgagctgggtccgacaggcccctggcaaaggacttgaatgggtcgccacaatcagccaggccggcagcgagaaggactacgtggactctgtgaagggcagattcaccatcagccgggacaacgccaagaagtccctgtacctccagatgaacagcctgagagccgaggacaccgccgtgtactattgtgcctctggcgtgtacagcttcgactacagaggccagggcaccctggtcacagtctcttctggtaccggcggaggcggatctggcggcggaggtagcggtggcggaggatctgaattcgacatccagatgacccagagccctgccagcctgtccgtgtctgtgggcgagacagtgaccatcacctgtcgggccagcgagaacatctacagcaacctggcctggtatcagcagaagcagggcaagagcccccaactgctggtgtacgccgccaccaatctggccgatggcgtgcccagcagattttccggctctggcagcggcacccagtacagcctgaagatcaacagcctccagagcgaggacttcggcagctactactgccagcacttctggggcacctggacctttggaggaggcaccaccctggaaatcaagctcgaggacctgaagaacgtgttcccacctgaggtggccgtgttcgagcctagcgaggccgagatcagccacacccagaaagccaccctcgtgtgcctggctaccggcttctaccccgaccatgtggaactgtcttggtgggtcaacggcaaagaggtgcacagcggcgtgtgtaccgacccccagccactgaaagaacagcccgccctgaacgacagccggtactgcctgagcagcagactgagagtgtccgccaccttctggcagaacccccggaaccacttcagatgccaggtgcagttctacggcctgagcgagaacgacgagtggacccaggacagagccaagcccgtgacccagatcgtgtctgccgaagcctggggcagagccgattgcggctttaccagcgagagctaccagcagggcgtgctgagcgccaccaacctgagcgtgatcggcttcagaatcctgctgctgaaagtggccggctttaacctgctgatgaccctgcggctgtggtccagcagggccaagcgatctggatctggagcaacaaacttctcactactcaaacaagcaggtgacgtggaggagaatcccgggcctactagtatggactggatttggcgcatccttttccttgtcggcgctgctaccggcgcgcattccttcgaagaagtgcaactccagcagagcggccctgagcttgtgaagcctggcgcttccgtgaagatgagctgcaaggccagcggctacaccttcaccgactactacatgaagtggatgaagcagagccacggcaagtccctggaatggatcggcgacatcaaccccaacaacggcggcaccacctacaaccagaagttcaagggcaaggccaccctgaccgtggacaagagcagcagcaccgcctacatgcaactgaacagcctgaccagcgaggacagcgccgtgtactactgcgccagagactacggctacggctatttcgactactggggccagggcacaaccctgacagtgtcctctacgcgtatccagaaccctgatcctgccgtgtaccagctgcgggatagcaagagcagcgacaagagcgtgtgtctgttcaccgacttcgacagccagaccaacgtgtcccagagcaaggactccgacgtgtacatcaccgataagtgcgtgctggacatgcggagcatggacttcaagagcaactccgccgtggcctggtccaacaagtccgatttcgcctgcgccaacgccttcaacaacagcattatccccgaggacacattcttcccaagccccgagagcagctgcgacgtgaagctggtggaaaagagcttcgagacagacaccaacctgaacttccagatcctgtacgagatcctgctgggcaaggccaccctgtacgccgtgctggtgtctgccctggtgctgatggctatggtcaagcggaaggacagccgggga

SEQ ID NO: 5327 - DNA, 2265 bp, synthetic construct
  source 1..2265: mol_type = other DNA
atggccttaccagtgaccgccttgctcctgccgctggccttgctgctccacgccgccaggccggaagtgcagctggttgaatctggcggaggactggttcagcctggcggatctctgagactgtcttgtgccgccagcggcttcagcttcagcgacttttggatgagctgggtccgacaggcccctggcaaaggacttgaatgggtcgccacaatcagccaggccggcagcgagaaggactacgtggactctgtgaagggcagattcaccatcagccgggacaacgccaagaagtccctgtacctccagatgaacagcctgagagccgaggacaccgccgtgtactattgtgcctctggcgtgtacagcttcgactacagaggccagggcaccctggtcacagtctcttctggtaccggcggaggcggatctggcggcggaggtagcggtggcggaggatctgaattcgagatcgtgctgacacagagccctggcaccctgagcctgtctccaggcgaaagagccacactgagctgtcgggcctctcagagcgtgggaggctacctggcttggtatcagcagaagccaggccaggcccccagactgctgatctacgacgccagcaatcgggccacaggcatccccgccagattttctggcagcggctccggcaccgacttcaccctgacaatcagcagcctggaacccgaggacttcgccgtgtactactgccagcagcggaacaactggccccccatgtacacattcggccagggcaccaagctggaaatcaagagactcgaggacctgaagaacgtgttcccacctgaggtggccgtgttcgagcctagcgaggccgagatcagccacacccagaaagccaccctcgtgtgcctggctaccggcttctaccccgaccatgtggaactgtcttggtgggtcaacggcaaagaggtgcacagcggcgtgtgtaccgacccccagccactgaaagaacagcccgccctgaacgacagccggtactgcctgagcagcagactgagagtgtccgccaccttctggcagaacccccggaaccacttcagatgccaggtgcagttctacggcctgagcgagaacgacgagtggacccaggacagagccaagcccgtgacccagatcgtgtctgccgaagcctggggcagagccgattgcggctttaccagcgagagctaccagcagggcgtgctgagcgccaccaacctgagcgtgatcggcttcagaatcctgctgctgaaagtggccggctttaacctgctgatgaccctgcggctgtggtccagcagggccaagcgatctggatctggagcaacaaacttctcactactcaaacaagcaggtgacgtggaggagaatcccgggcctactagtatggactggatttggcgcatccttttccttgtcggcgctgctaccggcgcgcattccttcgaacaggtgcaactggtgcagagcggagccgaagtgaagaaacccggcagcagcgtgaaggtgtcctgcaaggcttccggcggcaccttcagcagctacgccatttcttgggtgcgccaggctcctggacagggcctggaatggatgggcggcatcatccctatcctgggcaccgccaactacgcccagaaattccagggcagagtgaccatcaccgccgacgagagcaccagcaccgcctacatggaactgagcagcctgcggagcgaggacacagccgtgtattattgcgccagatggggcggaggggccttcgacatttggggccagggaacaatggtcaccgtgtccagcacgcgtatccagaaccctgatcctgccgtgtaccagctgcgggatagcaagagcagcgacaagagcgtgtgtctgttcaccgacttcgacagccagaccaacgtgtcccagagcaaggactccgacgtgtacatcaccgataagtgcgtgctggacatgcggagcatggacttcaagagcaactccgccgtggcctggtccaacaagtccgatttcgcctgcgccaacgccttcaacaacagcattatccccgaggacacattcttcccaagccccgagagcagctgcgacgtgaagctggtggaaaagagcttcgagacagacaccaacctgaacttccagatcctgtacgagatcctgctgggcaaggccaccctgtacgccgtgctggtgtctgccctggtgctgatggctatggtcaagcggaaggacagccgggga

SEQ ID NO: 5328 - DNA, 2250 bp, synthetic construct
  source 1..2250: mol_type = other DNA
atggccttaccagtgaccgccttgctcctgccgctggccttgctgctccacgccgccaggccggaagtgcagctggttgaatctggcggaggactggttcagcctggcggatctctgagactgtcttgtgccgccagcggcttcagcttcagcgacttttggatgagctgggtccgacaggcccctggcaaaggacttgaatgggtcgccacaatcagccaggccggcagcgagaaggactacgtggactctgtgaagggcagattcaccatcagccgggacaacgccaagaagtccctgtacctccagatgaacagcctgagagccgaggacaccgccgtgtactattgtgcctctggcgtgtacagcttcgactacagaggccagggcaccctggtcacagtctcttctggtaccggcggaggcggatctggcggcggaggtagcggtggcggaggatctgaattccagatcgtgctgacacagagccctgccctgatgagcgccagccctggcgagaaagtgaccatgacctgtagcgccagcagcagcgtgcgctacatgtactggtatcagcagaagcccagaagcagccccaagccctggattcacctgaccagcaatctggcctctggcgtgcccgctagattttccggctctggcagcggcaccagctacagcctgaccatcagcagcatggaagccgaggacgccgccacctactactgccagcagtggtccagccaccccttcacatttggctccggcaccaagctggaaatcaagctcgaggacctgaagaacgtgttcccacctgaggtggccgtgttcgagcctagcgaggccgagatcagccacacccagaaagccaccctcgtgtgcctggctaccggcttctaccccgaccatgtggaactgtcttggtgggtcaacggcaaagaggtgcacagcggcgtgtgtaccgacccccagccactgaaagaacagcccgccctgaacgacagccggtactgcctgagcagcagactgagagtgtccgccaccttctggcagaacccccggaaccacttcagatgccaggtgcagttctacggcctgagcgagaacgacgagtggacccaggacagagccaagcccgtgacccagatcgtgtctgccgaagcctggggcagagccgattgcggctttaccagcgagagctaccagcagggcgtgctgagcgccaccaacctgagcgtgatcggcttcagaatcctgctgctgaaagtggccggctttaacctgctgatgaccctgcggctgtggtccagcagggccaagcgatctggatctggagcaacaaacttctcactactcaaacaagcaggtgacgtggaggagaatcccgggcctactagtatggactggatttggcgcatccttttccttgtcggcgctgctaccggcgcgcattccttcgaagatgtgcaactccaggaaagcggccctggccttgtgaagcctagccagagcctgtccctgacctgtaccgtgaccggcttcagcatcaccagcgactactcttggaactggatcagacagttccctggcaacaaactggaatggatgggctacatcagctactccggccacacctcctacaaccccagcctggaaagccggatctccatcaccagagacaccagcaagaaccagttcttcttgcaactgaacagcgtgaccaccgaggataccgccacatattactgtaccagaggcaactgggacgtggtgtactggggccagggcacacttgtgaccgtgtctgctacgcgtatccagaaccctgatcctgccgtgtaccagctgcgggatagcaagagcagcgacaagagcgtgtgtctgttcaccgacttcgacagccagaccaacgtgtcccagagcaaggactccgacgtgtacatcaccgataagtgcgtgctggacatgcggagcatggacttcaagagcaactccgccgtggcctggtccaacaagtccgatttcgcctgcgccaacgccttcaacaacagcattatccccgaggacacattcttcccaagccccgagagcagctgcgacgtgaagctggtggaaaagagcttcgagacagacaccaacctgaacttccagatcctgtacgagatcctgctgggcaaggccaccctgtacgccgtgctggtgtctgccctggtgctgatggctatggtcaagcggaaggacagccgggga

SEQ ID NO: 5329 - DNA, 2280 bp, synthetic construct
  source 1..2280: mol_type = other DNA
atggccttaccagtgaccgccttgctcctgccgctggccttgctgctccacgccgccaggccggaagtgcagctggttgaatctggcggaggactggttcagcctggcggatctctgagactgtcttgtgccgccagcggcttcagcttcagcgacttttggatgagctgggtccgacaggcccctggcaaaggacttgaatgggtcgccacaatcagccaggccggcagcgagaaggactacgtggactctgtgaagggcagattcaccatcagccgggacaacgccaagaagtccctgtacctccagatgaacagcctgagagccgaggacaccgccgtgtactattgtgcctctggcgtgtacagcttcgactacagaggccagggcaccctggtcacagtctcttctggtaccggcggaggcggatctggcggcggaggtagcggtggcggaggatctgaattcgacgtcgtgatgacccagagccctctgagcctgcctgtgacactgggacagcctgccagcatctcctgtcggagcagccagagcatcgtgcacagcgacggcaacacctacctggaatggtatcagcagcggccaggccagagccccagacggctgatctacaaggtgtccaacagattcagcggcgtgcccgacagattctccggcagcggctctggcaccgacttcaccctgaagatcagcagagtggaagccgaggacgtgggcgtgtactactgttttcaaggcagccacgccccctggacctttggcggaggaacaaaggtggaaatcaagctcgaggacctgaagaacgtgttcccacctgaggtggccgtgttcgagcctagcgaggccgagatcagccacacccagaaagccaccctcgtgtgcctggctaccggcttctaccccgaccatgtggaactgtcttggtgggtcaacggcaaagaggtgcacagcggcgtgtgtaccgacccccagccactgaaagaacagcccgccctgaacgacagccggtactgcctgagcagcagactgagagtgtccgccaccttctggcagaacccccggaaccacttcagatgccaggtgcagttctacggcctgagcgagaacgacgagtggacccaggacagagccaagcccgtgacccagatcgtgtctgccgaagcctggggcagagccgattgcggctttaccagcgagagctaccagcagggcgtgctgagcgccaccaacctgagcgtgatcggcttcagaatcctgctgctgaaagtggccggctttaacctgctgatgaccctgcggctgtggtccagcagggccaagcgatctggatctggagcaacaaacttctcactactcaaacaagcaggtgacgtggaggagaatcccgggcctactagtatggactggatttggcgcatccttttccttgtcggcgctgctaccggcgcgcattccttcgaagaagtgcaactggtggaatcaggcggcggactggtgcagcctggcggatctctgagactgagctgtgccgccagcggcttcaccttcagcagctacggaatgcactgggtgcgccaggcccctggcaaaggactggaatgggtggcctacatcaccaccagaagcagcaccatctactacgccgacagcgtgaagggccggttcaccatctccagagacaacgccaagaacagcctgtacctccagatgaactccctgcgggccgaggacaccgccgtgtactattgcaccagagagcccctgaccggctactacgctatggactattggggccagggcaccagcgtgaccgtgtctagtacgcgtatccagaaccctgatcctgccgtgtaccagctgcgggatagcaagagcagcgacaagagcgtgtgtctgttcaccgacttcgacagccagaccaacgtgtcccagagcaaggactccgacgtgtacatcaccgataagtgcgtgctggacatgcggagcatggacttcaagagcaactccgccgtggcctggtccaacaagtccgatttcgcctgcgccaacgccttcaacaacagcattatccccgaggacacattcttcccaagccccgagagcagctgcgacgtgaagctggtggaaaagagcttcgagacagacaccaacctgaacttccagatcctgtacgagatcctgctgggcaaggccaccctgtacgccgtgctggtgtctgccctggtgctgatggctatggtcaagcggaaggacagccgggga

SEQ ID NO: 5330 - DNA, 2256 bp, synthetic construct
  source 1..2256: mol_type = other DNA
atggccttaccagtgaccgccttgctcctgccgctggccttgctgctccacgccgccaggccggaagtgcagctggttgaatctggcggaggactggttcagcctggcggatctctgagactgtcttgtgccgccagcggcttcagcttcagcgacttttggatgagctgggtccgacaggcccctggcaaaggacttgaatgggtcgccacaatcagccaggccggcagcgagaaggactacgtggactctgtgaagggcagattcaccatcagccgggacaacgccaagaagtccctgtacctccagatgaacagcctgagagccgaggacaccgccgtgtactattgtgcctctggcgtgtacagcttcgactacagaggccagggcaccctggtcacagtctcttctggtaccggcggaggcggatctggcggcggaggtagcggtggcggaggatctgaattcgacatccagatgacccagagccccagcagcctgtctgccagcgtgggcgacagagtgaccatcacctgtagagccagccagagcatcagcctgtggctgaactggtatcagcagaagcccggcaaggcccccaagctgctgatctacgccgccagcacactccagagcggcgtgccaagcagattttccggcagcggctccggcaccgacttcaccctgacaatcagctccctccagcccgaggacttcgccacctactactgccagcagtactacaccagcccctacaccttcggccagggcaccaaggtggaaatcaagagactcgaggacctgaagaacgtgttcccacctgaggtggccgtgttcgagcctagcgaggccgagatcagccacacccagaaagccaccctcgtgtgcctggctaccggcttctaccccgaccatgtggaactgtcttggtgggtcaacggcaaagaggtgcacagcggcgtgtgtaccgacccccagccactgaaagaacagcccgccctgaacgacagccggtactgcctgagcagcagactgagagtgtccgccaccttctggcagaacccccggaaccacttcagatgccaggtgcagttctacggcctgagcgagaacgacgagtggacccaggacagagccaagcccgtgacccagatcgtgtctgccgaagcctggggcagagccgattgcggctttaccagcgagagctaccagcagggcgtgctgagcgccaccaacctgagcgtgatcggcttcagaatcctgctgctgaaagtggccggctttaacctgctgatgaccctgcggctgtggtccagcagggccaagcgatctggatctggagcaacaaacttctcactactcaaacaagcaggtgacgtggaggagaatcccgggcctactagtatggactggatttggcgcatccttttccttgtcggcgctgctaccggcgcgcattccttcgaacaggtgcaactgctggaatctggcggcggactggtgcagcctggcggatctctgagactgagctgtgccgccagcggcttcaccttcagcagctacgccatgagctgggtgcgccaggcccctggaaaaggactggaatgggtgtccgtgatccggtccagcggcagcagcacctattacgccgatagcgtgaagggccggttcaccatcagccgggacaacagcaagaacaccctgtacctccagatgaacagcctgcgggccgaggacaccgccgtgtactattgtgctaggggaggcggctacttcgactactggggccagggaacactcgtgaccgtgtcctctacgcgtatccagaaccctgatcctgccgtgtaccagctgcgggatagcaagagcagcgacaagagcgtgtgtctgttcaccgacttcgacagccagaccaacgtgtcccagagcaaggactccgacgtgtacatcaccgataagtgcgtgctggacatgcggagcatggacttcaagagcaactccgccgtggcctggtccaacaagtccgatttcgcctgcgccaacgccttcaacaacagcattatccccgaggacacattcttcccaagccccgagagcagctgcgacgtgaagctggtggaaaagagcttcgagacagacaccaacctgaacttccagatcctgtacgagatcctgctgggcaaggccaccctgtacgccgtgctggtgtctgccctggtgctgatggctatggtcaagcggaaggacagccgggga

SEQ ID NO: 5331 - DNA, 2265 bp, synthetic construct
  source 1..2265: mol_type = other DNA
atggccttaccagtgaccgccttgctcctgccgctggccttgctgctccacgccgccaggccggaagtgcagctggttgaatctggcggaggactggttcagcctggcggatctctgagactgtcttgtgccgccagcggcttcagcttcagcgacttttggatgagctgggtccgacaggcccctggcaaaggacttgaatgggtcgccacaatcagccaggccggcagcgagaaggactacgtggactctgtgaagggcagattcaccatcagccgggacaacgccaagaagtccctgtacctccagatgaacagcctgagagccgaggacaccgccgtgtactattgtgcctctggcgtgtacagcttcgactacagaggccagggcaccctggtcacagtctcttctggtaccggcggaggcggatctggcggcggaggtagcggtggcggaggatctgaattcgacatccagatgacccagagccccagcagcctgtctgccagcgtgggcgacagagtgaccatcacctgtagagccagccagagcatcagcagctacctgaactggtatcagcagaagcccggcaaggcccccaaactgctgatctacgccgtgtccacactccagagcggcgtgcccagcagattttctggcagcggctccggcaccgacttcaccctgacaatcagctccctccagcccgaggacttcgccacctactactgtcagcagagcggcaccttccctcccaccacatttggacagggcaccaaggtggaaatcaagagactcgaggacctgaagaacgtgttcccacctgaggtggccgtgttcgagcctagcgaggccgagatcagccacacccagaaagccaccctcgtgtgcctggctaccggcttctaccccgaccatgtggaactgtcttggtgggtcaacggcaaagaggtgcacagcggcgtgtgtaccgacccccagccactgaaagaacagcccgccctgaacgacagccggtactgcctgagcagcagactgagagtgtccgccaccttctggcagaacccccggaaccacttcagatgccaggtgcagttctacggcctgagcgagaacgacgagtggacccaggacagagccaagcccgtgacccagatcgtgtctgccgaagcctggggcagagccgattgcggctttaccagcgagagctaccagcagggcgtgctgagcgccaccaacctgagcgtgatcggcttcagaatcctgctgctgaaagtggccggctttaacctgctgatgaccctgcggctgtggtccagcagggccaagcgatctggatctggagcaacaaacttctcactactcaaacaagcaggtgacgtggaggagaatcccgggcctactagtatggactggatttggcgcatccttttccttgtcggcgctgctaccggcgcgcattccttcgaacaggtgcaactgctggaatctggcggcggactggtgcagcctggcggatctctgagactgagctgtgccgccagcggcttcaccttcagcagccacggaatgcactgggtgcgccaggcccctggaaagggactggaatgggtgtccgtgatctccggcagcggcagcaataccggctacgccgatagcgtgaagggccggttcaccatcagccgggacaacagcaagaacaccctgtacctccagatgaacagcctgcgggccgaggacaccgccgtgtactattgtgccagacagtggggcagctacgccttcgattcttggggccagggcaccctcgtgaccgtgtcatctacgcgtatccagaaccctgatcctgccgtgtaccagctgcgggatagcaagagcagcgacaagagcgtgtgtctgttcaccgacttcgacagccagaccaacgtgtcccagagcaaggactccgacgtgtacatcaccgataagtgcgtgctggacatgcggagcatggacttcaagagcaactccgccgtggcctggtccaacaagtccgatttcgcctgcgccaacgccttcaacaacagcattatccccgaggacacattcttcccaagccccgagagcagctgcgacgtgaagctggtggaaaagagcttcgagacagacaccaacctgaacttccagatcctgtacgagatcctgctgggcaaggccaccctgtacgccgtgctggtgtctgccctggtgctgatggctatggtcaagcggaaggacagccgggga

SEQ ID NO: 5332 - DNA, 2295 bp, synthetic construct
  source 1..2295: mol_type = other DNA
atggccttaccagtgaccgccttgctcctgccgctggccttgctgctccacgccgccaggccggaagtgcagctggttgaatctggcggaggactggttcagcctggcggatctctgagactgtcttgtgccgccagcggcttcagcttcagcgacttttggatgagctgggtccgacaggcccctggcaaaggacttgaatgggtcgccacaatcagccaggccggcagcgagaaggactacgtggactctgtgaagggcagattcaccatcagccgggacaacgccaagaagtccctgtacctccagatgaacagcctgagagccgaggacaccgccgtgtactattgtgcctctggcgtgtacagcttcgactacagaggccagggcaccctggtcacagtctcttctggtaccggcggaggcggatctggcggcggaggtagcggtggcggaggatctgaattcgacatcgtgatgagccagagccctagcagcctggccgtgtccgtgggcgagaaagtgaccatgagctgcaagagcagccagtccctgctgcacagcagcaaccagaagaactacctggcctggtatcagcagaagcccggccagtcccccaaggtgctgatctactgggccagcaccagagaaagcggcgtgcccgatagattcaccggcagcggctctggcaccgacttcaccctgaccatcaccagcgtgaagtccgaggacctggctgtgtactactgccagcagtattacagctacccctggaccttcggcggaggcacccggctggaaatcaaaagactcgaggacctgaagaacgtgttcccacctgaggtggccgtgttcgagcctagcgaggccgagatcagccacacccagaaagccaccctcgtgtgcctggctaccggcttctaccccgaccatgtggaactgtcttggtgggtcaacggcaaagaggtgcacagcggcgtgtgtaccgacccccagccactgaaagaacagcccgccctgaacgacagccggtactgcctgagcagcagactgagagtgtccgccaccttctggcagaacccccggaaccacttcagatgccaggtgcagttctacggcctgagcgagaacgacgagtggacccaggacagagccaagcccgtgacccagatcgtgtctgccgaagcctggggcagagccgattgcggctttaccagcgagagctaccagcagggcgtgctgagcgccaccaacctgagcgtgatcggcttcagaatcctgctgctgaaagtggccggctttaacctgctgatgaccctgcggctgtggtccagcagggccaagcgatctggatctggagcaacaaacttctcactactcaaacaagcaggtgacgtggaggagaatcccgggcctactagtatggactggatttggcgcatccttttccttgtcggcgctgctaccggcgcgcattccttcgaagaagtgcaactccagcagagcgtggccgagcttgtgaagcctggcgcttccgtgaagatgtcctgcaaggtgtccggctacaccctgacagaccacaccatccactggatgaagcagcggcctgagcagggcctggaatggatcggctacatctaccccagggacggcatcaccggctacaacgagaagttcaagggcaaggccacactgaccgccgacaccagcagcagcacagcctacatgcaactgaacagcctgaccagcgaggacagcgccgtgtacttctgtgccagatggggctacagctacagaaactacgcctactactacgactactggggccagggcacaaccctgaccgtgtctagtacgcgtatccagaaccctgatcctgccgtgtaccagctgcgggatagcaagagcagcgacaagagcgtgtgtctgttcaccgacttcgacagccagaccaacgtgtcccagagcaaggactccgacgtgtacatcaccgataagtgcgtgctggacatgcggagcatggacttcaagagcaactccgccgtggcctggtccaacaagtccgatttcgcctgcgccaacgccttcaacaacagcattatccccgaggacacattcttcccaagccccgagagcagctgcgacgtgaagctggtggaaaagagcttcgagacagacaccaacctgaacttccagatcctgtacgagatcctgctgggcaaggccaccctgtacgccgtgctggtgtctgccctggtgctgatggctatggtcaagcggaaggacagccgggga

SEQ ID NO: 5333 - DNA, 2286 bp, synthetic construct
  source 1..2286: mol_type = other DNA
atggccttaccagtgaccgccttgctcctgccgctggccttgctgctccacgccgccaggccggaagtgcagctggttgaatctggcggaggactggttcagcctggcggatctctgagactgtcttgtgccgccagcggcttcagcttcagcgacttttggatgagctgggtccgacaggcccctggcaaaggacttgaatgggtcgccacaatcagccaggccggcagcgagaaggactacgtggactctgtgaagggcagattcaccatcagccgggacaacgccaagaagtccctgtacctccagatgaacagcctgagagccgaggacaccgccgtgtactattgtgcctctggcgtgtacagcttcgactacagaggccagggcaccctggtcacagtctcttctggtaccggcggaggcggatctggcggcggaggtagcggtggcggaggatctgaattcgagatcgtgctgacacagagccctggcaccctgagcctgtctccaggcgaaagagccacactgagctgtcgggccagccagagcgtgtccagctcttacctggcctggtatcagcagaagcccggccaggctccccggctgctgatctacggaacaagcagcagagccaccggcatccccgacagattttctggcagcggctccggcaccgacttcaccctgacaatcagcagactggaacccgaggacttcgccgtgtactactgccagcagtacggcagcagccccttcacctttggcggaggcaccaaggtggaaatcaagagactcgaggacctgaagaacgtgttcccacctgaggtggccgtgttcgagcctagcgaggccgagatcagccacacccagaaagccaccctcgtgtgcctggctaccggcttctaccccgaccatgtggaactgtcttggtgggtcaacggcaaagaggtgcacagcggcgtgtgtaccgacccccagccactgaaagaacagcccgccctgaacgacagccggtactgcctgagcagcagactgagagtgtccgccaccttctggcagaacccccggaaccacttcagatgccaggtgcagttctacggcctgagcgagaacgacgagtggacccaggacagagccaagcccgtgacccagatcgtgtctgccgaagcctggggcagagccgattgcggctttaccagcgagagctaccagcagggcgtgctgagcgccaccaacctgagcgtgatcggcttcagaatcctgctgctgaaagtggccggctttaacctgctgatgaccctgcggctgtggtccagcagggccaagcgatctggatctggagcaacaaacttctcactactcaaacaagcaggtgacgtggaggagaatcccgggcctactagtatggactggatttggcgcatccttttccttgtcggcgctgctaccggcgcgcattccttcgaacaggtgcaactccaggaatctggccccggactggctaagcccagcgagacactgagcctgacctgtaccgtgtccggcgacagcatcaccagctactactggtcctggatcagacagccccctggcaagggcctggaatggatcggctacatctactacagcggcagcaccaactacaaccccagcctgaagtccagagtgaccatcagcgtggacaccagcaagaaccagttctccctgaagctgagcagcgtgacagccgccgacaccgccgtgtattattgcgccagagatcagcggagaatcgccgctgccggcacccacttttacggcatggatgtgtggggccagggcaccaccgtgaccgtgtcatctacgcgtatccagaaccctgatcctgccgtgtaccagctgcgggatagcaagagcagcgacaagagcgtgtgtctgttcaccgacttcgacagccagaccaacgtgtcccagagcaaggactccgacgtgtacatcaccgataagtgcgtgctggacatgcggagcatggacttcaagagcaactccgccgtggcctggtccaacaagtccgatttcgcctgcgccaacgccttcaacaacagcattatccccgaggacacattcttcccaagccccgagagcagctgcgacgtgaagctggtggaaaagagcttcgagacagacaccaacctgaacttccagatcctgtacgagatcctgctgggcaaggccaccctgtacgccgtgctggtgtctgccctggtgctgatggctatggtcaagcggaaggacagccgggga

SEQ ID NO: 5334 - DNA, 2262 bp, synthetic construct
  source 1..2262: mol_type = other DNA
atggccttaccagtgaccgccttgctcctgccgctggccttgctgctccacgccgccaggccggaagtgcagctggttgaatctggcggaggactggttcagcctggcggatctctgagactgtcttgtgccgccagcggcttcagcttcagcgacttttggatgagctgggtccgacaggcccctggcaaaggacttgaatgggtcgccacaatcagccaggccggcagcgagaaggactacgtggactctgtgaagggcagattcaccatcagccgggacaacgccaagaagtccctgtacctccagatgaacagcctgagagccgaggacaccgccgtgtactattgtgcctctggcgtgtacagcttcgactacagaggccagggcaccctggtcacagtctcttctggtaccggcggaggcggatctggcggcggaggtagcggtggcggaggatctgaattcgacatcctgctgacccagagccccgtgatcctgtccgtgtctcctggcgagagagtgtccttcagctgtcgggccagccagagcatcggcaccaacatccactggtatcagcagcggaccaacggcagccccagactgctgattaagtacgccagcgagtccatcagcggcatccccagcagattttccggcagcggctccggcaccgacttcaccctgagcatcaacagcgtggaaagcgaggacattgccgactactactgccagcagaacaacaactggcccaccaccttcggagccggcaccaagctggaactgaagctcgaggacctgaagaacgtgttcccacctgaggtggccgtgttcgagcctagcgaggccgagatcagccacacccagaaagccaccctcgtgtgcctggctaccggcttctaccccgaccatgtggaactgtcttggtgggtcaacggcaaagaggtgcacagcggcgtgtgtaccgacccccagccactgaaagaacagcccgccctgaacgacagccggtactgcctgagcagcagactgagagtgtccgccaccttctggcagaacccccggaaccacttcagatgccaggtgcagttctacggcctgagcgagaacgacgagtggacccaggacagagccaagcccgtgacccagatcgtgtctgccgaagcctggggcagagccgattgcggctttaccagcgagagctaccagcagggcgtgctgagcgccaccaacctgagcgtgatcggcttcagaatcctgctgctgaaagtggccggctttaacctgctgatgaccctgcggctgtggtccagcagggccaagcgatctggatctggagcaacaaacttctcactactcaaacaagcaggtgacgtggaggagaatcccgggcctactagtatggactggatttggcgcatccttttccttgtcggcgctgctaccggcgcgcattccttcgaacaggtgcagctgaagcagagcggacctggcctggtgcagcctagccagagcctgtccatcacctgtaccgtgtccggcttcagcctgaccaactacggcgtgcactgggtgcgccagagccctggaaaaggactggaatggctgggagtgatttggagcggcggcaacaccgactacaacacccccttcaccagcagactgtctatcaacaaggacaacagcaagagccaggtgttcttcaagatgaacagcctccagagcaacgacaccgccatctactactgtgctagagccctgacctactatgactacgagttcgcctactggggccagggcacactcgtgacagtgtctgctacgcgtatccagaaccctgatcctgccgtgtaccagctgcgggatagcaagagcagcgacaagagcgtgtgtctgttcaccgacttcgacagccagaccaacgtgtcccagagcaaggactccgacgtgtacatcaccgataagtgcgtgctggacatgcggagcatggacttcaagagcaactccgccgtggcctggtccaacaagtccgatttcgcctgcgccaacgccttcaacaacagcattatccccgaggacacattcttcccaagccccgagagcagctgcgacgtgaagctggtggaaaagagcttcgagacagacaccaacctgaacttccagatcctgtacgagatcctgctgggcaaggccaccctgtacgccgtgctggtgtctgccctggtgctgatggctatggtcaagcggaaggacagccgggga

SEQ ID NO: 5335 - DNA, 2241 bp, synthetic construct
  source 1..2241: mol_type = other DNA
atggccttaccagtgaccgccttgctcctgccgctggccttgctgctccacgccgccaggccggaagtgcagctggttgaatctggcggaggactggttcagcctggcggatctctgagactgtcttgtgccgccagcggcttcagcttcagcgacttttggatgagctgggtccgacaggcccctggcaaaggacttgaatgggtcgccacaatcagccaggccggcagcgagaaggactacgtggactctgtgaagggcagattcaccatcagccgggacaacgccaagaagtccctgtacctccagatgaacagcctgagagccgaggacaccgccgtgtactattgtgcctctggcgtgtacagcttcgactacagaggccagggcaccctggtcacagtctcttctggtaccggcggaggcggatctggcggcggaggtagcggtggcggaggatctgaattcatgacccagagccccaagttcctgctggtgtctgccggcgacagagtgaccctgacatgcaaggccagccagagcgtgaacaacgacgtgtactggtatcagcaggaacccggccagtcccccaagctgctgatctactgggccagcaccagagaaagcggcgtgcccgatagattcaccggcagcggctctggcaccgacttcaccctgacaatcagcagcgtgcaggccgaggacctggccgtgtactactgcaagcagagctacaacctgtacaccttcggcggaggcaccaagctggaaatcaagagactcgaggacctgaagaacgtgttcccacctgaggtggccgtgttcgagcctagcgaggccgagatcagccacacccagaaagccaccctcgtgtgcctggctaccggcttctaccccgaccatgtggaactgtcttggtgggtcaacggcaaagaggtgcacagcggcgtgtgtaccgacccccagccactgaaagaacagcccgccctgaacgacagccggtactgcctgagcagcagactgagagtgtccgccaccttctggcagaacccccggaaccacttcagatgccaggtgcagttctacggcctgagcgagaacgacgagtggacccaggacagagccaagcccgtgacccagatcgtgtctgccgaagcctggggcagagccgattgcggctttaccagcgagagctaccagcagggcgtgctgagcgccaccaacctgagcgtgatcggcttcagaatcctgctgctgaaagtggccggctttaacctgctgatgaccctgcggctgtggtccagcagggccaagcgatctggatctggagcaacaaacttctcactactcaaacaagcaggtgacgtggaggagaatcccgggcctactagtatggactggatttggcgcatccttttccttgtcggcgctgctaccggcgcgcattccttcgaagaatctggaagaggactggtgcagcctggcggcagcagaaagctgtcttgtgccgccagcggcttcaccttcagcaccagcggaatgcactgggtgcgccaggcccctgagaagggactggaatgggtggcctacatcagctccggcagcaccaccatctaccacgccgataccgtgaagggccggttcaccatcagccgggacaaccccaagaataccctgttcctccagatgaccagcctgcggagcgaggacaccgccatgtactattgctgcgccagaagcggccagttcggcaactacttcgactactggggccagggcaccaccctgaccgtgtcatctacgcgtatccagaaccctgatcctgccgtgtaccagctgcgggatagcaagagcagcgacaagagcgtgtgtctgttcaccgacttcgacagccagaccaacgtgtcccagagcaaggactccgacgtgtacatcaccgataagtgcgtgctggacatgcggagcatggacttcaagagcaactccgccgtggcctggtccaacaagtccgatttcgcctgcgccaacgccttcaacaacagcattatccccgaggacacattcttcccaagccccgagagcagctgcgacgtgaagctggtggaaaagagcttcgagacagacaccaacctgaacttccagatcctgtacgagatcctgctgggcaaggccaccctgtacgccgtgctggtgtctgccctggtgctgatggctatggtcaagcggaaggacagccgggga

SEQ ID NO: 5336 - DNA, 2256 bp, synthetic construct
  source 1..2256: mol_type = other DNA
atggccttaccagtgaccgccttgctcctgccgctggccttgctgctccacgccgccaggccggaagtgcagctggttgaatctggcggaggactggttcagcctggcggatctctgagactgtcttgtgccgccagcggcttcagcttcagcgacttttggatgagctgggtccgacaggcccctggcaaaggacttgaatgggtcgccacaatcagccaggccggcagcgagaaggactacgtggactctgtgaagggcagattcaccatcagccgggacaacgccaagaagtccctgtacctccagatgaacagcctgagagccgaggacaccgccgtgtactattgtgcctctggcgtgtacagcttcgactacagaggccagggcaccctggtcacagtctcttctggtaccggcggaggcggatctggcggcggaggtagcggtggcggaggatctgaattccagagcccatctagcctggctgtgtctgccggcgagaaagtgaccatgagctgcaagagcagccagagcctgctgaacagccggacccggaagaactacctggcctggtatcagcagaagcccggccagagccccaagctgctgatctactgggccagcaccagagaaagcggcgtgcccgatagattcaccggctctggcagcggcaccgacttcaccctgacaatcagcagcgtgcaggccgaggacctggccgtgtactactgcaagcagagcaacctgtacaccttcggcggaggcaccaagctggaaatcaagctcgaggacctgaagaacgtgttcccacctgaggtggccgtgttcgagcctagcgaggccgagatcagccacacccagaaagccaccctcgtgtgcctggctaccggcttctaccccgaccatgtggaactgtcttggtgggtcaacggcaaagaggtgcacagcggcgtgtgtaccgacccccagccactgaaagaacagcccgccctgaacgacagccggtactgcctgagcagcagactgagagtgtccgccaccttctggcagaacccccggaaccacttcagatgccaggtgcagttctacggcctgagcgagaacgacgagtggacccaggacagagccaagcccgtgacccagatcgtgtctgccgaagcctggggcagagccgattgcggctttaccagcgagagctaccagcagggcgtgctgagcgccaccaacctgagcgtgatcggcttcagaatcctgctgctgaaagtggccggctttaacctgctgatgaccctgcggctgtggtccagcagggccaagcgatctggatctggagcaacaaacttctcactactcaaacaagcaggtgacgtggaggagaatcccgggcctactagtatggactggatttggcgcatccttttccttgtcggcgctgctaccggcgcgcattccttcgaacaggtgcagctggaagagtctggacccgagcttgtgaagcctggggccagcgtgaagctgtcctgtaaagccagcggctacaccttcaccgagtacatcatccactgggtcaagcagcggagcggccagggcctggaatggatcggctggttttaccctggctccggcagcatcaagtacaacgagaagttcaaggacaaggccaccctgaccgccgacaagtccagcagcaccgtgtacatggaactgagcggcctgaccagcgaggacagcgccgtgtatttctgcgccagacacgacggctacagctacttcgactattggggccagggcaccacactgaccgtgtcctctacgcgtatccagaaccctgatcctgccgtgtaccagctgcgggatagcaagagcagcgacaagagcgtgtgtctgttcaccgacttcgacagccagaccaacgtgtcccagagcaaggactccgacgtgtacatcaccgataagtgcgtgctggacatgcggagcatggacttcaagagcaactccgccgtggcctggtccaacaagtccgatttcgcctgcgccaacgccttcaacaacagcattatccccgaggacacattcttcccaagccccgagagcagctgcgacgtgaagctggtggaaaagagcttcgagacagacaccaacctgaacttccagatcctgtacgagatcctgctgggcaaggccaccctgtacgccgtgctggtgtctgccctggtgctgatggctatggtcaagcggaaggacagccgggga

SEQ ID NO: 5337 - DNA, 2265 bp, synthetic construct
  source 1..2265: mol_type = other DNA
atggccttaccagtgaccgccttgctcctgccgctggccttgctgctccacgccgccaggccggaagtgcagctggttgaatctggcggaggactggttcagcctggcggatctctgagactgtcttgtgccgccagcggcttcagcttcagcgacttttggatgagctgggtccgacaggcccctggcaaaggacttgaatgggtcgccacaatcagccaggccggcagcgagaaggactacgtggactctgtgaagggcagattcaccatcagccgggacaacgccaagaagtccctgtacctccagatgaacagcctgagagccgaggacaccgccgtgtactattgtgcctctggcgtgtacagcttcgactacagaggccagggcaccctggtcacagtctcttctggtaccggcggaggcggatctggcggcggaggtagcggtggcggaggatctgaattcgacatccagatgacccagagccccagcagcctgtctgcctctctgggcgagagagtgtccctgacctgtcgggccacacaggaactgagcggctacctgtcttggctgcagcagaagcccgacggcaccatcaagcggctgatctacgccgccagcaccctggatagcggcgtgcccaagagattcagcggcaacagaagcggcagcgactacagcctgaccatcagctccctggaaagcgaggacttcgccgactactactgcctgcagtacgccatctacccctacaccttcggcggaggcaccaagctggaaatcaagctcgaggacctgaagaacgtgttcccacctgaggtggccgtgttcgagcctagcgaggccgagatcagccacacccagaaagccaccctcgtgtgcctggctaccggcttctaccccgaccatgtggaactgtcttggtgggtcaacggcaaagaggtgcacagcggcgtgtgtaccgacccccagccactgaaagaacagcccgccctgaacgacagccggtactgcctgagcagcagactgagagtgtccgccaccttctggcagaacccccggaaccacttcagatgccaggtgcagttctacggcctgagcgagaacgacgagtggacccaggacagagccaagcccgtgacccagatcgtgtctgccgaagcctggggcagagccgattgcggctttaccagcgagagctaccagcagggcgtgctgagcgccaccaacctgagcgtgatcggcttcagaatcctgctgctgaaagtggccggctttaacctgctgatgaccctgcggctgtggtccagcagggccaagcgatctggatctggagcaacaaacttctcactactcaaacaagcaggtgacgtggaggagaatcccgggcctactagtatggactggatttggcgcatccttttccttgtcggcgctgctaccggcgcgcattccttcgaagaggtgcaactgcagcagtctggccccgagcttgtgaagcctggcgcctccgtgaagatgagctgcaaggccagcggctacacctttaccagctacttcatccactgggtcaagcagaaacccggccagggcctggaatggatcggcttcatcaacccttacaacgacggcagcaagtacaacgagaagttcaagggcaaggccaccctgaccagcgacaagagcagcagcaccgcctacatggaactgtccagcctgacatccgaggacagcgccgtgtactactgcaccagggacgacggctactacggctacgccatggactactggggccagggaacaagcgtcaccgtgtcctctacgcgtatccagaaccctgatcctgccgtgtaccagctgcgggatagcaagagcagcgacaagagcgtgtgtctgttcaccgacttcgacagccagaccaacgtgtcccagagcaaggactccgacgtgtacatcaccgataagtgcgtgctggacatgcggagcatggacttcaagagcaactccgccgtggcctggtccaacaagtccgatttcgcctgcgccaacgccttcaacaacagcattatccccgaggacacattcttcccaagccccgagagcagctgcgacgtgaagctggtggaaaagagcttcgagacagacaccaacctgaacttccagatcctgtacgagatcctgctgggcaaggccaccctgtacgccgtgctggtgtctgccctggtgctgatggctatggtcaagcggaaggacagccgggga

SEQ ID NO: 5338 - DNA, 2280 bp, synthetic construct
  source 1..2280: mol_type = other DNA
atggccttaccagtgaccgccttgctcctgccgctggccttgctgctccacgccgccaggccggaagtgcagctggttgaatctggcggaggactggttcagcctggcggatctctgagactgtcttgtgccgccagcggcttcagcttcagcgacttttggatgagctgggtccgacaggcccctggcaaaggacttgaatgggtcgccacaatcagccaggccggcagcgagaaggactacgtggactctgtgaagggcagattcaccatcagccgggacaacgccaagaagtccctgtacctccagatgaacagcctgagagccgaggacaccgccgtgtactattgtgcctctggcgtgtacagcttcgactacagaggccagggcaccctggtcacagtctcttctggtaccggcggaggcggatctggcggcggaggtagcggtggcggaggatctgaattcgacaccatcgtgctgacacagagccctgcttccctggccgtgtccctgggacagagagccaccatctcttgcagagccagcgagagcgtggacagctacggcaacagcttcatgcactggtatcagcagaagcccggccagccccccaagctgctgatctacctggcctccaacctggaaagcggcgtgcccgccagattttctggcagcggcagcagaaccgacttcaccctgaccatcgaccccgtggaagccgatgatgccgccacctactactgccagcagaacaactacgacccctggaccttcggcggaggcaccaagctggaaatcaagctcgaggacctgaagaacgtgttcccacctgaggtggccgtgttcgagcctagcgaggccgagatcagccacacccagaaagccaccctcgtgtgcctggctaccggcttctaccccgaccatgtggaactgtcttggtgggtcaacggcaaagaggtgcacagcggcgtgtgtaccgacccccagccactgaaagaacagcccgccctgaacgacagccggtactgcctgagcagcagactgagagtgtccgccaccttctggcagaacccccggaaccacttcagatgccaggtgcagttctacggcctgagcgagaacgacgagtggacccaggacagagccaagcccgtgacccagatcgtgtctgccgaagcctggggcagagccgattgcggctttaccagcgagagctaccagcagggcgtgctgagcgccaccaacctgagcgtgatcggcttcagaatcctgctgctgaaagtggccggctttaacctgctgatgaccctgcggctgtggtccagcagggccaagcgatctggatctggagcaacaaacttctcactactcaaacaagcaggtgacgtggaggagaatcccgggcctactagtatggactggatttggcgcatccttttccttgtcggcgctgctaccggcgcgcattccttcgaagaagtgcaactccagcagagcggccctgagcttgtgaagcctggcgcttccgtgaagatgagctgcaaggccagcggctacaccttcaccagctacgtgatgcactgggtcaagcagaaacctggacagggcctggaatggatcggctacatcaacccctacaacgacggcaccaagtacaacgagaagttcaagggcaaggccaccctgacaagcgacaccagcagcagcaccgcctacatggaactgaacagcctgaccagcgaggacagcgccgtgtacttctgcgccagacccatctacttcgacaacgactacttcgattactggggccagggcaccaccctgaaggtgtcctctacgcgtatccagaaccctgatcctgccgtgtaccagctgcgggatagcaagagcagcgacaagagcgtgtgtctgttcaccgacttcgacagccagaccaacgtgtcccagagcaaggactccgacgtgtacatcaccgataagtgcgtgctggacatgcggagcatggacttcaagagcaactccgccgtggcctggtccaacaagtccgatttcgcctgcgccaacgccttcaacaacagcattatccccgaggacacattcttcccaagccccgagagcagctgcgacgtgaagctggtggaaaagagcttcgagacagacaccaacctgaacttccagatcctgtacgagatcctgctgggcaaggccaccctgtacgccgtgctggtgtctgccctggtgctgatggctatggtcaagcggaaggacagccgggga

SEQ ID NO: 5339 - DNA, 2265 bp, synthetic construct
  source 1..2265: mol_type = other DNA
atggccttaccagtgaccgccttgctcctgccgctggccttgctgctccacgccgccaggccggaagtgcagctggttgaatctggcggaggactggttcagcctggcggatctctgagactgtcttgtgccgccagcggcttcagcttcagcgacttttggatgagctgggtccgacaggcccctggcaaaggacttgaatgggtcgccacaatcagccaggccggcagcgagaaggactacgtggactctgtgaagggcagattcaccatcagccgggacaacgccaagaagtccctgtacctccagatgaacagcctgagagccgaggacaccgccgtgtactattgtgcctctggcgtgtacagcttcgactacagaggccagggcaccctggtcacagtctcttctggtaccggcggaggcggatctggcggcggaggtagcggtggcggaggatctgaattcgacatccagatgacccagagccccagcagcctgtctgccagcgtgggcgacagagtgaccatcacatgcaaggccagccaggacgtgggaatcgccgtggcctggtatcagcagaaacccggcaaggtgcccaagctgctgatctactgggccagcaccagacacaccggcgtgcccgatagattttccggcagcggctccggcaccgacttcaccctgacaatcagctccctccagcccgaggacgtggcaacctactactgccagcagtacagcagctacccctacaccttcggccagggcaccaaggtggaaatcaagagactcgaggacctgaagaacgtgttcccacctgaggtggccgtgttcgagcctagcgaggccgagatcagccacacccagaaagccaccctcgtgtgcctggctaccggcttctaccccgaccatgtggaactgtcttggtgggtcaacggcaaagaggtgcacagcggcgtgtgtaccgacccccagccactgaaagaacagcccgccctgaacgacagccggtactgcctgagcagcagactgagagtgtccgccaccttctggcagaacccccggaaccacttcagatgccaggtgcagttctacggcctgagcgagaacgacgagtggacccaggacagagccaagcccgtgacccagatcgtgtctgccgaagcctggggcagagccgattgcggctttaccagcgagagctaccagcagggcgtgctgagcgccaccaacctgagcgtgatcggcttcagaatcctgctgctgaaagtggccggctttaacctgctgatgaccctgcggctgtggtccagcagggccaagcgatctggatctggagcaacaaacttctcactactcaaacaagcaggtgacgtggaggagaatcccgggcctactagtatggactggatttggcgcatccttttccttgtcggcgctgctaccggcgcgcattccttcgaagaagtgcaactggtggaatcaggcggcggactggtgcagcctggcggatctctgagactgagctgtgccgccagcggcttcgacttcagccggtactggatgagctgggtgcgccaggcccctggcaaaggactggaatggatcggcgagatcaaccccgacagcagcaccatcaactacgcccccagcctgaaggacaagttcatcatcagccgggacaacgccaagaacagcctgtacctccagatgaactccctgcgggccgaggacaccgccgtgtactattgcgccagacccgacggcaactactggtacttcgacgtgtggggccagggaaccctcgtgaccgtgtcatctacgcgtatccagaaccctgatcctgccgtgtaccagctgcgggatagcaagagcagcgacaagagcgtgtgtctgttcaccgacttcgacagccagaccaacgtgtcccagagcaaggactccgacgtgtacatcaccgataagtgcgtgctggacatgcggagcatggacttcaagagcaactccgccgtggcctggtccaacaagtccgatttcgcctgcgccaacgccttcaacaacagcattatccccgaggacacattcttcccaagccccgagagcagctgcgacgtgaagctggtggaaaagagcttcgagacagacaccaacctgaacttccagatcctgtacgagatcctgctgggcaaggccaccctgtacgccgtgctggtgtctgccctggtgctgatggctatggtcaagcggaaggacagccgggga

SEQ ID NO: 5340 - DNA, 2265 bp, synthetic construct
  source 1..2265: mol_type = other DNA
atggccttaccagtgaccgccttgctcctgccgctggccttgctgctccacgccgccaggccggaagtgcagctggttgaatctggcggaggactggttcagcctggcggatctctgagactgtcttgtgccgccagcggcttcagcttcagcgacttttggatgagctgggtccgacaggcccctggcaaaggacttgaatgggtcgccacaatcagccaggccggcagcgagaaggactacgtggactctgtgaagggcagattcaccatcagccgggacaacgccaagaagtccctgtacctccagatgaacagcctgagagccgaggacaccgccgtgtactattgtgcctctggcgtgtacagcttcgactacagaggccagggcaccctggtcacagtctcttctggtaccggcggaggcggatctggcggcggaggtagcggtggcggaggatctgaattcgacatcgtgatgacccagagccagaagagcatgagcaccagcgtgggcgacagagtgagcatcacctgcaaggccagccaggacgtgatcaccggcgtggcctggtaccagcagaagcccggccagagccccaagctgctgatctacagcgccagctacagatacaccggcgtgcccgacagattcaccggcagcggcagcggcaccgacttcaccttcaccatcagcaacgtgcaggccgaggacctggccgtgtactactgccagcagcactacagcacccccctgaccttcggcgccggcaccaagctggagctgaagctcgaggacctgaagaacgtgttcccacctgaggtggccgtgttcgagcctagcgaggccgagatcagccacacccagaaagccaccctcgtgtgcctggctaccggcttctaccccgaccatgtggaactgtcttggtgggtcaacggcaaagaggtgcacagcggcgtgtgtaccgacccccagccactgaaagaacagcccgccctgaacgacagccggtactgcctgagcagcagactgagagtgtccgccaccttctggcagaacccccggaaccacttcagatgccaggtgcagttctacggcctgagcgagaacgacgagtggacccaggacagagccaagcccgtgacccagatcgtgtctgccgaagcctggggcagagccgattgcggctttaccagcgagagctaccagcagggcgtgctgagcgccaccaacctgagcgtgatcggcttcagaatcctgctgctgaaagtggccggctttaacctgctgatgaccctgcggctgtggtccagcagggccaagcgatctggatctggagcaacaaacttctcactactcaaacaagcaggtgacgtggaggagaatcccgggcctactagtatggactggatttggcgcatccttttccttgtcggcgctgctaccggcgcgcattccttcgaacaggtgcagctgcagcagcccggcgccgagctggtgagacccggcgccagcgtgaagctgagctgcaaggccagcggctacagcttcaccacctactggatgaactgggtgaagcagagacccggccagggcctggagtggatcggcatgatccaccccagcgacagcgagaccagactgaaccagaagttcaaggacaaggccaccctgaccgtggacaagagcagcagcaccgcctacatgcagctgagcagccccaccagcgaggacagcgccgtgtactactgcgccagaagcaccatgatcgccaccagagccatggactactggggccagggcaccagcgtgaccgtgagcagcacgcgtatccagaaccctgatcctgccgtgtaccagctgcgggatagcaagagcagcgacaagagcgtgtgtctgttcaccgacttcgacagccagaccaacgtgtcccagagcaaggactccgacgtgtacatcaccgataagtgcgtgctggacatgcggagcatggacttcaagagcaactccgccgtggcctggtccaacaagtccgatttcgcctgcgccaacgccttcaacaacagcattatccccgaggacacattcttcccaagccccgagagcagctgcgacgtgaagctggtggaaaagagcttcgagacagacaccaacctgaacttccagatcctgtacgagatcctgctgggcaaggccaccctgtacgccgtgctggtgtctgccctggtgctgatggctatggtcaagcggaaggacagccgggga

SEQ ID NO: 5341 - DNA, 2283 bp, synthetic construct
  source 1..2283: mol_type = other DNA
atggccttaccagtgaccgccttgctcctgccgctggccttgctgctccacgccgccaggccggaagtgcagctggttgaatctggcggaggactggttcagcctggcggatctctgagactgtcttgtgccgccagcggcttcagcttcagcgacttttggatgagctgggtccgacaggcccctggcaaaggacttgaatgggtcgccacaatcagccaggccggcagcgagaaggactacgtggactctgtgaagggcagattcaccatcagccgggacaacgccaagaagtccctgtacctccagatgaacagcctgagagccgaggacaccgccgtgtactattgtgcctctggcgtgtacagcttcgactacagaggccagggcaccctggtcacagtctcttctggtaccggcggaggcggatctggcggcggaggtagcggtggcggaggatctgaattccagagcgtgctgacacagcctccatccgtgtctggcgctccaggccagagagtgaccatctcctgtaccggcagcggcagcaacatcggagccccctacgacgtgtcctggtatcagcaactgcctggcaccgcccccaagctgctgatctaccacaacaacaagcggcccagcggcgtgcccgatagattcagcggctctaagagcggcaccagcgccagcctggctatcactggactccaggccgaggacgaggccgactactactgtgccacagtggaagccggcctgagcggctctgtgtttggcggcggaacaaagctgaccgtgctgggagctctcgaggacctgaagaacgtgttcccacctgaggtggccgtgttcgagcctagcgaggccgagatcagccacacccagaaagccaccctcgtgtgcctggctaccggcttctaccccgaccatgtggaactgtcttggtgggtcaacggcaaagaggtgcacagcggcgtgtgtaccgacccccagccactgaaagaacagcccgccctgaacgacagccggtactgcctgagcagcagactgagagtgtccgccaccttctggcagaacccccggaaccacttcagatgccaggtgcagttctacggcctgagcgagaacgacgagtggacccaggacagagccaagcccgtgacccagatcgtgtctgccgaagcctggggcagagccgattgcggctttaccagcgagagctaccagcagggcgtgctgagcgccaccaacctgagcgtgatcggcttcagaatcctgctgctgaaagtggccggctttaacctgctgatgaccctgcggctgtggtccagcagggccaagcgatctggatctggagcaacaaacttctcactactcaaacaagcaggtgacgtggaggagaatcccgggcctactagtatggactggatttggcgcatccttttccttgtcggcgctgctaccggcgcgcattccttcgaacaggtgcaactggtgcagagcggagccgaagtgaagaaacctggggccagcgtgaaggtgtcctgcaaggtgtccggctacaccctgaccgagctgagcattcactgggtgcgccaggcccctggcaagggactggaatggatgggcggcttcgaccccgaagagaacgagatcgtgtacgcccagcggttccagggcagagtgacaatgaccgaggacaccagcaccgacaccgcctacatggaactgagcagcctgcggagcgaggataccgccgtgtactactgcgccatcgtgggcagcttcagccctctgacactgggcctgtggggccagggaactatggtcaccgtgtccagcacgcgtatccagaaccctgatcctgccgtgtaccagctgcgggatagcaagagcagcgacaagagcgtgtgtctgttcaccgacttcgacagccagaccaacgtgtcccagagcaaggactccgacgtgtacatcaccgataagtgcgtgctggacatgcggagcatggacttcaagagcaactccgccgtggcctggtccaacaagtccgatttcgcctgcgccaacgccttcaacaacagcattatccccgaggacacattcttcccaagccccgagagcagctgcgacgtgaagctggtggaaaagagcttcgagacagacaccaacctgaacttccagatcctgtacgagatcctgctgggcaaggccaccctgtacgccgtgctggtgtctgccctggtgctgatggctatggtcaagcggaaggacagccgggga

SEQ ID NO: 5342 - DNA, 2283 bp, synthetic construct
  source 1..2283: mol_type = other DNA
atggccttaccagtgaccgccttgctcctgccgctggccttgctgctccacgccgccaggccggaagtgcagctggttgaatctggcggaggactggttcagcctggcggatctctgagactgtcttgtgccgccagcggcttcagcttcagcgacttttggatgagctgggtccgacaggcccctggcaaaggacttgaatgggtcgccacaatcagccaggccggcagcgagaaggactacgtggactctgtgaagggcagattcaccatcagccgggacaacgccaagaagtccctgtacctccagatgaacagcctgagagccgaggacaccgccgtgtactattgtgcctctggcgtgtacagcttcgactacagaggccagggcaccctggtcacagtctcttctggtaccggcggaggcggatctggcggcggaggtagcggtggcggaggatctgaattccagagcgtgctgacacagcctccatccgtgtctggcgctccaggccagagagtgaccatctcctgtaccggcagcggcagcaacatcggagccccctacgacgtgtcctggtatcagcaactgcctggcaccgcccccaagctgctgatctaccacaacaacaagcggcccagcggcgtgcccgatagattcagcggctctaagagcggcaccagcgccagcctggctatcactggactccaggccgaggacgaggccgactactactgccagagctacgacagcagcagcatcagcaccatcttcggcggaggcaccaagctgacagtgctgggagctctcgaggacctgaagaacgtgttcccacctgaggtggccgtgttcgagcctagcgaggccgagatcagccacacccagaaagccaccctcgtgtgcctggctaccggcttctaccccgaccatgtggaactgtcttggtgggtcaacggcaaagaggtgcacagcggcgtgtgtaccgacccccagccactgaaagaacagcccgccctgaacgacagccggtactgcctgagcagcagactgagagtgtccgccaccttctggcagaacccccggaaccacttcagatgccaggtgcagttctacggcctgagcgagaacgacgagtggacccaggacagagccaagcccgtgacccagatcgtgtctgccgaagcctggggcagagccgattgcggctttaccagcgagagctaccagcagggcgtgctgagcgccaccaacctgagcgtgatcggcttcagaatcctgctgctgaaagtggccggctttaacctgctgatgaccctgcggctgtggtccagcagggccaagcgatctggatctggagcaacaaacttctcactactcaaacaagcaggtgacgtggaggagaatcccgggcctactagtatggactggatttggcgcatccttttccttgtcggcgctgctaccggcgcgcattccttcgaacaggtgcaactggtgcagagcggagccgaagtgaagaaacctggggccagcgtgaaggtgtcctgcaaggtgtccggctacaccctgaccgagctgagcattcactgggtgcgccaggcccctggcaagggactggaatggatgggcggcttcgaccccgaagagaacgagatcgtgtacgcccagcggttccagggcagagtgacaatgaccgaggacaccagcaccgacaccgcctacatggaactgagcagcctgcggagcgaggataccgccgtgtactactgtgccatcgtgggcagcttcagcggaatcgcctacagaccttggggccagggcacaatggtcaccgtgtctagcacgcgtatccagaaccctgatcctgccgtgtaccagctgcgggatagcaagagcagcgacaagagcgtgtgtctgttcaccgacttcgacagccagaccaacgtgtcccagagcaaggactccgacgtgtacatcaccgataagtgcgtgctggacatgcggagcatggacttcaagagcaactccgccgtggcctggtccaacaagtccgatttcgcctgcgccaacgccttcaacaacagcattatccccgaggacacattcttcccaagccccgagagcagctgcgacgtgaagctggtggaaaagagcttcgagacagacaccaacctgaacttccagatcctgtacgagatcctgctgggcaaggccaccctgtacgccgtgctggtgtctgccctggtgctgatggctatggtcaagcggaaggacagccgggga

SEQ ID NO: 5343 - DNA, 2247 bp, synthetic construct
  source 1..2247: mol_type = other DNA
atggccttaccagtgaccgccttgctcctgccgctggccttgctgctccacgccgccaggccggaagtgcagctggttgaatctggcggaggactggttcagcctggcggatctctgagactgtcttgtgccgccagcggcttcagcttcagcgacttttggatgagctgggtccgacaggcccctggcaaaggacttgaatgggtcgccacaatcagccaggccggcagcgagaaggactacgtggactctgtgaagggcagattcaccatcagccgggacaacgccaagaagtccctgtacctccagatgaacagcctgagagccgaggacaccgccgtgtactattgtgcctctggcgtgtacagcttcgactacagaggccagggcaccctggtcacagtctcttctggtaccggcggaggcggatctggcggcggaggtagcggtggcggaggatctgaattcgacatccagatgacccagagccccagcagcctgtctgccagcgtgggcgacagagtgaccatcacctgtagagccagccagggcatcagaaacaacctggcctggtatcagcagaagcccggcaaggcccccaagcggctgatctacgccgccagcaatctccagagcggcgtgcccagcagattcacaggctctggcagcggcaccgagttcaccctgatcgtgtctagcctccagcccgaggacttcgccacctactactgcctccagcaccacagctaccccctgacatctggcggaggcaccaaggtggaactcgaggacctgaagaacgtgttcccacctgaggtggccgtgttcgagcctagcgaggccgagatcagccacacccagaaagccaccctcgtgtgcctggctaccggcttctaccccgaccatgtggaactgtcttggtgggtcaacggcaaagaggtgcacagcggcgtgtgtaccgacccccagccactgaaagaacagcccgccctgaacgacagccggtactgcctgagcagcagactgagagtgtccgccaccttctggcagaacccccggaaccacttcagatgccaggtgcagttctacggcctgagcgagaacgacgagtggacccaggacagagccaagcccgtgacccagatcgtgtctgccgaagcctggggcagagccgattgcggctttaccagcgagagctaccagcagggcgtgctgagcgccaccaacctgagcgtgatcggcttcagaatcctgctgctgaaagtggccggctttaacctgctgatgaccctgcggctgtggtccagcagggccaagcgatctggatctggagcaacaaacttctcactactcaaacaagcaggtgacgtggaggagaatcccgggcctactagtatggactggatttggcgcatccttttccttgtcggcgctgctaccggcgcgcattccttcgaagaggtgcaggtgctggaaagtggcggaggactggtgcagcctggcggctctctgagactgtcttgtgccgccagcggcttcaccttcagcagctacgccatgagctgggtgcgccaggcccctggaaaaggactggaatgggtgtccgccatcagcggctctggcgggtctaccaactacgccgatagcgtgaagggccggttcaccatcagccgggacaacagcaagaacaccctgtacctccagatgaacagcctgcgggccgaggacaccgccgtgtattattgtgccggcagcagcgggtggagcgagtattggggacagggcaccctcgtgaccgtgtcctctacgcgtatccagaaccctgatcctgccgtgtaccagctgcgggatagcaagagcagcgacaagagcgtgtgtctgttcaccgacttcgacagccagaccaacgtgtcccagagcaaggactccgacgtgtacatcaccgataagtgcgtgctggacatgcggagcatggacttcaagagcaactccgccgtggcctggtccaacaagtccgatttcgcctgcgccaacgccttcaacaacagcattatccccgaggacacattcttcccaagccccgagagcagctgcgacgtgaagctggtggaaaagagcttcgagacagacaccaacctgaacttccagatcctgtacgagatcctgctgggcaaggccaccctgtacgccgtgctggtgtctgccctggtgctgatggctatggtcaagcggaaggacagccgggga

SEQ ID NO: 5344 - DNA, 2265 bp, synthetic construct
  source 1..2265: mol_type = other DNA
atggccttaccagtgaccgccttgctcctgccgctggccttgctgctccacgccgccaggccggaagtgcagctggttgaatctggcggaggactggttcagcctggcggatctctgagactgtcttgtgccgccagcggcttcagcttcagcgacttttggatgagctgggtccgacaggcccctggcaaaggacttgaatgggtcgccacaatcagccaggccggcagcgagaaggactacgtggactctgtgaagggcagattcaccatcagccgggacaacgccaagaagtccctgtacctccagatgaacagcctgagagccgaggacaccgccgtgtactattgtgcctctggcgtgtacagcttcgactacagaggccagggcaccctggtcacagtctcttctggtaccggcggaggcggatctggcggcggaggtagcggtggcggaggatctgaattcgacgagatccagctggtgcagagcggagccgaagtgaagaagcctggcgagagcctgcggatcagctgcaagggcagcggcttcaacatcgaggactactacatccactgggtgcgccagatgcccggcaagggcctggaatggatgggcagaatcgaccccgagaacgacgagactaagtacggccccatcttccagggccacgtgaccatcagcgccgacaccagcatcaacaccgtgtacctccagtggtccagcctgaaggccagcgacaccgccatgtactactgcgcctttagaggcggcgtgtactggggccagggcaccacagtgacagtgtctagcctcgaggacctgaagaacgtgttcccacctgaggtggccgtgttcgagcctagcgaggccgagatcagccacacccagaaagccaccctcgtgtgcctggctaccggcttctaccccgaccatgtggaactgtcttggtgggtcaacggcaaagaggtgcacagcggcgtgtgtaccgacccccagccactgaaagaacagcccgccctgaacgacagccggtactgcctgagcagcagactgagagtgtccgccaccttctggcagaacccccggaaccacttcagatgccaggtgcagttctacggcctgagcgagaacgacgagtggacccaggacagagccaagcccgtgacccagatcgtgtctgccgaagcctggggcagagccgattgcggctttaccagcgagagctaccagcagggcgtgctgagcgccaccaacctgagcgtgatcggcttcagaatcctgctgctgaaagtggccggctttaacctgctgatgaccctgcggctgtggtccagcagggccaagcgatctggatctggagcaacaaacttctcactactcaaacaagcaggtgacgtggaggagaatcccgggcctactagtatggactggatttggcgcatccttttccttgtcggcgctgctaccggcgcgcattccttcgaagatgtcgtgatgacccagagccccgacagcctggctgtgtctctgggagagagagccaccatcaactgcaagtccagccagtccctgctggacagcgacggcaagacctacctgaactggctccagcagaagcccggccagccccccaagagactgatctccctggtgtccaagctggactccggcgtgcccgatagattttccggctctggcagcggcaccgacttcaccctgacaatcagctcccttcaggccgaggacgtggccgtgtactattgctggcagggcacacacttccccggcacctttggcggaggcaccaaggtggaaatcaagacgcgtatccagaaccctgatcctgccgtgtaccagctgcgggatagcaagagcagcgacaagagcgtgtgtctgttcaccgacttcgacagccagaccaacgtgtcccagagcaaggactccgacgtgtacatcaccgataagtgcgtgctggacatgcggagcatggacttcaagagcaactccgccgtggcctggtccaacaagtccgatttcgcctgcgccaacgccttcaacaacagcattatccccgaggacacattcttcccaagccccgagagcagctgcgacgtgaagctggtggaaaagagcttcgagacagacaccaacctgaacttccagatcctgtacgagatcctgctgggcaaggccaccctgtacgccgtgctggtgtctgccctggtgctgatggctatggtcaagcggaaggacagccgggga

SEQ ID NO: 5345 - DNA, 2286 bp, synthetic construct
  source 1..2286: mol_type = other DNA
atggccttaccagtgaccgccttgctcctgccgctggccttgctgctccacgccgccaggccggaagtgcagctggttgaatctggcggaggactggttcagcctggcggatctctgagactgtcttgtgccgccagcggcttcagcttcagcgacttttggatgagctgggtccgacaggcccctggcaaaggacttgaatgggtcgccacaatcagccaggccggcagcgagaaggactacgtggactctgtgaagggcagattcaccatcagccgggacaacgccaagaagtccctgtacctccagatgaacagcctgagagccgaggacaccgccgtgtactattgtgcctctggcgtgtacagcttcgactacagaggccagggcaccctggtcacagtctcttctggtaccggcggaggcggatctggcggcggaggtagcggtggcggaggatctgaattcgacgagcttgtgatgacccagagccccagcagcctgacagtgacagccggcgagaaagtgaccatgagctgcaagagcagccagagcctgctgaacagcggcaaccagaagaactacctgacctggtatcagcagaagcccggccagccccccaagctgctgatctactgggccagcaccagagaaagcggcgtgcccgatagattcaccggctctggcagcggcaccgacttcaccctgacaatcagcagcgtgcaggccgaggacctggccgtgtactactgccagaacgactacagctaccccctgaccttcggagccggcaccaagctggaaatcaagctcgaggacctgaagaacgtgttcccacctgaggtggccgtgttcgagcctagcgaggccgagatcagccacacccagaaagccaccctcgtgtgcctggctaccggcttctaccccgaccatgtggaactgtcttggtgggtcaacggcaaagaggtgcacagcggcgtgtgtaccgacccccagccactgaaagaacagcccgccctgaacgacagccggtactgcctgagcagcagactgagagtgtccgccaccttctggcagaacccccggaaccacttcagatgccaggtgcagttctacggcctgagcgagaacgacgagtggacccaggacagagccaagcccgtgacccagatcgtgtctgccgaagcctggggcagagccgattgcggctttaccagcgagagctaccagcagggcgtgctgagcgccaccaacctgagcgtgatcggcttcagaatcctgctgctgaaagtggccggctttaacctgctgatgaccctgcggctgtggtccagcagggccaagcgatctggatctggagcaacaaacttctcactactcaaacaagcaggtgacgtggaggagaatcccgggcctactagtatggactggatttggcgcatccttttccttgtcggcgctgctaccggcgcgcattccttcgaagaagtgcagctgctggaacagtctggcgccgaacttgtgcggcctggcaccagcgtgaagatcagctgtaaagccagcggctacgccttcaccaactactggctgggctgggtcaagcagaggcctggacacggcctggaatggatcggcgacatctttcccggctccggcaacatccactacaacgagaagttcaagggcaaggccaccctgaccgccgacaagtctagcagcaccgcctacatgcagctgtccagcctgacctttgaggacagcgccgtgtatttctgtgcccggctgcggaactgggacgagcccatggattattggggccagggcaccaccgtgaccgtgtctagtacgcgtatccagaaccctgatcctgccgtgtaccagctgcgggatagcaagagcagcgacaagagcgtgtgtctgttcaccgacttcgacagccagaccaacgtgtcccagagcaaggactccgacgtgtacatcaccgataagtgcgtgctggacatgcggagcatggacttcaagagcaactccgccgtggcctggtccaacaagtccgatttcgcctgcgccaacgccttcaacaacagcattatccccgaggacacattcttcccaagccccgagagcagctgcgacgtgaagctggtggaaaagagcttcgagacagacaccaacctgaacttccagatcctgtacgagatcctgctgggcaaggccaccctgtacgccgtgctggtgtctgccctggtgctgatggctatggtcaagcggaaggacagccgggga

SEQ ID NO: 5346 - DNA, 2289 bp, synthetic construct
  source 1..2289: mol_type = other DNA
atggccttaccagtgaccgccttgctcctgccgctggccttgctgctccacgccgccaggccggaagtgcagctggttgaatctggcggaggactggttcagcctggcggatctctgagactgtcttgtgccgccagcggcttcagcttcagcgacttttggatgagctgggtccgacaggcccctggcaaaggacttgaatgggtcgccacaatcagccaggccggcagcgagaaggactacgtggactctgtgaagggcagattcaccatcagccgggacaacgccaagaagtccctgtacctccagatgaacagcctgagagccgaggacaccgccgtgtactattgtgcctctggcgtgtacagcttcgactacagaggccagggcaccctggtcacagtctcttctggtaccggcggaggcggatctggcggcggaggtagcggtggcggaggatctgaattcgacgagctgcagatgacccagagccctagcagcctgtctgccagcgtgggcgacagagtgaccatcacctgtagagccagccagagcatcagcagctacctgaactggtatcagcagaagcccggccagccccccaaactgctgatctactgggccagcaccagagaaagcggcgtgcccgatagattcagcggcagcgagagcggcaccaactacaccctgaccatcagctccctgcagcccgaggacttcgccacctacttttgccagcagagcgacagcctgcccatcacctttggacagggcacccggctggacattcagctcgaggacctgaagaacgtgttcccacctgaggtggccgtgttcgagcctagcgaggccgagatcagccacacccagaaagccaccctcgtgtgcctggctaccggcttctaccccgaccatgtggaactgtcttggtgggtcaacggcaaagaggtgcacagcggcgtgtgtaccgacccccagccactgaaagaacagcccgccctgaacgacagccggtactgcctgagcagcagactgagagtgtccgccaccttctggcagaacccccggaaccacttcagatgccaggtgcagttctacggcctgagcgagaacgacgagtggacccaggacagagccaagcccgtgacccagatcgtgtctgccgaagcctggggcagagccgattgcggctttaccagcgagagctaccagcagggcgtgctgagcgccaccaacctgagcgtgatcggcttcagaatcctgctgctgaaagtggccggctttaacctgctgatgaccctgcggctgtggtccagcagggccaagcgatctggatctggagcaacaaacttctcactactcaaacaagcaggtgacgtggaggagaatcccgggcctactagtatggactggatttggcgcatccttttccttgtcggcgctgctaccggcgcgcattccttcgaagaggtgcaactgctggaatctgggggcggagtggtgcagcctggcagaagcctgagactgagctgtgccgccagcggcttcaccttcagctcctacggaatgcactgggtgcgccaggcccctggcaaaggactggaatgggtggccgtgatctcctacgacggcagcaacaagtactacgccgacagcgtgaagggccggttcaccatcagccgggacaacagcaagaacaccctgtacctgcagatgaacagcctgcgggccgaggacaccgccgtgtactactgcgccaaggatatgggctggggcagcggctggcggccttactactactacggcatggacgtgtggggccagggcaccaccgtgacagtgtcatctacgcgtatccagaaccctgatcctgccgtgtaccagctgcgggatagcaagagcagcgacaagagcgtgtgtctgttcaccgacttcgacagccagaccaacgtgtcccagagcaaggactccgacgtgtacatcaccgataagtgcgtgctggacatgcggagcatggacttcaagagcaactccgccgtggcctggtccaacaagtccgatttcgcctgcgccaacgccttcaacaacagcattatccccgaggacacattcttcccaagccccgagagcagctgcgacgtgaagctggtggaaaagagcttcgagacagacaccaacctgaacttccagatcctgtacgagatcctgctgggcaaggccaccctgtacgccgtgctggtgtctgccctggtgctgatggctatggtcaagcggaaggacagccgggga

SEQ ID NO: 5347 - DNA, 2280 bp, synthetic construct
  source 1..2280: mol_type = other DNA
atggccttaccagtgaccgccttgctcctgccgctggccttgctgctccacgccgccaggccggaagtgcagctggttgaatctggcggaggactggttcagcctggcggatctctgagactgtcttgtgccgccagcggcttcagcttcagcgacttttggatgagctgggtccgacaggcccctggcaaaggacttgaatgggtcgccacaatcagccaggccggcagcgagaaggactacgtggactctgtgaagggcagattcaccatcagccgggacaacgccaagaagtccctgtacctccagatgaacagcctgagagccgaggacaccgccgtgtactattgtgcctctggcgtgtacagcttcgactacagaggccagggcaccctggtcacagtctcttctggtaccggcggaggcggatctggcggcggaggtagcggtggcggaggatctgaattcgacgacatccaaatgacacagagtccttctagtttgagtgcgagcgtgggggacagggtgaccattacctgcagggccagccagagcataagctcataccttaattggtaccagcaaaaaccaggtaaggcccctaagctcctgatctacgcggcctcttcacttcaatctggggtcccttcccgcttcagtggctccggcagcggcaccgacttcacgctcactatatcaagtctgcagcctgaggatctcgccacctattactgtcaacaaagttattccacccctttcacctttggaccgggcacgaaagtggatattaagctcgaggacctgaagaacgtgttcccacctgaggtggccgtgttcgagcctagcgaggccgagatcagccacacccagaaagccaccctcgtgtgcctggctaccggcttctaccccgaccatgtggaactgtcttggtgggtcaacggcaaagaggtgcacagcggcgtgtgtaccgacccccagccactgaaagaacagcccgccctgaacgacagccggtactgcctgagcagcagactgagagtgtccgccaccttctggcagaacccccggaaccacttcagatgccaggtgcagttctacggcctgagcgagaacgacgagtggacccaggacagagccaagcccgtgacccagatcgtgtctgccgaagcctggggcagagccgattgcggctttaccagcgagagctaccagcagggcgtgctgagcgccaccaacctgagcgtgatcggcttcagaatcctgctgctgaaagtggccggctttaacctgctgatgaccctgcggctgtggtccagcagggccaagcgatctggatctggagcaacaaacttctcactactcaaacaagcaggtgacgtggaggagaatcccgggcctactagtatggactggatttggcgcatccttttccttgtcggcgctgctaccggcgcgcattccttcgaagtgcacgaggtccagcttgtgcagtccggggcagaggtcaagaagcctggttctagcgtaaaagtgagttgcaaagcctcaggtgggacattttcatcctacgcgatcagttgggttagacaggctcctggtcaagggctggaatggatgggcggaattattccaatcttcggaacagcgaattacgcgcagaagttccagggtagagtaaccatcactgctgacaagtccacctccaccgcatacatggaattgtctagtctccggagcgaggatacggcggtgtattattgtgctacgttcgccctgtttggcttccgcgaacaggctttcgacatctgggggcagggcacgacagtcacggttagtagtacgcgtatccagaaccctgatcctgccgtgtaccagctgcgggatagcaagagcagcgacaagagcgtgtgtctgttcaccgacttcgacagccagaccaacgtgtcccagagcaaggactccgacgtgtacatcaccgataagtgcgtgctggacatgcggagcatggacttcaagagcaactccgccgtggcctggtccaacaagtccgatttcgcctgcgccaacgccttcaacaacagcattatccccgaggacacattcttcccaagccccgagagcagctgcgacgtgaagctggtggaaaagagcttcgagacagacaccaacctgaacttccagatcctgtacgagatcctgctgggcaaggccaccctgtacgccgtgctggtgtctgccctggtgctgatggctatggtcaagcggaaggacagccgggga

SEQ ID NO: 5348 - DNA, 2274 bp, synthetic construct
  source 1..2274: mol_type = other DNA
atggccttaccagtgaccgccttgctcctgccgctggccttgctgctccacgccgccaggccggaagtgcagctggttgaatctggcggaggactggttcagcctggcggatctctgagactgtcttgtgccgccagcggcttcagcttcagcgacttttggatgagctgggtccgacaggcccctggcaaaggacttgaatgggtcgccacaatcagccaggccggcagcgagaaggactacgtggactctgtgaagggcagattcaccatcagccgggacaacgccaagaagtccctgtacctccagatgaacagcctgagagccgaggacaccgccgtgtactattgtgcctctggcgtgtacagcttcgactacagaggccagggcaccctggtcacagtctcttctggtaccggcggaggcggatctggcggcggaggtagcggtggcggaggatctgaattcgacatcgtgctgacccagagccctctgagcctggccgtgtctctgggacagcctgccatcatcagctgcaaggccagccagagcgtgtcctttgccggcacctctctgatgcactggtatcaccagaagcccggccagcagcccagactgctgatctacagagccagcaacctggaagccggcgtgcccgatagattttccggcagcggcagcaagaccgacttcaccctgaccatcagccccgtggaagccgaagatgccgccacctactactgccagcagagcagagagtacccctacaccttcggcggaggcaccaagctggaaatcaagaggctcgaggacctgaagaacgtgttcccacctgaggtggccgtgttcgagcctagcgaggccgagatcagccacacccagaaagccaccctcgtgtgcctggctaccggcttctaccccgaccatgtggaactgtcttggtgggtcaacggcaaagaggtgcacagcggcgtgtgtaccgacccccagccactgaaagaacagcccgccctgaacgacagccggtactgcctgagcagcagactgagagtgtccgccaccttctggcagaacccccggaaccacttcagatgccaggtgcagttctacggcctgagcgagaacgacgagtggacccaggacagagccaagcccgtgacccagatcgtgtctgccgaagcctggggcagagccgattgcggctttaccagcgagagctaccagcagggcgtgctgagcgccaccaacctgagcgtgatcggcttcagaatcctgctgctgaaagtggccggctttaacctgctgatgaccctgcggctgtggtccagcagggccaagcgatctggatctggagcaacaaacttctcactactcaaacaagcaggtgacgtggaggagaatcccgggcctactagtatggactggatttggcgcatccttttccttgtcggcgctgctaccggcgcgcattccttcgaacaggtccaactggtgcagagcggagccgaggtcgtgaagcctggcgcttccgtgaagattagctgcaaagccagcggctacacctttaccggctactttatgaactgggtcaagcagagccctggccagagcctggaatggatcggcagaatccacccctacgacggcgacaccttctacaaccagaagttccagggcaaggccaccctgacagtggacaagagcagcaacaccgcccacatggaactgctgagcctgaccagcgaggacttcgccgtgtactactgcaccagatacgacggcagccgggctatggactattggggccagggcaccaccgtgaccgtgtctagtacgcgtatccagaaccctgatcctgccgtgtaccagctgcgggatagcaagagcagcgacaagagcgtgtgtctgttcaccgacttcgacagccagaccaacgtgtcccagagcaaggactccgacgtgtacatcaccgataagtgcgtgctggacatgcggagcatggacttcaagagcaactccgccgtggcctggtccaacaagtccgatttcgcctgcgccaacgccttcaacaacagcattatccccgaggacacattcttcccaagccccgagagcagctgcgacgtgaagctggtggaaaagagcttcgagacagacaccaacctgaacttccagatcctgtacgagatcctgctgggcaaggccaccctgtacgccgtgctggtgtctgccctggtgctgatggctatggtcaagcggaaggacagccgggga

SEQ ID NO: 5349 - DNA, 2265 bp, synthetic construct
  source 1..2265: mol_type = other DNA
atggccttaccagtgaccgccttgctcctgccgctggccttgctgctccacgccgccaggccggaagtgcagctggttgaatctggcggaggactggttcagcctggcggatctctgagactgtcttgtgccgccagcggcttcagcttcagcgacttttggatgagctgggtccgacaggcccctggcaaaggacttgaatgggtcgccacaatcagccaggccggcagcgagaaggactacgtggactctgtgaagggcagattcaccatcagccgggacaacgccaagaagtccctgtacctccagatgaacagcctgagagccgaggacaccgccgtgtactattgtgcctctggcgtgtacagcttcgactacagaggccagggcaccctggtcacagtctcttctggtaccggcggaggcggatctggcggcggaggtagcggtggcggaggatctgaattcgacgacgttgtgatgacccagacccccctgagcctgcctgtgacacctggcgaacctgccagcatcagctgtcggagcagccagagcctggtgcacagaaacggcaacacctacctgcactggtatctccagaagcccggccagagccccaagctgctgatccacaaggtgtccaacagattcagcggcgtgcccgacagattctccggcagcggctctggcaccgacttcaccctgaagatcagccgggtggaagccgaggacctgggcgtgtacttctgtagccagagcacccatgtgccccccctgacatttggagccggcaccaagctggaactgaagctcgaggacctgaagaacgtgttcccacctgaggtggccgtgttcgagcctagcgaggccgagatcagccacacccagaaagccaccctcgtgtgcctggctaccggcttctaccccgaccatgtggaactgtcttggtgggtcaacggcaaagaggtgcacagcggcgtgtgtaccgacccccagccactgaaagaacagcccgccctgaacgacagccggtactgcctgagcagcagactgagagtgtccgccaccttctggcagaacccccggaaccacttcagatgccaggtgcagttctacggcctgagcgagaacgacgagtggacccaggacagagccaagcccgtgacccagatcgtgtctgccgaagcctggggcagagccgattgcggctttaccagcgagagctaccagcagggcgtgctgagcgccaccaacctgagcgtgatcggcttcagaatcctgctgctgaaagtggccggctttaacctgctgatgaccctgcggctgtggtccagcagggccaagcgatctggatctggagcaacaaacttctcactactcaaacaagcaggtgacgtggaggagaatcccgggcctactagtatggactggatttggcgcatccttttccttgtcggcgctgctaccggcgcgcattccttcgaagaagtgcagctggtgcagtctggcgctgaggtggaaaagcctggggccagcgtgaagattagctgcaaggccagcggcagcagcttcaccggctacaacatgaactgggtgcgccagaacatcggcaagagcctggaatggatcggagccatcgacccctactacggcggcaccagctacaaccagaagttcaagggcagagccaccctgaccgtggacaagagcaccagcaccgcctacatgcacctgaagtccctgcggagcgaggacaccgccgtgtactactgtgtgtccggcatggaatattggggccagggcaccagcgtgaccgtgtctagtacgcgtatccagaaccctgatcctgccgtgtaccagctgcgggatagcaagagcagcgacaagagcgtgtgtctgttcaccgacttcgacagccagaccaacgtgtcccagagcaaggactccgacgtgtacatcaccgataagtgcgtgctggacatgcggagcatggacttcaagagcaactccgccgtggcctggtccaacaagtccgatttcgcctgcgccaacgccttcaacaacagcattatccccgaggacacattcttcccaagccccgagagcagctgcgacgtgaagctggtggaaaagagcttcgagacagacaccaacctgaacttccagatcctgtacgagatcctgctgggcaaggccaccctgtacgccgtgctggtgtctgccctggtgctgatggctatggtcaagcggaaggacagccgggga

SEQ ID NO: 5350 - DNA, 2259 bp, synthetic construct
  source 1..2259: mol_type = other DNA
atggccttaccagtgaccgccttgctcctgccgctggccttgctgctccacgccgccaggccggaagtgcagctggttgaatctggcggaggactggttcagcctggcggatctctgagactgtcttgtgccgccagcggcttcagcttcagcgacttttggatgagctgggtccgacaggcccctggcaaaggacttgaatgggtcgccacaatcagccaggccggcagcgagaaggactacgtggactctgtgaagggcagattcaccatcagccgggacaacgccaagaagtccctgtacctccagatgaacagcctgagagccgaggacaccgccgtgtactattgtgcctctggcgtgtacagcttcgactacagaggccagggcaccctggtcacagtctcttctggtaccggcggaggcggatctggcggcggaggtagcggtggcggaggatctgaattcgacgagatcgtgatgacccagacccctgccaccctgtctgtgtctgccggcgagagagtgaccattacctgcaaggccagccagagcgtgtccaacgacgtgacctggtatcagcagaagcccggccaggcccccagactgctgatctacagcgccagcaacagatacagcggcgtgcccgccagattttccggcagcggctacggcaccgagttcaccttcaccatcagcagcgtgcagagcgaggacttcgccgtgtacttctgtcagcaagactacagcagcttcggccagggcaccaagctggaaatcaagaggctcgaggacctgaagaacgtgttcccacctgaggtggccgtgttcgagcctagcgaggccgagatcagccacacccagaaagccaccctcgtgtgcctggctaccggcttctaccccgaccatgtggaactgtcttggtgggtcaacggcaaagaggtgcacagcggcgtgtgtaccgacccccagccactgaaagaacagcccgccctgaacgacagccggtactgcctgagcagcagactgagagtgtccgccaccttctggcagaacccccggaaccacttcagatgccaggtgcagttctacggcctgagcgagaacgacgagtggacccaggacagagccaagcccgtgacccagatcgtgtctgccgaagcctggggcagagccgattgcggctttaccagcgagagctaccagcagggcgtgctgagcgccaccaacctgagcgtgatcggcttcagaatcctgctgctgaaagtggccggctttaacctgctgatgaccctgcggctgtggtccagcagggccaagcgatctggatctggagcaacaaacttctcactactcaaacaagcaggtgacgtggaggagaatcccgggcctactagtatggactggatttggcgcatccttttccttgtcggcgctgctaccggcgcgcattccttcgaacaggtgcagctggtggaatctggacctggcgtggtgcagcctggcagaagcctgagaatcagctgtgccgtgtccggcttcagcgtgaccaactacggcgtgcactgggtgcgccagccacctggaaaaggactggaatggctgggcgtgatctgggctggcggcatcaccaactacaacagcgccttcatgtcccggctgaccatctccaaggacaacagcaagaacaccgtgtacctccagatgaacagcctgcgggccgaggacaccgccatgtactactgtgcttccagaggcggccactacggctacgccctggattattggggccagggaaccctcgtgaccgtgtcctctacgcgtatccagaaccctgatcctgccgtgtaccagctgcgggatagcaagagcagcgacaagagcgtgtgtctgttcaccgacttcgacagccagaccaacgtgtcccagagcaaggactccgacgtgtacatcaccgataagtgcgtgctggacatgcggagcatggacttcaagagcaactccgccgtggcctggtccaacaagtccgatttcgcctgcgccaacgccttcaacaacagcattatccccgaggacacattcttcccaagccccgagagcagctgcgacgtgaagctggtggaaaagagcttcgagacagacaccaacctgaacttccagatcctgtacgagatcctgctgggcaaggccaccctgtacgccgtgctggtgtctgccctggtgctgatggctatggtcaagcggaaggacagccgggga

SEQ ID NO: 5351 - DNA, 2265 bp, synthetic construct
  source 1..2265: mol_type = other DNA
atggccttaccagtgaccgccttgctcctgccgctggccttgctgctccacgccgccaggccggaagtgcagctggttgaatctggcggaggactggttcagcctggcggatctctgagactgtcttgtgccgccagcggcttcagcttcagcgacttttggatgagctgggtccgacaggcccctggcaaaggacttgaatgggtcgccacaatcagccaggccggcagcgagaaggactacgtggactctgtgaagggcagattcaccatcagccgggacaacgccaagaagtccctgtacctccagatgaacagcctgagagccgaggacaccgccgtgtactattgtgcctctggcgtgtacagcttcgactacagaggccagggcaccctggtcacagtctcttctggtaccggcggaggcggatctggcggcggaggtagcggtggcggaggatctgaattcgacatccagatgacccagaccgccagcagcctgcctgcctctctgggcgacagagtgaccatctcctgtagcgccagccaggacatcagcaactacctgaactggtatcagcagaaacccgacggcaccgtgaagctgctgatcttctacagcagcaacctgcacagcggcgtgcccagcagattttctggcggcggaagcggcaccgactacagcctgaccatcagcaatctggaacccgaggacattgccacctacttttgccaccagtacagcaagctgccctggacctttggcggaggcaccaagctggaaatcaagagactcgaggacctgaagaacgtgttcccacctgaggtggccgtgttcgagcctagcgaggccgagatcagccacacccagaaagccaccctcgtgtgcctggctaccggcttctaccccgaccatgtggaactgtcttggtgggtcaacggcaaagaggtgcacagcggcgtgtgtaccgacccccagccactgaaagaacagcccgccctgaacgacagccggtactgcctgagcagcagactgagagtgtccgccaccttctggcagaacccccggaaccacttcagatgccaggtgcagttctacggcctgagcgagaacgacgagtggacccaggacagagccaagcccgtgacccagatcgtgtctgccgaagcctggggcagagccgattgcggctttaccagcgagagctaccagcagggcgtgctgagcgccaccaacctgagcgtgatcggcttcagaatcctgctgctgaaagtggccggctttaacctgctgatgaccctgcggctgtggtccagcagggccaagcgatctggatctggagcaacaaacttctcactactcaaacaagcaggtgacgtggaggagaatcccgggcctactagtatggactggatttggcgcatccttttccttgtcggcgctgctaccggcgcgcattccttcgaagaagtgaccctggtggaaagcggcggagacttcgtgaagcctggcggctctctgaaggtgtcctgtgccgccagcggcttcgcctttagccactacgccatgagctgggtgcgccagacccctgccaagagactggaatgggtggcctacatcagcagcggcggctccggcacctactactccgatagcgtgaagggccggttcaccatcagccgggacaacgccaagaacaccctgtacctccagatgcggagcctgcggagcgaggacagcgccatgtatttctgcaccagagtgaagctgggcacctattacttcgactcttggggccagggcaccaccctgaccgtgtcatctacgcgtatccagaaccctgatcctgccgtgtaccagctgcgggatagcaagagcagcgacaagagcgtgtgtctgttcaccgacttcgacagccagaccaacgtgtcccagagcaaggactccgacgtgtacatcaccgataagtgcgtgctggacatgcggagcatggacttcaagagcaactccgccgtggcctggtccaacaagtccgatttcgcctgcgccaacgccttcaacaacagcattatccccgaggacacattcttcccaagccccgagagcagctgcgacgtgaagctggtggaaaagagcttcgagacagacaccaacctgaacttccagatcctgtacgagatcctgctgggcaaggccaccctgtacgccgtgctggtgtctgccctggtgctgatggctatggtcaagcggaaggacagccgggga

SEQ ID NO: 5352 - DNA, 2271 bp, synthetic construct
  source 1..2271: mol_type = other DNA
atggccttaccagtgaccgccttgctcctgccgctggccttgctgctccacgccgccaggccggaagtgcagctggttgaatctggcggaggactggttcagcctggcggatctctgagactgtcttgtgccgccagcggcttcagcttcagcgacttttggatgagctgggtccgacaggcccctggcaaaggacttgaatgggtcgccacaatcagccaggccggcagcgagaaggactacgtggactctgtgaagggcagattcaccatcagccgggacaacgccaagaagtccctgtacctccagatgaacagcctgagagccgaggacaccgccgtgtactattgtgcctctggcgtgtacagcttcgactacagaggccagggcaccctggtcacagtctcttctggtaccggcggaggcggatctggcggcggaggtagcggtggcggaggatctgaattccagttcgtgctgacccagagcccttctgcctctgctgccctgggagcctctgccaagctgacctgtacactgagcagcgcccacaagacctacaccatcgactggtatcagcagcagaagggaaaggcccccagatacctgatccaagtgaagtccgacggcacctacacaaaggccaccggcgtgcccgatagattcagcggcagtagcagcggagccgatagatacctgattatccccagcgtgcaggccgacgacgaggccgattactactgcggcaccgattacaccggcggctacgtgttcggcggaggcacacaactgaccgtgacactcgaggacctgaagaacgtgttcccacctgaggtggccgtgttcgagcctagcgaggccgagatcagccacacccagaaagccaccctcgtgtgcctggctaccggcttctaccccgaccatgtggaactgtcttggtgggtcaacggcaaagaggtgcacagcggcgtgtgtaccgacccccagccactgaaagaacagcccgccctgaacgacagccggtactgcctgagcagcagactgagagtgtccgccaccttctggcagaacccccggaaccacttcagatgccaggtgcagttctacggcctgagcgagaacgacgagtggacccaggacagagccaagcccgtgacccagatcgtgtctgccgaagcctggggcagagccgattgcggctttaccagcgagagctaccagcagggcgtgctgagcgccaccaacctgagcgtgatcggcttcagaatcctgctgctgaaagtggccggctttaacctgctgatgaccctgcggctgtggtccagcagggccaagcgatctggatctggagcaacaaacttctcactactcaaacaagcaggtgacgtggaggagaatcccgggcctactagtatggactggatttggcgcatccttttccttgtcggcgctgctaccggcgcgcattccttcgaagagcaactgaaagagtctggcggcggactgttcaagcccaccgataccctgaccctgacctgcaccgtgtccggcttcagcctgagctactacggcgtgaactgggtgcgccaggcccctggcaatggcctggaatggatcggcacaatcggcggcagcggcgacacctactatgcctcttgggccaagtccagaagcaccatcatcagaaacaccaacgagaacaccgtgaccctgaagatgaccagcctgacagccgccgacaccgccacctacttttgcgtcagatacgccaacatcggctacgagtatttcaacgtgtggggacccggcaccctcgtgaccgtgtcatctacgcgtatccagaaccctgatcctgccgtgtaccagctgcgggatagcaagagcagcgacaagagcgtgtgtctgttcaccgacttcgacagccagaccaacgtgtcccagagcaaggactccgacgtgtacatcaccgataagtgcgtgctggacatgcggagcatggacttcaagagcaactccgccgtggcctggtccaacaagtccgatttcgcctgcgccaacgccttcaacaacagcattatccccgaggacacattcttcccaagccccgagagcagctgcgacgtgaagctggtggaaaagagcttcgagacagacaccaacctgaacttccagatcctgtacgagatcctgctgggcaaggccaccctgtacgccgtgctggtgtctgccctggtgctgatggctatggtcaagcggaaggacagccgggga

SEQ ID NO: 5353 - DNA, 2286 bp, synthetic construct
  source 1..2286: mol_type = other DNA
atggccttaccagtgaccgccttgctcctgccgctggccttgctgctccacgccgccaggccggaagtgcagctggttgaatctggcggaggactggttcagcctggcggatctctgagactgtcttgtgccgccagcggcttcagcttcagcgacttttggatgagctgggtccgacaggcccctggcaaaggacttgaatgggtcgccacaatcagccaggccggcagcgagaaggactacgtggactctgtgaagggcagattcaccatcagccgggacaacgccaagaagtccctgtacctccagatgaacagcctgagagccgaggacaccgccgtgtactattgtgcctctggcgtgtacagcttcgactacagaggccagggcaccctggtcacagtctcttctggtaccggcggaggcggatctggcggcggaggtagcggtggcggaggatctgaattccagttcgtgctgacccagagcccttctgtgtctgccgccctgggagcctctgccaagctgacctgtacactgagcagcgcccacaagacctacaccatcgactggtatcagcagcagcagggcgaggcccccagatacctgatgcaagtgaagtccgacggcagctacaccaagggcaccggcgtgcccgatagattcagcggcagtagcagcggagccgatagatacctgattatccccagcgtgcaggccgacgacgaggccggatatgtgtgcggcgctgacgacaatggcggctacgtgttcggcggaggcacccaactgacagtgacactcgaggacctgaagaacgtgttcccacctgaggtggccgtgttcgagcctagcgaggccgagatcagccacacccagaaagccaccctcgtgtgcctggctaccggcttctaccccgaccatgtggaactgtcttggtgggtcaacggcaaagaggtgcacagcggcgtgtgtaccgacccccagccactgaaagaacagcccgccctgaacgacagccggtactgcctgagcagcagactgagagtgtccgccaccttctggcagaacccccggaaccacttcagatgccaggtgcagttctacggcctgagcgagaacgacgagtggacccaggacagagccaagcccgtgacccagatcgtgtctgccgaagcctggggcagagccgattgcggctttaccagcgagagctaccagcagggcgtgctgagcgccaccaacctgagcgtgatcggcttcagaatcctgctgctgaaagtggccggctttaacctgctgatgaccctgcggctgtggtccagcagggccaagcgatctggatctggagcaacaaacttctcactactcaaacaagcaggtgacgtggaggagaatcccgggcctactagtatggactggatttggcgcatccttttccttgtcggcgctgctaccggcgcgcattccttcgaacagagcgtgaaagagtctgagggcggcctgttcaagcccaccgataccctgaccctgacctgcaccgtgtccggcttcagcctgagcagacacgccctgacatgggtgcgccaggcccctggaaatggcctggaatggatcggagccatcgacaacgccggcaccacctactatgcctcttgggccaagtccagaagcaccatcacccggaacaccgacctgcacaccgtgaccctgaagatgaccagcctgaccgccagcgacaccgccacctacttttgcgccagagtgttctacgacatcaacagcggctactacctggacggcatggacctgtggggacctggcacacttgtgaccgtgtccagcacgcgtatccagaaccctgatcctgccgtgtaccagctgcgggatagcaagagcagcgacaagagcgtgtgtctgttcaccgacttcgacagccagaccaacgtgtcccagagcaaggactccgacgtgtacatcaccgataagtgcgtgctggacatgcggagcatggacttcaagagcaactccgccgtggcctggtccaacaagtccgatttcgcctgcgccaacgccttcaacaacagcattatccccgaggacacattcttcccaagccccgagagcagctgcgacgtgaagctggtggaaaagagcttcgagacagacaccaacctgaacttccagatcctgtacgagatcctgctgggcaaggccaccctgtacgccgtgctggtgtctgccctggtgctgatggctatggtcaagcggaaggacagccgggga

SEQ ID NO: 5354 - DNA, 2268 bp, synthetic construct
  source 1..2268: mol_type = other DNA
atggccttaccagtgaccgccttgctcctgccgctggccttgctgctccacgccgccaggccggaagtgcagctggttgaatctggcggaggactggttcagcctggcggatctctgagactgtcttgtgccgccagcggcttcagcttcagcgacttttggatgagctgggtccgacaggcccctggcaaaggacttgaatgggtcgccacaatcagccaggccggcagcgagaaggactacgtggactctgtgaagggcagattcaccatcagccgggacaacgccaagaagtccctgtacctccagatgaacagcctgagagccgaggacaccgccgtgtactattgtgcctctggcgtgtacagcttcgactacagaggccagggcaccctggtcacagtctcttctggtaccggcggaggcggatctggcggcggaggtagcggtggcggaggatctgaattcgacatccagatgacccagagccccagcagcctgtctgccagcgtgggcgacagagtgaccatcacctgtagagccagccagggcatcagctcttggctggcctggtatcagcagaagcccgagaaggcccccaagagcctgatctacgccgcctctagtctccagagcggcgtgcccagcagattttctggcagcggctccggcaccgacttcaccctgacaatcagctccctccagcccgaggacttcgccacctactactgccagcagtacaacagctacccccccacctttggcggaggcaccaaggtggaaatcaagctcgaggacctgaagaacgtgttcccacctgaggtggccgtgttcgagcctagcgaggccgagatcagccacacccagaaagccaccctcgtgtgcctggctaccggcttctaccccgaccatgtggaactgtcttggtgggtcaacggcaaagaggtgcacagcggcgtgtgtaccgacccccagccactgaaagaacagcccgccctgaacgacagccggtactgcctgagcagcagactgagagtgtccgccaccttctggcagaacccccggaaccacttcagatgccaggtgcagttctacggcctgagcgagaacgacgagtggacccaggacagagccaagcccgtgacccagatcgtgtctgccgaagcctggggcagagccgattgcggctttaccagcgagagctaccagcagggcgtgctgagcgccaccaacctgagcgtgatcggcttcagaatcctgctgctgaaagtggccggctttaacctgctgatgaccctgcggctgtggtccagcagggccaagcgatctggatctggagcaacaaacttctcactactcaaacaagcaggtgacgtggaggagaatcccgggcctactagtatggactggatttggcgcatccttttccttgtcggcgctgctaccggcgcgcattccttcgaagaagtgcaactggtggaatcaggcggcggactggtgcagcctggcgagtctctgagactgagctgtgtggcctccggcttcaccttcagccggtacaagatgaactgggtgcgccaggcccctggcaagggactggaatgggtgtcctacatcagccgcagcggcagagacatctactacgccgacagcgtgaagggccggttcaccatcagcagagacaacgccaagaacagcctgtacctccagatgaactccctgcgggacgaggacaccgccgtgtactactgtgccggaaccgtgaccacctattactacttcggcatggacgtgtggggccacggcaccaccgtgacagtgtcatctacgcgtatccagaaccctgatcctgccgtgtaccagctgcgggatagcaagagcagcgacaagagcgtgtgtctgttcaccgacttcgacagccagaccaacgtgtcccagagcaaggactccgacgtgtacatcaccgataagtgcgtgctggacatgcggagcatggacttcaagagcaactccgccgtggcctggtccaacaagtccgatttcgcctgcgccaacgccttcaacaacagcattatccccgaggacacattcttcccaagccccgagagcagctgcgacgtgaagctggtggaaaagagcttcgagacagacaccaacctgaacttccagatcctgtacgagatcctgctgggcaaggccaccctgtacgccgtgctggtgtctgccctggtgctgatggctatggtcaagcggaaggacagccgggga

SEQ ID NO: 5355 - DNA, 2271 bp, synthetic construct
  source 1..2271: mol_type = other DNA
atggccttaccagtgaccgccttgctcctgccgctggccttgctgctccacgccgccaggccggaagtgcagctggttgaatctggcggaggactggttcagcctggcggatctctgagactgtcttgtgccgccagcggcttcagcttcagcgacttttggatgagctgggtccgacaggcccctggcaaaggacttgaatgggtcgccacaatcagccaggccggcagcgagaaggactacgtggactctgtgaagggcagattcaccatcagccgggacaacgccaagaagtccctgtacctccagatgaacagcctgagagccgaggacaccgccgtgtactattgtgcctctggcgtgtacagcttcgactacagaggccagggcaccctggtcacagtctcttctggtaccggcggaggcggatctggcggcggaggtagcggtggcggaggatctgaattcgacatccagatgacccagagccccagcagcctgtctgccagcgtgggcgacagagtgaccatcacctgtagagccagccagggcatcagctcttggctggcctggtatcagcagaagcccgagaaggcccccaagagcctgatctacgccgcctctagtctccagagcggcgtgcccagcagattttctggcagcggctccggcaccgacttcaccctgacaatcagctccctccagcccgaggacttcgccacctactactgccagcagtacaacagctaccctcccacctttggcggaggcaccaaggtggaaatcaagctcgaggacctgaagaacgtgttcccacctgaggtggccgtgttcgagcctagcgaggccgagatcagccacacccagaaagccaccctcgtgtgcctggctaccggcttctaccccgaccatgtggaactgtcttggtgggtcaacggcaaagaggtgcacagcggcgtgtgtaccgacccccagccactgaaagaacagcccgccctgaacgacagccggtactgcctgagcagcagactgagagtgtccgccaccttctggcagaacccccggaaccacttcagatgccaggtgcagttctacggcctgagcgagaacgacgagtggacccaggacagagccaagcccgtgacccagatcgtgtctgccgaagcctggggcagagccgattgcggctttaccagcgagagctaccagcagggcgtgctgagcgccaccaacctgagcgtgatcggcttcagaatcctgctgctgaaagtggccggctttaacctgctgatgaccctgcggctgtggtccagcagggccaagcgatctggatctggagcaacaaacttctcactactcaaacaagcaggtgacgtggaggagaatcccgggcctactagtatggactggatttggcgcatccttttccttgtcggcgctgctaccggcgcgcattccttcgaagaagtgcaactggtggaatccgggggaggctctgtgcagcctggcgagtctctgagactgagctgtgtggcctccggcttcaccttcagccggtacaagatgaactgggtgcgccaggcccctggcaagggactggaatgggtgtcctacatcagccgcagcggcagagacatctactacgccgacagcgtgaagggccggttcaccatcagcagagacaacgccaagaacagcctgtacctccagatgaactccctgcgggacgaggacaccgccgtgtactactgtgccggaaccgtgaccacctattactacgacttcggcatggacgtgtggggccagggcacaaccgtgacagtgtctagcacgcgtatccagaaccctgatcctgccgtgtaccagctgcgggatagcaagagcagcgacaagagcgtgtgtctgttcaccgacttcgacagccagaccaacgtgtcccagagcaaggactccgacgtgtacatcaccgataagtgcgtgctggacatgcggagcatggacttcaagagcaactccgccgtggcctggtccaacaagtccgatttcgcctgcgccaacgccttcaacaacagcattatccccgaggacacattcttcccaagccccgagagcagctgcgacgtgaagctggtggaaaagagcttcgagacagacaccaacctgaacttccagatcctgtacgagatcctgctgggcaaggccaccctgtacgccgtgctggtgtctgccctggtgctgatggctatggtcaagcggaaggacagccgggga

SEQ ID NO: 5356 - DNA, 2265 bp, synthetic construct
  source 1..2265: mol_type = other DNA
atggccttaccagtgaccgccttgctcctgccgctggccttgctgctccacgccgccaggccggaagtgcagctggttgaatctggcggaggactggttcagcctggcggatctctgagactgtcttgtgccgccagcggcttcagcttcagcgacttttggatgagctgggtccgacaggcccctggcaaaggacttgaatgggtcgccacaatcagccaggccggcagcgagaaggactacgtggactctgtgaagggcagattcaccatcagccgggacaacgccaagaagtccctgtacctccagatgaacagcctgagagccgaggacaccgccgtgtactattgtgcctctggcgtgtacagcttcgactacagaggccagggcaccctggtcacagtctcttctggtaccggcggaggcggatctggcggcggaggtagcggtggcggaggatctgaattccagtctgtgctgacacagcctccatctgcctctggcacacctggacagagagtgaccatcagctgtagcggcagcagaagcaacgtcggcggcaactacgtgttctggtatcagcaggtcccaggcgctacccctaagctgctgatctacagaagcaatcagcggcctagcggcgtgcccgatagatttgccggaagcaagagcggcagctctgccagccttgccatctctggactgagaagcgaggacgaggccgactactactgtgccacctgggatgatagcctgagcggcttcgtgtttggcaccggcaccaaagtgacagtgcttggtctcgaggacctgaagaacgtgttcccacctgaggtggccgtgttcgagcctagcgaggccgagatcagccacacccagaaagccaccctcgtgtgcctggctaccggcttctaccccgaccatgtggaactgtcttggtgggtcaacggcaaagaggtgcacagcggcgtgtgtaccgacccccagccactgaaagaacagcccgccctgaacgacagccggtactgcctgagcagcagactgagagtgtccgccaccttctggcagaacccccggaaccacttcagatgccaggtgcagttctacggcctgagcgagaacgacgagtggacccaggacagagccaagcccgtgacccagatcgtgtctgccgaagcctggggcagagccgattgcggctttaccagcgagagctaccagcagggcgtgctgagcgccaccaacctgagcgtgatcggcttcagaatcctgctgctgaaagtggccggctttaacctgctgatgaccctgcggctgtggtccagcagggccaagcgatctggatctggagcaacaaacttctcactactcaaacaagcaggtgacgtggaggagaatcccgggcctactagtatggactggatttggcgcatccttttccttgtcggcgctgctaccggcgcgcattccttcgaagttcagctggttgaatctggcggcggactggttaagcctggcggatctctgagactgtcttgtgccgccagcggcttcaccttcagcgattactacatgagctggatcagacaggcccctggcaaaggactggaatgggtgtcctacatcagcagcagcggctccaccatctactacgccgatagcgtgaagggcagattcaccatcagccgggacaacgccaagaacagcctgtacctccagatgaactccctgagagccgaggacaccgccgtgtactattgcgccagaggctacggcaaagcctacgatcaatggggccagggcacactggtcaccgtttcttctacgcgtatccagaaccctgatcctgccgtgtaccagctgcgggatagcaagagcagcgacaagagcgtgtgtctgttcaccgacttcgacagccagaccaacgtgtcccagagcaaggactccgacgtgtacatcaccgataagtgcgtgctggacatgcggagcatggacttcaagagcaactccgccgtggcctggtccaacaagtccgatttcgcctgcgccaacgccttcaacaacagcattatccccgaggacacattcttcccaagccccgagagcagctgcgacgtgaagctggtggaaaagagcttcgagacagacaccaacctgaacttccagatcctgtacgagatcctgctgggcaaggccaccctgtacgccgtgctggtgtctgccctggtgctgatggctatggtcaagcggaaggacagccgggga

SEQ ID NO: 5357 - DNA, 2262 bp, synthetic construct
  source 1..2262: mol_type = other DNA
atggccttaccagtgaccgccttgctcctgccgctggccttgctgctccacgccgccaggccggaagtgcagctggttgaatctggcggaggactggttcagcctggcggatctctgagactgtcttgtgccgccagcggcttcagcttcagcgacttttggatgagctgggtccgacaggcccctggcaaaggacttgaatgggtcgccacaatcagccaggccggcagcgagaaggactacgtggactctgtgaagggcagattcaccatcagccgggacaacgccaagaagtccctgtacctccagatgaacagcctgagagccgaggacaccgccgtgtactattgtgcctctggcgtgtacagcttcgactacagaggccagggcaccctggtcacagtctcttctggtaccggcggaggcggatctggcggcggaggtagcggtggcggaggatctgaattccagtctgtggtcacacagccacctagcatgtctgccgctccaggccagcaagtgaccatctcttgtagcggcggcaacagcaacatcgagcggaactacgtgtcctggtatctgcaactgcctggcacagcccctaagctggtcatcttcgacaacgacagacggcccagcggcatccccgatagattttctggcagcaagagcggcaccagcgccacactgggaattaccggacttcagacaggcgacgaggccgactactactgtggcacatgggactctagcctgagaggctgggttttcggcggaggcacaaagctgacagtgcttggtctcgaggacctgaagaacgtgttcccacctgaggtggccgtgttcgagcctagcgaggccgagatcagccacacccagaaagccaccctcgtgtgcctggctaccggcttctaccccgaccatgtggaactgtcttggtgggtcaacggcaaagaggtgcacagcggcgtgtgtaccgacccccagccactgaaagaacagcccgccctgaacgacagccggtactgcctgagcagcagactgagagtgtccgccaccttctggcagaacccccggaaccacttcagatgccaggtgcagttctacggcctgagcgagaacgacgagtggacccaggacagagccaagcccgtgacccagatcgtgtctgccgaagcctggggcagagccgattgcggctttaccagcgagagctaccagcagggcgtgctgagcgccaccaacctgagcgtgatcggcttcagaatcctgctgctgaaagtggccggctttaacctgctgatgaccctgcggctgtggtccagcagggccaagcgatctggatctggagcaacaaacttctcactactcaaacaagcaggtgacgtggaggagaatcccgggcctactagtatggactggatttggcgcatccttttccttgtcggcgctgctaccggcgcgcattccttcgaagtgcagctcgttgagtctggcggcggactgattcaacctggcggaagcctgagactgagctgtgccgcttccggcttcaccttcagcaactacgccatgaactgggttcgacaggcccctggcaaaggactggaatgggtgtccaccatcaacggcagaggcagcagcaccatctacgccgattctgtgaagggcagattcaccatcagccgggacaacagcaagaacaccctgtacctccagatgaactccctgagagccgaggacaccgccacctattactgtgcccggtacatcagcagaggactgggcgattcttggggccagggcacactggttacagtgacgcgtatccagaaccctgatcctgccgtgtaccagctgcgggatagcaagagcagcgacaagagcgtgtgtctgttcaccgacttcgacagccagaccaacgtgtcccagagcaaggactccgacgtgtacatcaccgataagtgcgtgctggacatgcggagcatggacttcaagagcaactccgccgtggcctggtccaacaagtccgatttcgcctgcgccaacgccttcaacaacagcattatccccgaggacacattcttcccaagccccgagagcagctgcgacgtgaagctggtggaaaagagcttcgagacagacaccaacctgaacttccagatcctgtacgagatcctgctgggcaaggccaccctgtacgccgtgctggtgtctgccctggtgctgatggctatggtcaagcggaaggacagccgggga

SEQ ID NO: 5358 - DNA, 2265 bp, synthetic construct
  source 1..2265: mol_type = other DNA
atggccttaccagtgaccgccttgctcctgccgctggccttgctgctccacgccgccaggccggaagtgcagctggttgaatctggcggaggactggttcagcctggcggatctctgagactgtcttgtgccgccagcggcttcagcttcagcgacttttggatgagctgggtccgacaggcccctggcaaaggacttgaatgggtcgccacaatcagccaggccggcagcgagaaggactacgtggactctgtgaagggcagattcaccatcagccgggacaacgccaagaagtccctgtacctccagatgaacagcctgagagccgaggacaccgccgtgtactattgtgcctctggcgtgtacagcttcgactacagaggccagggcaccctggtcacagtctcttctggtaccggcggaggcggatctggcggcggaggtagcggtggcggaggatctgaattcgacgtcgtgatgacccagacccctctgagcctgcctgtgtccctgggcgatcaggccagcatcagctgtagaagcagccagagcctggtgcacagcaacggcaacacctacctgcactggtatctccagaagcccggccagagccccaagctgctgatctacaaggtgtccaacagattcagcggcgtgcccgacagattctccggcagcggctctggcaccgacttcaccctgaagatcagccgggtggaagccgaggacctgggcgtgtacttctgtagccagaacacccccgtgccccccaagtttggcagcggcaccaagctggaaatcaagctcgaggacctgaagaacgtgttcccacctgaggtggccgtgttcgagcctagcgaggccgagatcagccacacccagaaagccaccctcgtgtgcctggctaccggcttctaccccgaccatgtggaactgtcttggtgggtcaacggcaaagaggtgcacagcggcgtgtgtaccgacccccagccactgaaagaacagcccgccctgaacgacagccggtactgcctgagcagcagactgagagtgtccgccaccttctggcagaacccccggaaccacttcagatgccaggtgcagttctacggcctgagcgagaacgacgagtggacccaggacagagccaagcccgtgacccagatcgtgtctgccgaagcctggggcagagccgattgcggctttaccagcgagagctaccagcagggcgtgctgagcgccaccaacctgagcgtgatcggcttcagaatcctgctgctgaaagtggccggctttaacctgctgatgaccctgcggctgtggtccagcagggccaagcgatctggatctggagcaacaaacttctcactactcaaacaagcaggtgacgtggaggagaatcccgggcctactagtatggactggatttggcgcatccttttccttgtcggcgctgctaccggcgcgcattccttcgaacaggtgcagctccagcagtctggcgctgaactcgtgcggcctggcgcttctgtgaagctgtcttgcaaggccagcggctacaccttcaacgactacgagatgcactgggtcaagcagacccctgtgcacggcctgaagtggatcggagccctggaacccaagaccggcgataccgcctacagccagaagttcaagggcaaggccaccctgaccgccgacaagagcagcagcacagcctacatggaactgcggagcctgaccagcgaggacagcgccgtgtactactgcaccagctgctactactacacctacagcggccagggcaccctcgtgacagtgtctgctacgcgtatccagaaccctgatcctgccgtgtaccagctgcgggatagcaagagcagcgacaagagcgtgtgtctgttcaccgacttcgacagccagaccaacgtgtcccagagcaaggactccgacgtgtacatcaccgataagtgcgtgctggacatgcggagcatggacttcaagagcaactccgccgtggcctggtccaacaagtccgatttcgcctgcgccaacgccttcaacaacagcattatccccgaggacacattcttcccaagccccgagagcagctgcgacgtgaagctggtggaaaagagcttcgagacagacaccaacctgaacttccagatcctgtacgagatcctgctgggcaaggccaccctgtacgccgtgctggtgtctgccctggtgctgatggctatggtcaagcggaaggacagccgggga

SEQ ID NO: 5359 - DNA, 2262 bp, synthetic construct
  source 1..2262: mol_type = other DNA
atggccttaccagtgaccgccttgctcctgccgctggccttgctgctccacgccgccaggccggaagtgcagctggttgaatctggcggaggactggttcagcctggcggatctctgagactgtcttgtgccgccagcggcttcagcttcagcgacttttggatgagctgggtccgacaggcccctggcaaaggacttgaatgggtcgccacaatcagccaggccggcagcgagaaggactacgtggactctgtgaagggcagattcaccatcagccgggacaacgccaagaagtccctgtacctccagatgaacagcctgagagccgaggacaccgccgtgtactattgtgcctctggcgtgtacagcttcgactacagaggccagggcaccctggtcacagtctcttctggtaccggcggaggcggatctggcggcggaggtagcggtggcggaggatctgaattcgacatccaactgacccagagccccagcagcctgtctgcctctgtgggcgacagagtgaccatcacctgtagagccagccagggcatcagaaacgacctgggctggtatcagcagaagcccggcaaggcccccaagcggctgatctatgctgccagctccctccagaatggcgtgcccagcagattttccggcagcggctctggcaccgagttcaccctgaccatcagctccctccagcccgaggacttcgccacctactactgcctccagcacaacacctaccccgccttcggccagggcaccaaggtggaaatcaagagactcgaggacctgaagaacgtgttcccacctgaggtggccgtgttcgagcctagcgaggccgagatcagccacacccagaaagccaccctcgtgtgcctggctaccggcttctaccccgaccatgtggaactgtcttggtgggtcaacggcaaagaggtgcacagcggcgtgtgtaccgacccccagccactgaaagaacagcccgccctgaacgacagccggtactgcctgagcagcagactgagagtgtccgccaccttctggcagaacccccggaaccacttcagatgccaggtgcagttctacggcctgagcgagaacgacgagtggacccaggacagagccaagcccgtgacccagatcgtgtctgccgaagcctggggcagagccgattgcggctttaccagcgagagctaccagcagggcgtgctgagcgccaccaacctgagcgtgatcggcttcagaatcctgctgctgaaagtggccggctttaacctgctgatgaccctgcggctgtggtccagcagggccaagcgatctggatctggagcaacaaacttctcactactcaaacaagcaggtgacgtggaggagaatcccgggcctactagtatggactggatttggcgcatccttttccttgtcggcgctgctaccggcgcgcattccttcgaacaggtgcaactccaggaatctggccctggcctcgtgaagcctagccagaccctgagcctgacctgtaccgtgtctggcggcagcatcagcagcttcaactactactggtcctggatcagacaccaccctggcaagggcctggaatggatcggctacatctactacagcggcagcacctacagcaaccccagcctgaagtcccgcgtgaccatctccgtggacaccagcaagaaccagtttagcctgaccctgtccagcgtgacagccgccgataccgccgtgtactactgcgccagaggctacaactggaactacttcgactactggggccagggaaccctcgtgaccgtgtctagtacgcgtatccagaaccctgatcctgccgtgtaccagctgcgggatagcaagagcagcgacaagagcgtgtgtctgttcaccgacttcgacagccagaccaacgtgtcccagagcaaggactccgacgtgtacatcaccgataagtgcgtgctggacatgcggagcatggacttcaagagcaactccgccgtggcctggtccaacaagtccgatttcgcctgcgccaacgccttcaacaacagcattatccccgaggacacattcttcccaagccccgagagcagctgcgacgtgaagctggtggaaaagagcttcgagacagacaccaacctgaacttccagatcctgtacgagatcctgctgggcaaggccaccctgtacgccgtgctggtgtctgccctggtgctgatggctatggtcaagcggaaggacagccgggga

SEQ ID NO: 5360 - DNA, 2268 bp, synthetic construct
  source 1..2268: mol_type = other DNA
atggccttaccagtgaccgccttgctcctgccgctggccttgctgctccacgccgccaggccggaagtgcagctggttgaatctggcggaggactggttcagcctggcggatctctgagactgtcttgtgccgccagcggcttcagcttcagcgacttttggatgagctgggtccgacaggcccctggcaaaggacttgaatgggtcgccacaatcagccaggccggcagcgagaaggactacgtggactctgtgaagggcagattcaccatcagccgggacaacgccaagaagtccctgtacctccagatgaacagcctgagagccgaggacaccgccgtgtactattgtgcctctggcgtgtacagcttcgactacagaggccagggcaccctggtcacagtctcttctggtaccggcggaggcggatctggcggcggaggtagcggtggcggaggatctgaattcgacgacatcgtgctgacccagagccccgccagcctggccgtgagcctgggccagagcgtgaccatcagctgcagagccagcgagagcgtggagtactacggcaccagcctgatgcagtggtaccagcagaagcccggccagccccccaagctgctgatctacgccaccagcaacgtggagagcggcgtgcccgccagattcagcggcagcggcagcggcaccgacttcagcctgaacatccaccccgtggaggaggacgacatcgccatgtacttctgccagcagagcagaaagctgcccagcaccttcggcggcggcaccaagctggagatcaagctcgaggacctgaagaacgtgttcccacctgaggtggccgtgttcgagcctagcgaggccgagatcagccacacccagaaagccaccctcgtgtgcctggctaccggcttctaccccgaccatgtggaactgtcttggtgggtcaacggcaaagaggtgcacagcggcgtgtgtaccgacccccagccactgaaagaacagcccgccctgaacgacagccggtactgcctgagcagcagactgagagtgtccgccaccttctggcagaacccccggaaccacttcagatgccaggtgcagttctacggcctgagcgagaacgacgagtggacccaggacagagccaagcccgtgacccagatcgtgtctgccgaagcctggggcagagccgattgcggctttaccagcgagagctaccagcagggcgtgctgagcgccaccaacctgagcgtgatcggcttcagaatcctgctgctgaaagtggccggctttaacctgctgatgaccctgcggctgtggtccagcagggccaagcgatctggatctggagcaacaaacttctcactactcaaacaagcaggtgacgtggaggagaatcccgggcctactagtatggactggatttggcgcatccttttccttgtcggcgctgctaccggcgcgcattccttcgaagacgtgagactgcaggagagcggccccggccaggtgaagcccagccagaccgtgagcctgacctgcagcgtgaccggctacagcatcaccaacggcaaccactggtggaactggatcagacaggtgagcggcagcaagctggagtggatcggctacatcagcagcagcggcagcaccgacagcaaccccagcctgaagagcagaatcagcatcaccagagacaccagcaagaaccagctgttcctgcagctgaacagcgtgaccaccgaggacatcgccacctactactgcgccagaggctactacttcgactactggggccagggcaccaccctgaccgtgagcagcacgcgtatccagaaccctgatcctgccgtgtaccagctgcgggatagcaagagcagcgacaagagcgtgtgtctgttcaccgacttcgacagccagaccaacgtgtcccagagcaaggactccgacgtgtacatcaccgataagtgcgtgctggacatgcggagcatggacttcaagagcaactccgccgtggcctggtccaacaagtccgatttcgcctgcgccaacgccttcaacaacagcattatccccgaggacacattcttcccaagccccgagagcagctgcgacgtgaagctggtggaaaagagcttcgagacagacaccaacctgaacttccagatcctgtacgagatcctgctgggcaaggccaccctgtacgccgtgctggtgtctgccctggtgctgatggctatggtcaagcggaaggacagccgggga

SEQ ID NO: 5361 - DNA, 2265 bp, synthetic construct
  source 1..2265: mol_type = other DNA
atggccttaccagtgaccgccttgctcctgccgctggccttgctgctccacgccgccaggccggaagtgcagctggttgaatctggcggaggactggttcagcctggcggatctctgagactgtcttgtgccgccagcggcttcagcttcagcgacttttggatgagctgggtccgacaggcccctggcaaaggacttgaatgggtcgccacaatcagccaggccggcagcgagaaggactacgtggactctgtgaagggcagattcaccatcagccgggacaacgccaagaagtccctgtacctccagatgaacagcctgagagccgaggacaccgccgtgtactattgtgcctctggcgtgtacagcttcgactacagaggccagggcaccctggtcacagtctcttctggtaccggcggaggcggatctggcggcggaggtagcggtggcggaggatctgaattcgacatccagatgacccagagccccagcagcctgtctgccagcgtgggcgacagagtgaccatcacctgtagagccagccaggacgtgaacaccgccgtggcctggtatcagcagaagcctggcaaggcccccaagctgctgatctacagcgccagcttcctggaaagcggcgtgcccagcagattcagcggaagcagaagcggcaccgacttcaccctgaccatcagctccctccagcccgaggacttcgccacctactactgccagcagcactacaccacccctcccaccttcggccagaccaaggtggaaatcaagagactcgaggacctgaagaacgtgttcccacctgaggtggccgtgttcgagcctagcgaggccgagatcagccacacccagaaagccaccctcgtgtgcctggctaccggcttctaccccgaccatgtggaactgtcttggtgggtcaacggcaaagaggtgcacagcggcgtgtgtaccgacccccagccactgaaagaacagcccgccctgaacgacagccggtactgcctgagcagcagactgagagtgtccgccaccttctggcagaacccccggaaccacttcagatgccaggtgcagttctacggcctgagcgagaacgacgagtggacccaggacagagccaagcccgtgacccagatcgtgtctgccgaagcctggggcagagccgattgcggctttaccagcgagagctaccagcagggcgtgctgagcgccaccaacctgagcgtgatcggcttcagaatcctgctgctgaaagtggccggctttaacctgctgatgaccctgcggctgtggtccagcagggccaagcgatctggatctggagcaacaaacttctcactactcaaacaagcaggtgacgtggaggagaatcccgggcctactagtatggactggatttggcgcatccttttccttgtcggcgctgctaccggcgcgcattccttcgaagaagtgcaactggtggaatctggcggcggactggtgcagcctggcggatctctgagactgagctgtgccgccagcggcttcaacatcaaggacacctacatccactgggtgcgccaggcccctggaaagggactggaatgggtggcccggatctaccccaccaacggctacaccagatacgccgacagcgtgaagggccggttcaccatcagcgccgacaccagcaagaataccgcctacctccagatgaacagcctgcgggccgaggataccgccgtgtactactgctcaagatggggaggcgacggcttctacgctatggacgtgtggggccagggcacccttgtgaccgtgtcatctacgcgtatccagaaccctgatcctgccgtgtaccagctgcgggatagcaagagcagcgacaagagcgtgtgtctgttcaccgacttcgacagccagaccaacgtgtcccagagcaaggactccgacgtgtacatcaccgataagtgcgtgctggacatgcggagcatggacttcaagagcaactccgccgtggcctggtccaacaagtccgatttcgcctgcgccaacgccttcaacaacagcattatccccgaggacacattcttcccaagccccgagagcagctgcgacgtgaagctggtggaaaagagcttcgagacagacaccaacctgaacttccagatcctgtacgagatcctgctgggcaaggccaccctgtacgccgtgctggtgtctgccctggtgctgatggctatggtcaagcggaaggacagccgggga

SEQ ID NO: 5362 - DNA, 2262 bp, synthetic construct
  source 1..2262: mol_type = other DNA
atggccttaccagtgaccgccttgctcctgccgctggccttgctgctccacgccgccaggccggaagtgcagctggttgaatctggcggaggactggttcagcctggcggatctctgagactgtcttgtgccgccagcggcttcagcttcagcgacttttggatgagctgggtccgacaggcccctggcaaaggacttgaatgggtcgccacaatcagccaggccggcagcgagaaggactacgtggactctgtgaagggcagattcaccatcagccgggacaacgccaagaagtccctgtacctccagatgaacagcctgagagccgaggacaccgccgtgtactattgtgcctctggcgtgtacagcttcgactacagaggccagggcaccctggtcacagtctcttctggtaccggcggaggcggatctggcggcggaggtagcggtggcggaggatctgaattcgaccagagcgtgctgacacagcctcctagcgtgtcagtggcccctggcaagaccgccagaatcccctgcgagggcaactacatcggcagcagcaacgtgcactggtatcagcagaagcccggccaggctcccgtgctcgtgatccacttcgacagcgacagacccagcggcatccccgacagattcagcggcagcaacagcggcaacatggctaccctgaccatcagcagagtggaagccggggacgaggccgactactactgtcaagtgtgggagaaccacggctgggtgttcggcggaggcaccaagctgacagtgctgtctctcgaggacctgaagaacgtgttcccacctgaggtggccgtgttcgagcctagcgaggccgagatcagccacacccagaaagccaccctcgtgtgcctggctaccggcttctaccccgaccatgtggaactgtcttggtgggtcaacggcaaagaggtgcacagcggcgtgtgtaccgacccccagccactgaaagaacagcccgccctgaacgacagccggtactgcctgagcagcagactgagagtgtccgccaccttctggcagaacccccggaaccacttcagatgccaggtgcagttctacggcctgagcgagaacgacgagtggacccaggacagagccaagcccgtgacccagatcgtgtctgccgaagcctggggcagagccgattgcggctttaccagcgagagctaccagcagggcgtgctgagcgccaccaacctgagcgtgatcggcttcagaatcctgctgctgaaagtggccggctttaacctgctgatgaccctgcggctgtggtccagcagggccaagcgatctggatctggagcaacaaacttctcactactcaaacaagcaggtgacgtggaggagaatcccgggcctactagtatggactggatttggcgcatccttttccttgtcggcgctgctaccggcgcgcattccttcgaagaggtgcaactggtggaaacaggcggcggactggtgcagcctggcgagtctctgagactgagctgtgccgccagcggcttcaccttcagcgactacgagatgaactgggtgcgccaggcccctggaaagggcctggaatgggtgtcctacatcagcagctccggcagcaccatctactacgccgacagcgtgaagggccggtttaccatctaccgggacaacgccaagaacagcctgtacctccagatgaactccctgcgggccgaggacaccgccctgtactattgtgccagagcctggggcgtgggaccccctgattattggggacagggcaccctcgtgaccgtgtcctctacgcgtatccagaaccctgatcctgccgtgtaccagctgcgggatagcaagagcagcgacaagagcgtgtgtctgttcaccgacttcgacagccagaccaacgtgtcccagagcaaggactccgacgtgtacatcaccgataagtgcgtgctggacatgcggagcatggacttcaagagcaactccgccgtggcctggtccaacaagtccgatttcgcctgcgccaacgccttcaacaacagcattatccccgaggacacattcttcccaagccccgagagcagctgcgacgtgaagctggtggaaaagagcttcgagacagacaccaacctgaacttccagatcctgtacgagatcctgctgggcaaggccaccctgtacgccgtgctggtgtctgccctggtgctgatggctatggtcaagcggaaggacagccgggga

SEQ ID NO: 5363 - DNA, 2286 bp, synthetic construct
  source 1..2286: mol_type = other DNA
atggccttaccagtgaccgccttgctcctgccgctggccttgctgctccacgccgccaggccggaagtgcagctggttgaatctggcggaggactggttcagcctggcggatctctgagactgtcttgtgccgccagcggcttcagcttcagcgacttttggatgagctgggtccgacaggcccctggcaaaggacttgaatgggtcgccacaatcagccaggccggcagcgagaaggactacgtggactctgtgaagggcagattcaccatcagccgggacaacgccaagaagtccctgtacctccagatgaacagcctgagagccgaggacaccgccgtgtactattgtgcctctggcgtgtacagcttcgactacagaggccagggcaccctggtcacagtctcttctggtaccggcggaggcggatctggcggcggaggtagcggtggcggaggatctgaattcgacatccagatgacccagagccccagcagcctgtctgccagcgtgggcgataccgtgaccatcacctgtcaggccaacggctacctgaactggtatcagcagcggagaggcaaggcccccaagctgctgatctacgacggcagcaagctggaaagaggcgtgcccagcagattcagcggcagaagatggggccaggagtacaacctgaccatcaacaacctccagcccgaggatattgccacatacttttgccaggtgtacgagttcgtggtgcccggcacacggctggacctgaagagaacagtggctgctcctctcgaggacctgaagaacgtgttcccacctgaggtggccgtgttcgagcctagcgaggccgagatcagccacacccagaaagccaccctcgtgtgcctggctaccggcttctaccccgaccatgtggaactgtcttggtgggtcaacggcaaagaggtgcacagcggcgtgtgtaccgacccccagccactgaaagaacagcccgccctgaacgacagccggtactgcctgagcagcagactgagagtgtccgccaccttctggcagaacccccggaaccacttcagatgccaggtgcagttctacggcctgagcgagaacgacgagtggacccaggacagagccaagcccgtgacccagatcgtgtctgccgaagcctggggcagagccgattgcggctttaccagcgagagctaccagcagggcgtgctgagcgccaccaacctgagcgtgatcggcttcagaatcctgctgctgaaagtggccggctttaacctgctgatgaccctgcggctgtggtccagcagggccaagcgatctggatctggagcaacaaacttctcactactcaaacaagcaggtgacgtggaggagaatcccgggcctactagtatggactggatttggcgcatccttttccttgtcggcgctgctaccggcgcgcattccttcgaacaggtgcagctgctccagtctggcgctgccgtgacaaagcctggcgcttctgtgcgggtgtcctgtgaagccagcggctacaacatccgggactacttcatccactggtggcggcaggctccaggccagggactccagtgggtgggatggatcaaccccaagaccggccagcccaacaaccccagacagttccagggcagagtgtccctgaccagacacgccagctgggacttcgacaccttcagcttctacatggatctgaaggccctgcggagcgacgataccgccgtgtacttctgcgccagacagagaagcgactactgggatttcgacgtgtggggcagcggcacccaagtgacagtgtctagcgccagcaccaagggacccacgcgtatccagaaccctgatcctgccgtgtaccagctgcgggatagcaagagcagcgacaagagcgtgtgtctgttcaccgacttcgacagccagaccaacgtgtcccagagcaaggactccgacgtgtacatcaccgataagtgcgtgctggacatgcggagcatggacttcaagagcaactccgccgtggcctggtccaacaagtccgatttcgcctgcgccaacgccttcaacaacagcattatccccgaggacacattcttcccaagccccgagagcagctgcgacgtgaagctggtggaaaagagcttcgagacagacaccaacctgaacttccagatcctgtacgagatcctgctgggcaaggccaccctgtacgccgtgctggtgtctgccctggtgctgatggctatggtcaagcggaaggacagccgggga

SEQ ID NO: 5364 - DNA, 2304 bp, synthetic construct
  source 1..2304: mol_type = other DNA
atggccttaccagtgaccgccttgctcctgccgctggccttgctgctccacgccgccaggccggaagtgcagctggttgaatctggcggaggactggttcagcctggcggatctctgagactgtcttgtgccgccagcggcttcagcttcagcgacttttggatgagctgggtccgacaggcccctggcaaaggacttgaatgggtcgccacaatcagccaggccggcagcgagaaggactacgtggactctgtgaagggcagattcaccatcagccgggacaacgccaagaagtccctgtacctccagatgaacagcctgagagccgaggacaccgccgtgtactattgtgcctctggcgtgtacagcttcgactacagaggccagggcaccctggtcacagtctcttctggtaccggcggaggcggatctggcggcggaggtagcggtggcggaggatctgaattccagtctgccctgacacagcctcctagcgcctctggctctcccggccagagcatcaccatcagctgtaccggcaccagcaacaacttcgtgtcctggtatcagcagcacgccggcaaggcccccaagctcgtgatctacgacgtgaacaagcggcccagcggcgtgcccgatagattcagcggcagcaagagcggcaacaccgccagcctgacagtgtctggcctccagaccgatgacgaggccgtgtactactgcggcagcctcgtgggcaactgggacgtgatctttggcggaggcaccaagctgaccgtgctgctcgaggacctgaagaacgtgttcccacctgaggtggccgtgttcgagcctagcgaggccgagatcagccacacccagaaagccaccctcgtgtgcctggctaccggcttctaccccgaccatgtggaactgtcttggtgggtcaacggcaaagaggtgcacagcggcgtgtgtaccgacccccagccactgaaagaacagcccgccctgaacgacagccggtactgcctgagcagcagactgagagtgtccgccaccttctggcagaacccccggaaccacttcagatgccaggtgcagttctacggcctgagcgagaacgacgagtggacccaggacagagccaagcccgtgacccagatcgtgtctgccgaagcctggggcagagccgattgcggctttaccagcgagagctaccagcagggcgtgctgagcgccaccaacctgagcgtgatcggcttcagaatcctgctgctgaaagtggccggctttaacctgctgatgaccctgcggctgtggtccagcagggccaagcgatctggatctggagcaacaaacttctcactactcaaacaagcaggtgacgtggaggagaatcccgggcctactagtatggactggatttggcgcatccttttccttgtcggcgctgctaccggcgcgcattccttcgaacagccccagctccaggaatctggccccacactggtggaagccagcgagacactgagcctgacctgtgccgtgtccggcgattctaccgccgcctgcaatagcttctggggctgggtgcgccagcctcctggaaagggactggaatgggtgggaagcctgagccactgcgccagctattggaaccggggctggacctaccacaaccccagcctgaagtccagactgaccctggccctggacacccccaagaacctggtgttcctgaagctgaacagcgtgacagccgccgacaccgccacctactactgtgccagatttggcggcgaggtgctgcggtacaccgactggcctaaacctgcctgggtggacctgtggggcagaggaacactcgtgaccgtgtccagcacgcgtatccagaaccctgatcctgccgtgtaccagctgcgggatagcaagagcagcgacaagagcgtgtgtctgttcaccgacttcgacagccagaccaacgtgtcccagagcaaggactccgacgtgtacatcaccgataagtgcgtgctggacatgcggagcatggacttcaagagcaactccgccgtggcctggtccaacaagtccgatttcgcctgcgccaacgccttcaacaacagcattatccccgaggacacattcttcccaagccccgagagcagctgcgacgtgaagctggtggaaaagagcttcgagacagacaccaacctgaacttccagatcctgtacgagatcctgctgggcaaggccaccctgtacgccgtgctggtgtctgccctggtgctgatggctatggtcaagcggaaggacagccgggga

SEQ ID NO: 5365 - DNA, 2259 bp, synthetic construct
  source 1..2259: mol_type = other DNA
atggccttaccagtgaccgccttgctcctgccgctggccttgctgctccacgccgccaggccggaagtgcagctggttgaatctggcggaggactggttcagcctggcggatctctgagactgtcttgtgccgccagcggcttcagcttcagcgacttttggatgagctgggtccgacaggcccctggcaaaggacttgaatgggtcgccacaatcagccaggccggcagcgagaaggactacgtggactctgtgaagggcagattcaccatcagccgggacaacgccaagaagtccctgtacctccagatgaacagcctgagagccgaggacaccgccgtgtactattgtgcctctggcgtgtacagcttcgactacagaggccagggcaccctggtcacagtctcttctggtaccggcggaggcggatctggcggcggaggtagcggtggcggaggatctgaattcgagatcgtgctgacacagagccctggcaccctgagcctgtctccaggcgagacagccatcatcagctgccggacaagccagtacggcagcctggcctggtatcagcagaggccaggacaggcccccagactcgtgatctacagcggcagcacaagagccgccggaatccccgatagattcagcggctccagatggggacccgactacaacctgaccatcagcaacctggaaagcggcgacttcggcgtgtactactgccagcagtacgagttcttcggccagggcaccaaggtgcaggtggacatcaaaagactcgaggacctgaagaacgtgttcccacctgaggtggccgtgttcgagcctagcgaggccgagatcagccacacccagaaagccaccctcgtgtgcctggctaccggcttctaccccgaccatgtggaactgtcttggtgggtcaacggcaaagaggtgcacagcggcgtgtgtaccgacccccagccactgaaagaacagcccgccctgaacgacagccggtactgcctgagcagcagactgagagtgtccgccaccttctggcagaacccccggaaccacttcagatgccaggtgcagttctacggcctgagcgagaacgacgagtggacccaggacagagccaagcccgtgacccagatcgtgtctgccgaagcctggggcagagccgattgcggctttaccagcgagagctaccagcagggcgtgctgagcgccaccaacctgagcgtgatcggcttcagaatcctgctgctgaaagtggccggctttaacctgctgatgaccctgcggctgtggtccagcagggccaagcgatctggatctggagcaacaaacttctcactactcaaacaagcaggtgacgtggaggagaatcccgggcctactagtatggactggatttggcgcatccttttccttgtcggcgctgctaccggcgcgcattccttcgaacaggtgcagctggtgcagtctggcggccagatgaagaaacccggcgagagcatgagaatcagctgtcgggcctccggctacgagttcatcgactgcaccctgaactggatcagactggcccctggcaagcggcctgagtggatgggatggctgaagcctagaggcggagccgtgaactacgccagacctctccagggcagagtgaccatgaccagggacgtgtacagcgataccgccttcctggaactgcggagcctgaccgtggatgataccgccgtgtacttctgcaccagaggcaagaactgcgattacaactgggacttcgagcactggggcagaggcacccctgtgatcgtgtctagcacgcgtatccagaaccctgatcctgccgtgtaccagctgcgggatagcaagagcagcgacaagagcgtgtgtctgttcaccgacttcgacagccagaccaacgtgtcccagagcaaggactccgacgtgtacatcaccgataagtgcgtgctggacatgcggagcatggacttcaagagcaactccgccgtggcctggtccaacaagtccgatttcgcctgcgccaacgccttcaacaacagcattatccccgaggacacattcttcccaagccccgagagcagctgcgacgtgaagctggtggaaaagagcttcgagacagacaccaacctgaacttccagatcctgtacgagatcctgctgggcaaggccaccctgtacgccgtgctggtgtctgccctggtgctgatggctatggtcaagcggaaggacagccgggga

SEQ ID NO: 5366 - DNA, 2289 bp, synthetic construct
  source 1..2289: mol_type = other DNA
atggccttaccagtgaccgccttgctcctgccgctggccttgctgctccacgccgccaggccggaagtgcagctggttgaatctggcggaggactggttcagcctggcggatctctgagactgtcttgtgccgccagcggcttcagcttcagcgacttttggatgagctgggtccgacaggcccctggcaaaggacttgaatgggtcgccacaatcagccaggccggcagcgagaaggactacgtggactctgtgaagggcagattcaccatcagccgggacaacgccaagaagtccctgtacctccagatgaacagcctgagagccgaggacaccgccgtgtactattgtgcctctggcgtgtacagcttcgactacagaggccagggcaccctggtcacagtctcttctggtaccggcggaggcggatctggcggcggaggtagcggtggcggaggatctgaattcgagctggtgctgacacagagccctggcaccctgtctctgtctgccggcgaaagagccaccctgagctgtagagccagccagagcgtgtcctctggcagcctggcttggtatcagcagaagccaggccaggcccccagactgctgatctacggcgcttctaccagagccaccggcatccccgatagattcagcggctctggctccggcaccgacttcaccctgacaatcggcagactggaacccgaggacctggccgtgtactactgccagcagtacggcaccagcccctacacattcggccagggcaccaagctggaaatcctcgaggacctgaagaacgtgttcccacctgaggtggccgtgttcgagcctagcgaggccgagatcagccacacccagaaagccaccctcgtgtgcctggctaccggcttctaccccgaccatgtggaactgtcttggtgggtcaacggcaaagaggtgcacagcggcgtgtgtaccgacccccagccactgaaagaacagcccgccctgaacgacagccggtactgcctgagcagcagactgagagtgtccgccaccttctggcagaacccccggaaccacttcagatgccaggtgcagttctacggcctgagcgagaacgacgagtggacccaggacagagccaagcccgtgacccagatcgtgtctgccgaagcctggggcagagccgattgcggctttaccagcgagagctaccagcagggcgtgctgagcgccaccaacctgagcgtgatcggcttcagaatcctgctgctgaaagtggccggctttaacctgctgatgaccctgcggctgtggtccagcagggccaagcgatctggatctggagcaacaaacttctcactactcaaacaagcaggtgacgtggaggagaatcccgggcctactagtatggactggatttggcgcatccttttccttgtcggcgctgctaccggcgcgcattccttcgaactggaacagagcggagccgaagtgaagaaacccggcagcagcgtgcaggtgtcctgcaaagcaagcggcggcaccttctctatgtacggcttcaactgggtgcgccaggctcctggacacggcctggaatggatgggcggcatcatccccatcttcggcacctccaactacgcccagaaattccggggcagagtgaccttcaccgccgaccaggccacaagcaccgcctacatggaactgaccaacctgcggagcgacgacaccgccgtgtattattgcgccagagacttcggccccgactgggaggatggcgacagctacgatggcagcggcagaggcttcttcgacttctggggccagggaacccttgtgaccgtgtcctcaacgcgtatccagaaccctgatcctgccgtgtaccagctgcgggatagcaagagcagcgacaagagcgtgtgtctgttcaccgacttcgacagccagaccaacgtgtcccagagcaaggactccgacgtgtacatcaccgataagtgcgtgctggacatgcggagcatggacttcaagagcaactccgccgtggcctggtccaacaagtccgatttcgcctgcgccaacgccttcaacaacagcattatccccgaggacacattcttcccaagccccgagagcagctgcgacgtgaagctggtggaaaagagcttcgagacagacaccaacctgaacttccagatcctgtacgagatcctgctgggcaaggccaccctgtacgccgtgctggtgtctgccctggtgctgatggctatggtcaagcggaaggacagccgggga

SEQ ID NO: 5367 - DNA, 2229 bp, synthetic construct
  source 1..2229: mol_type = other DNA
atggccttaccagtgaccgccttgctcctgccgctggccttgctgctccacgccgccaggccggaagtgcagctggttgaatctggcggaggactggttcagcctggcggatctctgagactgtcttgtgccgccagcggcttcagcttcagcgacttttggatgagctgggtccgacaggcccctggcaaaggacttgaatgggtcgccacaatcagccaggccggcagcgagaaggactacgtggactctgtgaagggcagattcaccatcagccgggacaacgccaagaagtccctgtacctccagatgaacagcctgagagccgaggacaccgccgtgtactattgtgcctctggcgtgtacagcttcgactacagaggccagggcaccctggtcacagtctcttctggtaccggcggaggcggatctggcggcggaggtagcggtggcggaggatctgaattcgacatccagatgacccagagccccagcagcctgtctgccagcgtgggcgacagagtgaccatcacctgtcaggccagccaggacatcaacaactacctgaactggtatcagcagaagcccggcaaggcccccaagctgctgatctacgacgccagcaatctgcagaccggcgtgcccagcagattttccggctctggcagcggcaccgacttcaccttcaccatcgaggacattgccacctactactgccagcagtacaccttcggccctggcaccaaggtggacatcaaactcgaggacctgaagaacgtgttcccacctgaggtggccgtgttcgagcctagcgaggccgagatcagccacacccagaaagccaccctcgtgtgcctggctaccggcttctaccccgaccatgtggaactgtcttggtgggtcaacggcaaagaggtgcacagcggcgtgtgtaccgacccccagccactgaaagaacagcccgccctgaacgacagccggtactgcctgagcagcagactgagagtgtccgccaccttctggcagaacccccggaaccacttcagatgccaggtgcagttctacggcctgagcgagaacgacgagtggacccaggacagagccaagcccgtgacccagatcgtgtctgccgaagcctggggcagagccgattgcggctttaccagcgagagctaccagcagggcgtgctgagcgccaccaacctgagcgtgatcggcttcagaatcctgctgctgaaagtggccggctttaacctgctgatgaccctgcggctgtggtccagcagggccaagcgatctggatctggagcaacaaacttctcactactcaaacaagcaggtgacgtggaggagaatcccgggcctactagtatggactggatttggcgcatccttttccttgtcggcgctgctaccggcgcgcattccttcgaagaagtgcaactgctggaatctggcggcggactggtgcagcctggcggatctctgagactgagctgtgccgccagcggcttcacctttagctggtacagcatgacctgggtgcgccaggcccctggcaaaggactggaatgggtgtccagcatcgtgccctggggcgatttcacccagtacgccgatagcgtgaagggccggttcaccatcagccgggacaacagcaagaacaccctgtacctgcagatgaacagcctgcgggccgaggacaccgccgtgtactattgtgccaagggacctggctggggcagcttcgatctgtggggcagaggaacccttgtgaccgtgtccagcacgcgtatccagaaccctgatcctgccgtgtaccagctgcgggatagcaagagcagcgacaagagcgtgtgtctgttcaccgacttcgacagccagaccaacgtgtcccagagcaaggactccgacgtgtacatcaccgataagtgcgtgctggacatgcggagcatggacttcaagagcaactccgccgtggcctggtccaacaagtccgatttcgcctgcgccaacgccttcaacaacagcattatccccgaggacacattcttcccaagccccgagagcagctgcgacgtgaagctggtggaaaagagcttcgagacagacaccaacctgaacttccagatcctgtacgagatcctgctgggcaaggccaccctgtacgccgtgctggtgtctgccctggtgctgatggctatggtcaagcggaaggacagccgggga

SEQ ID NO: 5368 - DNA, 2259 bp, synthetic construct
  source 1..2259: mol_type = other DNA
atggccttaccagtgaccgccttgctcctgccgctggccttgctgctccacgccgccaggccggaagtgcagctggttgaatctggcggaggactggttcagcctggcggatctctgagactgtcttgtgccgccagcggcttcagcttcagcgacttttggatgagctgggtccgacaggcccctggcaaaggacttgaatgggtcgccacaatcagccaggccggcagcgagaaggactacgtggactctgtgaagggcagattcaccatcagccgggacaacgccaagaagtccctgtacctccagatgaacagcctgagagccgaggacaccgccgtgtactattgtgcctctggcgtgtacagcttcgactacagaggccagggcaccctggtcacagtctcttctggtaccggcggaggcggatctggcggcggaggtagcggtggcggaggatctgaattcgacatccagatgacccagagccccagcagcctgtctgccagcgtgggcgacagagtgaccatcacctgtaccgccagcctgagcgtgtccagcacctacctgcactggtatcagcagaagcccggcagcagccccaagctgtggatctacagcaccagcaacctggcctccggcgtgcccagcagattttctggcagcggctctggcaccagctacaccctgaccatcagctccctccagcccgaggacttcgccacctactactgccaccagtaccacagaagccccctgacctttggcggaggcaccaaggtggaaatcaagagactcgaggacctgaagaacgtgttcccacctgaggtggccgtgttcgagcctagcgaggccgagatcagccacacccagaaagccaccctcgtgtgcctggctaccggcttctaccccgaccatgtggaactgtcttggtgggtcaacggcaaagaggtgcacagcggcgtgtgtaccgacccccagccactgaaagaacagcccgccctgaacgacagccggtactgcctgagcagcagactgagagtgtccgccaccttctggcagaacccccggaaccacttcagatgccaggtgcagttctacggcctgagcgagaacgacgagtggacccaggacagagccaagcccgtgacccagatcgtgtctgccgaagcctggggcagagccgattgcggctttaccagcgagagctaccagcagggcgtgctgagcgccaccaacctgagcgtgatcggcttcagaatcctgctgctgaaagtggccggctttaacctgctgatgaccctgcggctgtggtccagcagggccaagcgatctggatctggagcaacaaacttctcactactcaaacaagcaggtgacgtggaggagaatcccgggcctactagtatggactggatttggcgcatccttttccttgtcggcgctgctaccggcgcgcattccttcgaagaagtgcaactggtggaatctggcggcggactggtgcagcctggcggatctctgagactgagctgtgccgccagcggcttcagcctgaccaaatacggcgtgcactgggtgcgccaggcccctggaaaaggactggaatgggtgggagtgaagtgggctggcggctccaccgactacaacagcgccctgatgagccggttcaccatcagcaaggacaacgccaagaacagcctgtacctccagatgaactccctgcgggccgaggacaccgccgtgtactactgtgccagagatcaccgggacgctatggactactggggccagggaacactcgtgaccgtgtcctctacgcgtatccagaaccctgatcctgccgtgtaccagctgcgggatagcaagagcagcgacaagagcgtgtgtctgttcaccgacttcgacagccagaccaacgtgtcccagagcaaggactccgacgtgtacatcaccgataagtgcgtgctggacatgcggagcatggacttcaagagcaactccgccgtggcctggtccaacaagtccgatttcgcctgcgccaacgccttcaacaacagcattatccccgaggacacattcttcccaagccccgagagcagctgcgacgtgaagctggtggaaaagagcttcgagacagacaccaacctgaacttccagatcctgtacgagatcctgctgggcaaggccaccctgtacgccgtgctggtgtctgccctggtgctgatggctatggtcaagcggaaggacagccgggga

SEQ ID NO: 5369 - DNA, 2271 bp, synthetic construct
  source 1..2271: mol_type = other DNA
atggccttaccagtgaccgccttgctcctgccgctggccttgctgctccacgccgccaggccggaagtgcagctggttgaatctggcggaggactggttcagcctggcggatctctgagactgtcttgtgccgccagcggcttcagcttcagcgacttttggatgagctgggtccgacaggcccctggcaaaggacttgaatgggtcgccacaatcagccaggccggcagcgagaaggactacgtggactctgtgaagggcagattcaccatcagccgggacaacgccaagaagtccctgtacctccagatgaacagcctgagagccgaggacaccgccgtgtactattgtgcctctggcgtgtacagcttcgactacagaggccagggcaccctggtcacagtctcttctggtaccggcggaggcggatctggcggcggaggtagcggtggcggaggatctgaattcgacatccagatgacccagagccccagcagcctgtctgccagcgtgggcgacagagtgaccatcacatgcaaggccagccaggacgtgggaacagccgtggcctggtatcagcagaagcctggcaaggcccccaagctgctgatctacagcgccagctacagatccaccggcgtgcccagcagattttccggctctggcagcggcaccgacttcaccctgaccatctctagcctccagcccgaggacttcgccacctactactgccagcaccactactccgccccctggacatttggcggaggcaccaaggtggaaatcaagctcgaggacctgaagaacgtgttcccacctgaggtggccgtgttcgagcctagcgaggccgagatcagccacacccagaaagccaccctcgtgtgcctggctaccggcttctaccccgaccatgtggaactgtcttggtgggtcaacggcaaagaggtgcacagcggcgtgtgtaccgacccccagccactgaaagaacagcccgccctgaacgacagccggtactgcctgagcagcagactgagagtgtccgccaccttctggcagaacccccggaaccacttcagatgccaggtgcagttctacggcctgagcgagaacgacgagtggacccaggacagagccaagcccgtgacccagatcgtgtctgccgaagcctggggcagagccgattgcggctttaccagcgagagctaccagcagggcgtgctgagcgccaccaacctgagcgtgatcggcttcagaatcctgctgctgaaagtggccggctttaacctgctgatgaccctgcggctgtggtccagcagggccaagcgatctggatctggagcaacaaacttctcactactcaaacaagcaggtgacgtggaggagaatcccgggcctactagtatggactggatttggcgcatccttttccttgtcggcgctgctaccggcgcgcattccttcgaagaagtgcaactggtggaatcaggcggcggactggtgcagcctggcggatctctgagactgagctgtgccgccagcggcttcaccttcagcagaaacggcatgagctgggtgcgccaggcccctggaaaaggactggaatgggtggcaaccgtgtccagcggcggcagctacatctactacgccgacagcgtgaagggccggttcaccatctccagagacaacgccaagaacagcctgtacctccagatgaactccctgcgggccgaggacaccgccgtgtactattgtgccagacagggcaccaccgccctggctaccagattcttcgatgtgtggggccagggcaccctcgtgaccgtgtcatctacgcgtatccagaaccctgatcctgccgtgtaccagctgcgggatagcaagagcagcgacaagagcgtgtgtctgttcaccgacttcgacagccagaccaacgtgtcccagagcaaggactccgacgtgtacatcaccgataagtgcgtgctggacatgcggagcatggacttcaagagcaactccgccgtggcctggtccaacaagtccgatttcgcctgcgccaacgccttcaacaacagcattatccccgaggacacattcttcccaagccccgagagcagctgcgacgtgaagctggtggaaaagagcttcgagacagacaccaacctgaacttccagatcctgtacgagatcctgctgggcaaggccaccctgtacgccgtgctggtgtctgccctggtgctgatggctatggtcaagcggaaggacagccgggga

SEQ ID NO: 5370 - DNA, 2259 bp, synthetic construct
  source 1..2259: mol_type = other DNA
atggccttaccagtgaccgccttgctcctgccgctggccttgctgctccacgccgccaggccggaagtgcagctggttgaatctggcggaggactggttcagcctggcggatctctgagactgtcttgtgccgccagcggcttcagcttcagcgacttttggatgagctgggtccgacaggcccctggcaaaggacttgaatgggtcgccacaatcagccaggccggcagcgagaaggactacgtggactctgtgaagggcagattcaccatcagccgggacaacgccaagaagtccctgtacctccagatgaacagcctgagagccgaggacaccgccgtgtactattgtgcctctggcgtgtacagcttcgactacagaggccagggcaccctggtcacagtctcttctggtaccggcggaggcggatctggcggcggaggtagcggtggcggaggatctgaattcgacatccagatgacccagagcccccctagcctgtctgcctctgtgggcggcaaagtgaccatcacatgcaaggccagccaggacatcgaccgctacatggcctggtatcaggacaagcccggcaagggacccaagctgctgatccacgataccagcaccctccagcccggcatccccagcagattttctggcagcggctccggcagagactacagcttcagcatcagcaacctggaacccgaggacattgccacctactactgcctccagtacgacaacctgtggaccttcggcggaggcaccaagctggaaatcaagagactcgaggacctgaagaacgtgttcccacctgaggtggccgtgttcgagcctagcgaggccgagatcagccacacccagaaagccaccctcgtgtgcctggctaccggcttctaccccgaccatgtggaactgtcttggtgggtcaacggcaaagaggtgcacagcggcgtgtgtaccgacccccagccactgaaagaacagcccgccctgaacgacagccggtactgcctgagcagcagactgagagtgtccgccaccttctggcagaacccccggaaccacttcagatgccaggtgcagttctacggcctgagcgagaacgacgagtggacccaggacagagccaagcccgtgacccagatcgtgtctgccgaagcctggggcagagccgattgcggctttaccagcgagagctaccagcagggcgtgctgagcgccaccaacctgagcgtgatcggcttcagaatcctgctgctgaaagtggccggctttaacctgctgatgaccctgcggctgtggtccagcagggccaagcgatctggatctggagcaacaaacttctcactactcaaacaagcaggtgacgtggaggagaatcccgggcctactagtatggactggatttggcgcatccttttccttgtcggcgctgctaccggcgcgcattccttcgaacaggtgcaactggtgcagagcggagccgagcttgtgaagcctggcgcttccgtgaagatgagctgcaaagccagcggctacatcttcaccaactacaacatccactgggtcaagaagtccccaggccagggcctggaatggatcggagccatctaccccggaaacggcgacgccccttacagccagaagttccaggacagagccaccctgaccgccgacaccagcagcagcaccacctacatggaactgagcagcctgaccagcgaggacagcgccgtgtactattgcgtgcgggccaactgggatgtggccttcgcctattggggccagggcacactggtgtccgtgtcctctacgcgtatccagaaccctgatcctgccgtgtaccagctgcgggatagcaagagcagcgacaagagcgtgtgtctgttcaccgacttcgacagccagaccaacgtgtcccagagcaaggactccgacgtgtacatcaccgataagtgcgtgctggacatgcggagcatggacttcaagagcaactccgccgtggcctggtccaacaagtccgatttcgcctgcgccaacgccttcaacaacagcattatccccgaggacacattcttcccaagccccgagagcagctgcgacgtgaagctggtggaaaagagcttcgagacagacaccaacctgaacttccagatcctgtacgagatcctgctgggcaaggccaccctgtacgccgtgctggtgtctgccctggtgctgatggctatggtcaagcggaaggacagccgggga

SEQ ID NO: 5371 - DNA, 2262 bp, synthetic construct
  source 1..2262: mol_type = other DNA
atggccttaccagtgaccgccttgctcctgccgctggccttgctgctccacgccgccaggccggaagtgcagctggttgaatctggcggaggactggttcagcctggcggatctctgagactgtcttgtgccgccagcggcttcagcttcagcgacttttggatgagctgggtccgacaggcccctggcaaaggacttgaatgggtcgccacaatcagccaggccggcagcgagaaggactacgtggactctgtgaagggcagattcaccatcagccgggacaacgccaagaagtccctgtacctccagatgaacagcctgagagccgaggacaccgccgtgtactattgtgcctctggcgtgtacagcttcgactacagaggccagggcaccctggtcacagtctcttctggtaccggcggaggcggatctggcggcggaggtagcggtggcggaggatctgaattcgacatccagatgacccagagccctgccagcctgtctgcctctgtgggcgagacagtgaccatcacctgtcgggtgtccggcaacatccacaactacctggcctggtatcagcagaagcagggcaagagcccccaactgctggtgtacaacgccaagaccctggccgatggcgtgcccagcagattttctggctctggcagcggcacccagtacagcctgaagatcaacagcctccagcccgaggacttcggcagctactactgccagcacttctggtccaacccctacaccttcggcggaggcaccaagctggaaatcaagctcgaggacctgaagaacgtgttcccacctgaggtggccgtgttcgagcctagcgaggccgagatcagccacacccagaaagccaccctcgtgtgcctggctaccggcttctaccccgaccatgtggaactgtcttggtgggtcaacggcaaagaggtgcacagcggcgtgtgtaccgacccccagccactgaaagaacagcccgccctgaacgacagccggtactgcctgagcagcagactgagagtgtccgccaccttctggcagaacccccggaaccacttcagatgccaggtgcagttctacggcctgagcgagaacgacgagtggacccaggacagagccaagcccgtgacccagatcgtgtctgccgaagcctggggcagagccgattgcggctttaccagcgagagctaccagcagggcgtgctgagcgccaccaacctgagcgtgatcggcttcagaatcctgctgctgaaagtggccggctttaacctgctgatgaccctgcggctgtggtccagcagggccaagcgatctggatctggagcaacaaacttctcactactcaaacaagcaggtgacgtggaggagaatcccgggcctactagtatggactggatttggcgcatccttttccttgtcggcgctgctaccggcgcgcattccttcgaacaggtgcaactccagcagtctggcgcttccgtgaaggtgtcctgcaaggccagcgaactcgtgcggcctggcacaggctacgccttcaccaattacctgatcgagtgggtcaagcagaggcccggacagggcctggaatggatcggagtgattaacccaggcagcggcggcaccaactacaacgagaagttcaagggcaaggccaccctgaccgccgacaagagcagcagcacagcctacatgcaactgagcagcctgaccagcgacgacagcgccgtgtacttctgcgcccggtacagaagctacgactggtacttcgacgtgtggggagccggcaccaccgtgacagtgtcatctacgcgtatccagaaccctgatcctgccgtgtaccagctgcgggatagcaagagcagcgacaagagcgtgtgtctgttcaccgacttcgacagccagaccaacgtgtcccagagcaaggactccgacgtgtacatcaccgataagtgcgtgctggacatgcggagcatggacttcaagagcaactccgccgtggcctggtccaacaagtccgatttcgcctgcgccaacgccttcaacaacagcattatccccgaggacacattcttcccaagccccgagagcagctgcgacgtgaagctggtggaaaagagcttcgagacagacaccaacctgaacttccagatcctgtacgagatcctgctgggcaaggccaccctgtacgccgtgctggtgtctgccctggtgctgatggctatggtcaagcggaaggacagccgggga

SEQ ID NO: 5372 - DNA, 2259 bp, synthetic construct
  source 1..2259: mol_type = other DNA
atggccttaccagtgaccgccttgctcctgccgctggccttgctgctccacgccgccaggccggaagtgcagctggttgaatctggcggaggactggttcagcctggcggatctctgagactgtcttgtgccgccagcggcttcagcttcagcgacttttggatgagctgggtccgacaggcccctggcaaaggacttgaatgggtcgccacaatcagccaggccggcagcgagaaggactacgtggactctgtgaagggcagattcaccatcagccgggacaacgccaagaagtccctgtacctccagatgaacagcctgagagccgaggacaccgccgtgtactattgtgcctctggcgtgtacagcttcgactacagaggccagggcaccctggtcacagtctcttctggtaccggcggaggcggatctggcggcggaggtagcggtggcggaggatctgaattcgacatccagatgacccagagcttcagcagcctgagcgccagcgtgggcgacagagtgaccatcacctgtagagccagccaggacatcagcaactacctgaactggtatcagcagaagcccggcaaggcccccaagctgctgatctactacaccagcagactgcacagcggcgtgcccagcagattttctggcagcggctccggcaccgactacaccctgacaatcagctccctgcagcccgaggacttcgctacctacttctgtcagcaaggcaacaccctgccctggacctttggcggaggcaccaagctggaaatcaagagactcgaggacctgaagaacgtgttcccacctgaggtggccgtgttcgagcctagcgaggccgagatcagccacacccagaaagccaccctcgtgtgcctggctaccggcttctaccccgaccatgtggaactgtcttggtgggtcaacggcaaagaggtgcacagcggcgtgtgtaccgacccccagccactgaaagaacagcccgccctgaacgacagccggtactgcctgagcagcagactgagagtgtccgccaccttctggcagaacccccggaaccacttcagatgccaggtgcagttctacggcctgagcgagaacgacgagtggacccaggacagagccaagcccgtgacccagatcgtgtctgccgaagcctggggcagagccgattgcggctttaccagcgagagctaccagcagggcgtgctgagcgccaccaacctgagcgtgatcggcttcagaatcctgctgctgaaagtggccggctttaacctgctgatgaccctgcggctgtggtccagcagggccaagcgatctggatctggagcaacaaacttctcactactcaaacaagcaggtgacgtggaggagaatcccgggcctactagtatggactggatttggcgcatccttttccttgtcggcgctgctaccggcgcgcattccttcgaagaagtgcaactggtgcagtccggcggagggctggtgcagagcggaggatctctgagactgagctgcagagccagcggctacaccttcacccggtactggatgctgtgggtgcgccagaggccaggcaagggactggaatgggtggccgagatcaacccccggaacgaccggaccaactacaacgagaagttcaagacccggttcaccatcagcgtggacagaagcaagaacaccctgtacctgcagatggacagcctgcgggccgaggataccgccgtgtacttttgtgctctgggaggcggctacgctatggactactggggccagggaacccttgtgaccgtgtcctctacgcgtatccagaaccctgatcctgccgtgtaccagctgcgggatagcaagagcagcgacaagagcgtgtgtctgttcaccgacttcgacagccagaccaacgtgtcccagagcaaggactccgacgtgtacatcaccgataagtgcgtgctggacatgcggagcatggacttcaagagcaactccgccgtggcctggtccaacaagtccgatttcgcctgcgccaacgccttcaacaacagcattatccccgaggacacattcttcccaagccccgagagcagctgcgacgtgaagctggtggaaaagagcttcgagacagacaccaacctgaacttccagatcctgtacgagatcctgctgggcaaggccaccctgtacgccgtgctggtgtctgccctggtgctgatggctatggtcaagcggaaggacagccgggga

SEQ ID NO: 5373 - DNA, 2262 bp, synthetic construct
  source 1..2262: mol_type = other DNA
atggccttaccagtgaccgccttgctcctgccgctggccttgctgctccacgccgccaggccggaagtgcagctggttgaatctggcggaggactggttcagcctggcggatctctgagactgtcttgtgccgccagcggcttcagcttcagcgacttttggatgagctgggtccgacaggcccctggcaaaggacttgaatgggtcgccacaatcagccaggccggcagcgagaaggactacgtggactctgtgaagggcagattcaccatcagccgggacaacgccaagaagtccctgtacctccagatgaacagcctgagagccgaggacaccgccgtgtactattgtgcctctggcgtgtacagcttcgactacagaggccagggcaccctggtcacagtctcttctggtaccggcggaggcggatctggcggcggaggtagcggtggcggaggatctgaattcgacatccagatgacacagtctccggcgtcactgtccgcctccgtgggggagactgtgactattatttgtagggcatcagttaacatctactcttatttggcctggtaccagcagaagcaaggcaagagtcctcagctgctggtgtataatgcgaagatcctggcagagggcgtgccgagccggttctccggcagcggctcaggtacccaattttccctcaagatcaattcactgcagccagaggactttggcagttactattgtcaacaccactacggcacattcactttcgggtccggtacaaaattggagattaagcgactcgaggacctgaagaacgtgttcccacctgaggtggccgtgttcgagcctagcgaggccgagatcagccacacccagaaagccaccctcgtgtgcctggctaccggcttctaccccgaccatgtggaactgtcttggtgggtcaacggcaaagaggtgcacagcggcgtgtgtaccgacccccagccactgaaagaacagcccgccctgaacgacagccggtactgcctgagcagcagactgagagtgtccgccaccttctggcagaacccccggaaccacttcagatgccaggtgcagttctacggcctgagcgagaacgacgagtggacccaggacagagccaagcccgtgacccagatcgtgtctgccgaagcctggggcagagccgattgcggctttaccagcgagagctaccagcagggcgtgctgagcgccaccaacctgagcgtgatcggcttcagaatcctgctgctgaaagtggccggctttaacctgctgatgaccctgcggctgtggtccagcagggccaagcgatctggatctggagcaacaaacttctcactactcaaacaagcaggtgacgtggaggagaatcccgggcctactagtatggactggatttggcgcatccttttccttgtcggcgctgctaccggcgcgcattccttcgaacaggtacagttgaaagaaagcgggcctggactggtagcgccttcccaatctctctccatcacgtgcaccatctctggcttctccctgacttcctatggagttcactgggtgaggcagccccccggcaagggactggaatggctggtcgtcatctggtccgacgggtccacaacctacaactccgctctgaaaagtcggctctctatttctaaagataatagcaagagccaggtgtttctgaaaatgaactctctgcagaccgatgatacggccatttactactgcgcttcacactatggctcaaccttggcattcgcttcctggggccacggaacactggtgaccgtttccgcagccacgcgtatccagaaccctgatcctgccgtgtaccagctgcgggatagcaagagcagcgacaagagcgtgtgtctgttcaccgacttcgacagccagaccaacgtgtcccagagcaaggactccgacgtgtacatcaccgataagtgcgtgctggacatgcggagcatggacttcaagagcaactccgccgtggcctggtccaacaagtccgatttcgcctgcgccaacgccttcaacaacagcattatccccgaggacacattcttcccaagccccgagagcagctgcgacgtgaagctggtggaaaagagcttcgagacagacaccaacctgaacttccagatcctgtacgagatcctgctgggcaaggccaccctgtacgccgtgctggtgtctgccctggtgctgatggctatggtcaagcggaaggacagccgggga

SEQ ID NO: 5374 - DNA, 2286 bp, synthetic construct
  source 1..2286: mol_type = other DNA
atggccttaccagtgaccgccttgctcctgccgctggccttgctgctccacgccgccaggccggaagtgcagctggttgaatctggcggaggactggttcagcctggcggatctctgagactgtcttgtgccgccagcggcttcagcttcagcgacttttggatgagctgggtccgacaggcccctggcaaaggacttgaatgggtcgccacaatcagccaggccggcagcgagaaggactacgtggactctgtgaagggcagattcaccatcagccgggacaacgccaagaagtccctgtacctccagatgaacagcctgagagccgaggacaccgccgtgtactattgtgcctctggcgtgtacagcttcgactacagaggccagggcaccctggtcacagtctcttctggtaccggcggaggcggatctggcggcggaggtagcggtggcggaggatctgaattcgacattgtgatgacccagtctcacaaattcatgtccacatcagtaggagacagggtcagcgtcacctgcaaggccagtcagaatgtgggtaataatgtagcctggtatcaacagaaaccagggcaatctcctaaagtactgatttactcggcatcctaccggtacagtggagtccctgatcgcttcacaggcagtggatctgggacagatttcactctcaccatcagtaatgtgcagtctgaagacttggcagagtatttctgtcagcaatataacacctatccattcacgttcggctcggggacaaagttggaaataaaactcgaggacctgaagaacgtgttcccacctgaggtggccgtgttcgagcctagcgaggccgagatcagccacacccagaaagccaccctcgtgtgcctggctaccggcttctaccccgaccatgtggaactgtcttggtgggtcaacggcaaagaggtgcacagcggcgtgtgtaccgacccccagccactgaaagaacagcccgccctgaacgacagccggtactgcctgagcagcagactgagagtgtccgccaccttctggcagaacccccggaaccacttcagatgccaggtgcagttctacggcctgagcgagaacgacgagtggacccaggacagagccaagcccgtgacccagatcgtgtctgccgaagcctggggcagagccgattgcggctttaccagcgagagctaccagcagggcgtgctgagcgccaccaacctgagcgtgatcggcttcagaatcctgctgctgaaagtggccggctttaacctgctgatgaccctgcggctgtggtccagcagggccaagcgatctggatctggagcaacaaacttctcactactcaaacaagcaggtgacgtggaggagaatcccgggcctactagtatggactggatttggcgcatccttttccttgtcggcgctgctaccggcgcgcattccttcgaagaggtacagctggaggaaagcggtggaggactggtgcaacctggagggtctatgaagctctcttgcgtagcttctgggttcacgttctccaattactggatgaactgggtgcggcagtcccccgagaaaggcctggaatgggtagcagaaattcggttcaagtcccataactatgctacacactttgccgagtctgtcaaaggccggttcactattagtcgagacgacagcaagtcttcagtctacctgcagatgaataacttgcgggcagaggacacaggtatctactactgcaccaggagaatcggcaactccgactatgactggtggtactttgacgtctggggagcaggcaccagcgtgacggtgagttcagcctcaacgcgtatccagaaccctgatcctgccgtgtaccagctgcgggatagcaagagcagcgacaagagcgtgtgtctgttcaccgacttcgacagccagaccaacgtgtcccagagcaaggactccgacgtgtacatcaccgataagtgcgtgctggacatgcggagcatggacttcaagagcaactccgccgtggcctggtccaacaagtccgatttcgcctgcgccaacgccttcaacaacagcattatccccgaggacacattcttcccaagccccgagagcagctgcgacgtgaagctggtggaaaagagcttcgagacagacaccaacctgaacttccagatcctgtacgagatcctgctgggcaaggccaccctgtacgccgtgctggtgtctgccctggtgctgatggctatggtcaagcggaaggacagccgggga

SEQ ID NO: 5375 - DNA, 2265 bp, synthetic construct
  source 1..2265: mol_type = other DNA
atggccttaccagtgaccgccttgctcctgccgctggccttgctgctccacgccgccaggccggaagtgcagctggttgaatctggcggaggactggttcagcctggcggatctctgagactgtcttgtgccgccagcggcttcagcttcagcgacttttggatgagctgggtccgacaggcccctggcaaaggacttgaatgggtcgccacaatcagccaggccggcagcgagaaggactacgtggactctgtgaagggcagattcaccatcagccgggacaacgccaagaagtccctgtacctccagatgaacagcctgagagccgaggacaccgccgtgtactattgtgcctctggcgtgtacagcttcgactacagaggccagggcaccctggtcacagtctcttctggtaccggcggaggcggatctggcggcggaggtagcggtggcggaggatctgaattcgaccagatcgtgctgacccagtcccccgctattatgtccgcatcaccgggcgaaaaagtgacgatctcctgtagcgcttcatctagcgtctcctacatgtattggtatcaacagaaacctgggtctagcccaaagccgtggatctacagaaccagtaaccttgccagtggggtgccagcccgcttcagcggtagtggcagtggaacttcctatagcctcacaataagcaacatggaggctgaagatgccgctgcctattactgccagcagtaccacagttacccaaccacgttcggcgggggaactaagctcgaagtaaaactcgaggacctgaagaacgtgttcccacctgaggtggccgtgttcgagcctagcgaggccgagatcagccacacccagaaagccaccctcgtgtgcctggctaccggcttctaccccgaccatgtggaactgtcttggtgggtcaacggcaaagaggtgcacagcggcgtgtgtaccgacccccagccactgaaagaacagcccgccctgaacgacagccggtactgcctgagcagcagactgagagtgtccgccaccttctggcagaacccccggaaccacttcagatgccaggtgcagttctacggcctgagcgagaacgacgagtggacccaggacagagccaagcccgtgacccagatcgtgtctgccgaagcctggggcagagccgattgcggctttaccagcgagagctaccagcagggcgtgctgagcgccaccaacctgagcgtgatcggcttcagaatcctgctgctgaaagtggccggctttaacctgctgatgaccctgcggctgtggtccagcagggccaagcgatctggatctggagcaacaaacttctcactactcaaacaagcaggtgacgtggaggagaatcccgggcctactagtatggactggatttggcgcatccttttccttgtcggcgctgctaccggcgcgcattccttcgaagaggtgcagctggtggaatctgggggcggcctggtccaacctaagggatcactcaagctctcttgtgcggccagcggattctctttcaatacctatgctatgaattgggtgagacaggcgcccggaaagggcctcgaatggatagcccatatccggtcaaaatcaaacaatttcgcaacctactatgcggactccgtgaaggaccgattttccatctcccgagatgcctccgagaatattctgttcctgcagatgaataacctcaagacagaggacaccgccatgtactactgtgtgcgccagggcggtgactttcccatggattactgggggcaggggaccagcgtgaccgtgagctctacgcgtatccagaaccctgatcctgccgtgtaccagctgcgggatagcaagagcagcgacaagagcgtgtgtctgttcaccgacttcgacagccagaccaacgtgtcccagagcaaggactccgacgtgtacatcaccgataagtgcgtgctggacatgcggagcatggacttcaagagcaactccgccgtggcctggtccaacaagtccgatttcgcctgcgccaacgccttcaacaacagcattatccccgaggacacattcttcccaagccccgagagcagctgcgacgtgaagctggtggaaaagagcttcgagacagacaccaacctgaacttccagatcctgtacgagatcctgctgggcaaggccaccctgtacgccgtgctggtgtctgccctggtgctgatggctatggtcaagcggaaggacagccgggga

SEQ ID NO: 5376 - DNA, 2262 bp, synthetic construct
  source 1..2262: mol_type = other DNA
atggccttaccagtgaccgccttgctcctgccgctggccttgctgctccacgccgccaggccggaagtgcagctggttgaatctggcggaggactggttcagcctggcggatctctgagactgtcttgtgccgccagcggcttcagcttcagcgacttttggatgagctgggtccgacaggcccctggcaaaggacttgaatgggtcgccacaatcagccaggccggcagcgagaaggactacgtggactctgtgaagggcagattcaccatcagccgggacaacgccaagaagtccctgtacctccagatgaacagcctgagagccgaggacaccgccgtgtactattgtgcctctggcgtgtacagcttcgactacagaggccagggcaccctggtcacagtctcttctggtaccggcggaggcggatctggcggcggaggtagcggtggcggaggatctgaattcgacgacatccagatgacccagagcagcagcagcttcagcgtgagcctgggcgacagagtgaccatcacctgcatggccagcgaggacatctacatcagactggcctggtaccagcagaagcccggcaacgcccccagactgctgatcagcgccgccaccagcctggagaccggcgtgcccagcagattcagcggcagcggcagcggcaaggactacaccctgagcatcaccagcctgcagaccgaggacgtgggcacctactactgccagcagtactggagcagcccctggaccttcggcggcggcaccaagctggagatcaacctcgaggacctgaagaacgtgttcccacctgaggtggccgtgttcgagcctagcgaggccgagatcagccacacccagaaagccaccctcgtgtgcctggctaccggcttctaccccgaccatgtggaactgtcttggtgggtcaacggcaaagaggtgcacagcggcgtgtgtaccgacccccagccactgaaagaacagcccgccctgaacgacagccggtactgcctgagcagcagactgagagtgtccgccaccttctggcagaacccccggaaccacttcagatgccaggtgcagttctacggcctgagcgagaacgacgagtggacccaggacagagccaagcccgtgacccagatcgtgtctgccgaagcctggggcagagccgattgcggctttaccagcgagagctaccagcagggcgtgctgagcgccaccaacctgagcgtgatcggcttcagaatcctgctgctgaaagtggccggctttaacctgctgatgaccctgcggctgtggtccagcagggccaagcgatctggatctggagcaacaaacttctcactactcaaacaagcaggtgacgtggaggagaatcccgggcctactagtatggactggatttggcgcatccttttccttgtcggcgctgctaccggcgcgcattccttcgaagacgtgcagctgcaggagagcggccccggcctggtgaagcccagccagagcctgagcctgacctgcaccgtgaccggctacagcatcaccagcgactacacctggaactggatcagacagttccccggcaacaagctggagtggatgggctacatcacctacagcggcagcaccagctacaaccccagcctgaagagcagaaacagcatcaccagagacaccagcaagaaccagttcttcctgcagctgaacagcgtgaccaccgaggacaccgccacctactactgcgccagactgggcagaagatacacaatggactactggggccagggcaccagcgtgaccgtgagcagcacgcgtatccagaaccctgatcctgccgtgtaccagctgcgggatagcaagagcagcgacaagagcgtgtgtctgttcaccgacttcgacagccagaccaacgtgtcccagagcaaggactccgacgtgtacatcaccgataagtgcgtgctggacatgcggagcatggacttcaagagcaactccgccgtggcctggtccaacaagtccgatttcgcctgcgccaacgccttcaacaacagcattatccccgaggacacattcttcccaagccccgagagcagctgcgacgtgaagctggtggaaaagagcttcgagacagacaccaacctgaacttccagatcctgtacgagatcctgctgggcaaggccaccctgtacgccgtgctggtgtctgccctggtgctgatggctatggtcaagcggaaggacagccgggga

SEQ ID NO: 5377 - DNA, 2271 bp, synthetic construct
  source 1..2271: mol_type = other DNA
atggccttaccagtgaccgccttgctcctgccgctggccttgctgctccacgccgccaggccggaagtgcagctggttgaatctggcggaggactggttcagcctggcggatctctgagactgtcttgtgccgccagcggcttcagcttcagcgacttttggatgagctgggtccgacaggcccctggcaaaggacttgaatgggtcgccacaatcagccaggccggcagcgagaaggactacgtggactctgtgaagggcagattcaccatcagccgggacaacgccaagaagtccctgtacctccagatgaacagcctgagagccgaggacaccgccgtgtactattgtgcctctggcgtgtacagcttcgactacagaggccagggcaccctggtcacagtctcttctggtaccggcggaggcggatctggcggcggaggtagcggtggcggaggatctgaattcgacgacatccagatgacccagagccccagcagcctgtctgccagcgtgggcgacagagtgaccatcacctgtagagccagccagagcatcagcagctacctgaactggtatcagcagaagcccggcaaggcccccaaactgctgatctacgacgccagcaacctggaaaccggcgtgcccagcagattttccggcagcggctctggcaccgacttcaccttcaccatcagctccctccagcccgaggacattgccacctactactgccagcagtacgacaacctgcccctgacctttggcggaggcaccaaggtggacatcaagagactcgaggacctgaagaacgtgttcccacctgaggtggccgtgttcgagcctagcgaggccgagatcagccacacccagaaagccaccctcgtgtgcctggctaccggcttctaccccgaccatgtggaactgtcttggtgggtcaacggcaaagaggtgcacagcggcgtgtgtaccgacccccagccactgaaagaacagcccgccctgaacgacagccggtactgcctgagcagcagactgagagtgtccgccaccttctggcagaacccccggaaccacttcagatgccaggtgcagttctacggcctgagcgagaacgacgagtggacccaggacagagccaagcccgtgacccagatcgtgtctgccgaagcctggggcagagccgattgcggctttaccagcgagagctaccagcagggcgtgctgagcgccaccaacctgagcgtgatcggcttcagaatcctgctgctgaaagtggccggctttaacctgctgatgaccctgcggctgtggtccagcagggccaagcgatctggatctggagcaacaaacttctcactactcaaacaagcaggtgacgtggaggagaatcccgggcctactagtatggactggatttggcgcatccttttccttgtcggcgctgctaccggcgcgcattccttcgaacaggtgcaactggtggaatctggcggcggagtggtgcagcctggcagaagcctgagactgagctgtgccgccagcggcttcacctttagcagctacgccatgcactgggtgcgccaggcccctggaaaaggcctggaatgggtggccgtgatctcctacgacggctccaacaagtattacgccgacagcgtgaagggccggttcaccatctccagagacaacagcaagaacaccctgtacctccagatgaacagcctgcgggccgaggacaccgccgtgtactattgtgccagggctcacaacagcagctcttggagcttcgactactggggccagggcaccctcgtgaccgtgtcatctacgcgtatccagaaccctgatcctgccgtgtaccagctgcgggatagcaagagcagcgacaagagcgtgtgtctgttcaccgacttcgacagccagaccaacgtgtcccagagcaaggactccgacgtgtacatcaccgataagtgcgtgctggacatgcggagcatggacttcaagagcaactccgccgtggcctggtccaacaagtccgatttcgcctgcgccaacgccttcaacaacagcattatccccgaggacacattcttcccaagccccgagagcagctgcgacgtgaagctggtggaaaagagcttcgagacagacaccaacctgaacttccagatcctgtacgagatcctgctgggcaaggccaccctgtacgccgtgctggtgtctgccctggtgctgatggctatggtcaagcggaaggacagccgggga

SEQ ID NO: 5378 - DNA, 2298 bp, synthetic construct
  source 1..2298: mol_type = other DNA
atggccttaccagtgaccgccttgctcctgccgctggccttgctgctccacgccgccaggccggaagtgcagctggttgaatctggcggaggactggttcagcctggcggatctctgagactgtcttgtgccgccagcggcttcagcttcagcgacttttggatgagctgggtccgacaggcccctggcaaaggacttgaatgggtcgccacaatcagccaggccggcagcgagaaggactacgtggactctgtgaagggcagattcaccatcagccgggacaacgccaagaagtccctgtacctccagatgaacagcctgagagccgaggacaccgccgtgtactattgtgcctctggcgtgtacagcttcgactacagaggccagggcaccctggtcacagtctcttctggtaccggcggaggcggatctggcggcggaggtagcggtggcggaggatctgaattcgacgacgtcgtgatgacccagagccctctgagcctgcctgtgtccctgggcgatcaggccagcatctcctgcagatccagccagagactggtgcacagcaacggcaacacctacctgcactggtatctgcagaagcccggccagagccccaagctgctgatctaccgggtgtccaacagattccccggcgtgcccgatagattcagcggctctggcagcggcaccgacttcaccctgaagatcagccgggtggaagccgaggacctgggcatctatttctgcagccagagcacccacgtgccctacacctttggcggaggcaccaagctggaaatcaagcggctcgaggacctgaagaacgtgttcccacctgaggtggccgtgttcgagcctagcgaggccgagatcagccacacccagaaagccaccctcgtgtgcctggctaccggcttctaccccgaccatgtggaactgtcttggtgggtcaacggcaaagaggtgcacagcggcgtgtgtaccgacccccagccactgaaagaacagcccgccctgaacgacagccggtactgcctgagcagcagactgagagtgtccgccaccttctggcagaacccccggaaccacttcagatgccaggtgcagttctacggcctgagcgagaacgacgagtggacccaggacagagccaagcccgtgacccagatcgtgtctgccgaagcctggggcagagccgattgcggctttaccagcgagagctaccagcagggcgtgctgagcgccaccaacctgagcgtgatcggcttcagaatcctgctgctgaaagtggccggctttaacctgctgatgaccctgcggctgtggtccagcagggccaagcgatctggatctggagcaacaaacttctcactactcaaacaagcaggtgacgtggaggagaatcccgggcctactagtatggactggatttggcgcatccttttccttgtcggcgctgctaccggcgcgcattccttcgaagaagtgcggctgcagcagtctggccccgacctgattaagcctggggccagcgtgaagatgagctgcaaggccagcggctacaccttcaccggctacgtgatgcactgggtcaagcagaggccaggccagggcctggaatggatcggcttcatcaacccctacaacgacgacatccagagcaacgagcggttccggggcaaggccaccctgaccagcgataagagcagcaccaccgcctacatggaactgagcagcctgacctccgaggacagcgccgtgtactactgtgctaggggagccggctacaacttcgacggggcctacagattcttcgacttttggggccagggcaccacactgaccgtgtcctctacgcgtatccagaaccctgatcctgccgtgtaccagctgcgggatagcaagagcagcgacaagagcgtgtgtctgttcaccgacttcgacagccagaccaacgtgtcccagagcaaggactccgacgtgtacatcaccgataagtgcgtgctggacatgcggagcatggacttcaagagcaactccgccgtggcctggtccaacaagtccgatttcgcctgcgccaacgccttcaacaacagcattatccccgaggacacattcttcccaagccccgagagcagctgcgacgtgaagctggtggaaaagagcttcgagacagacaccaacctgaacttccagatcctgtacgagatcctgctgggcaaggccaccctgtacgccgtgctggtgtctgccctggtgctgatggctatggtcaagcggaaggacagccgggga

SEQ ID NO: 5379 - DNA, 2271 bp, synthetic construct
  source 1..2271: mol_type = other DNA
atggccttaccagtgaccgccttgctcctgccgctggccttgctgctccacgccgccaggccggaagtgcagctggttgaatctggcggaggactggttcagcctggcggatctctgagactgtcttgtgccgccagcggcttcagcttcagcgacttttggatgagctgggtccgacaggcccctggcaaaggacttgaatgggtcgccacaatcagccaggccggcagcgagaaggactacgtggactctgtgaagggcagattcaccatcagccgggacaacgccaagaagtccctgtacctccagatgaacagcctgagagccgaggacaccgccgtgtactattgtgcctctggcgtgtacagcttcgactacagaggccagggcaccctggtcacagtctcttctggtaccggcggaggcggatctggcggcggaggtagcggtggcggaggatctgaattcgacagctacgagctgacccagcctcctagcgtgtccgtgtctcctggacagaccgccaccatctcttgcagcggcgatcaactgggcgggaagtacggccactggtatcagaagaagcccggccagagccccgtgctggtgctgtaccaggacagaaaacggcctgccggcatccccgagagattcagcggaagcagcagcggcaacaccatcaccctgaccatcagcggcacccaggccgtggatgaggccgactactactgccaggcttgggacaccaatctgggcggcgtgttcggcggaggcaccaaagtgacagtgctgggacagctcgaggacctgaagaacgtgttcccacctgaggtggccgtgttcgagcctagcgaggccgagatcagccacacccagaaagccaccctcgtgtgcctggctaccggcttctaccccgaccatgtggaactgtcttggtgggtcaacggcaaagaggtgcacagcggcgtgtgtaccgacccccagccactgaaagaacagcccgccctgaacgacagccggtactgcctgagcagcagactgagagtgtccgccaccttctggcagaacccccggaaccacttcagatgccaggtgcagttctacggcctgagcgagaacgacgagtggacccaggacagagccaagcccgtgacccagatcgtgtctgccgaagcctggggcagagccgattgcggctttaccagcgagagctaccagcagggcgtgctgagcgccaccaacctgagcgtgatcggcttcagaatcctgctgctgaaagtggccggctttaacctgctgatgaccctgcggctgtggtccagcagggccaagcgatctggatctggagcaacaaacttctcactactcaaacaagcaggtgacgtggaggagaatcccgggcctactagtatggactggatttggcgcatccttttccttgtcggcgctgctaccggcgcgcattccttcgaacaggtgcaactggtggaaagcggagccgaagtgaagaaacctggggccagcgtgaaggtgtcctgcaaggccagcggctacacctttaccggctactacatgcactgggtgcgccaggctccaggccagggactggaatggatgggccggatcaaccccaatagcggcggcaccaactacgcccagaaattccagggcagagtgaccatgaccagagacaccagcatcagcaccgcctacatggaactgagccggctgagaagcgacgacaccgccgtgtactactgcgccagccctagaggcagaggcagcgccttcgatatttggggccagggcacactcgtgaccgtgtcctctacgcgtatccagaaccctgatcctgccgtgtaccagctgcgggatagcaagagcagcgacaagagcgtgtgtctgttcaccgacttcgacagccagaccaacgtgtcccagagcaaggactccgacgtgtacatcaccgataagtgcgtgctggacatgcggagcatggacttcaagagcaactccgccgtggcctggtccaacaagtccgatttcgcctgcgccaacgccttcaacaacagcattatccccgaggacacattcttcccaagccccgagagcagctgcgacgtgaagctggtggaaaagagcttcgagacagacaccaacctgaacttccagatcctgtacgagatcctgctgggcaaggccaccctgtacgccgtgctggtgtctgccctggtgctgatggctatggtcaagcggaaggacagccgggga

SEQ ID NO: 5380 - DNA, 2280 bp, synthetic construct
  source 1..2280: mol_type = other DNA
atggccttaccagtgaccgccttgctcctgccgctggccttgctgctccacgccgccaggccggaagtgcagctggttgaatctggcggaggactggttcagcctggcggatctctgagactgtcttgtgccgccagcggcttcagcttcagcgacttttggatgagctgggtccgacaggcccctggcaaaggacttgaatgggtcgccacaatcagccaggccggcagcgagaaggactacgtggactctgtgaagggcagattcaccatcagccgggacaacgccaagaagtccctgtacctccagatgaacagcctgagagccgaggacaccgccgtgtactattgtgcctctggcgtgtacagcttcgactacagaggccagggcaccctggtcacagtctcttctggtaccggcggaggcggatctggcggcggaggtagcggtggcggaggatctgaattcgacaacttcatgctgacccagccccacagcgtgtccgagagccctggcaagaccgtgaccatctcctgcaccagaagcagcggctctatcgccagcaaatacgtgcagtggtatcagcagaggcccggcagcagccctaccaccgtgatctacgaggacaaccagaggcctagcggcgtgcccgatagattcagcggcagcatcgacaccagcagcaacagcgccagcctgaccatcagcggcctgagaacagaggacgaggccgactactactgccacagctacgacagcaacaaccactccgtgttcggcggaggcaccaaagtgacagtgctgggacagctcgaggacctgaagaacgtgttcccacctgaggtggccgtgttcgagcctagcgaggccgagatcagccacacccagaaagccaccctcgtgtgcctggctaccggcttctaccccgaccatgtggaactgtcttggtgggtcaacggcaaagaggtgcacagcggcgtgtgtaccgacccccagccactgaaagaacagcccgccctgaacgacagccggtactgcctgagcagcagactgagagtgtccgccaccttctggcagaacccccggaaccacttcagatgccaggtgcagttctacggcctgagcgagaacgacgagtggacccaggacagagccaagcccgtgacccagatcgtgtctgccgaagcctggggcagagccgattgcggctttaccagcgagagctaccagcagggcgtgctgagcgccaccaacctgagcgtgatcggcttcagaatcctgctgctgaaagtggccggctttaacctgctgatgaccctgcggctgtggtccagcagggccaagcgatctggatctggagcaacaaacttctcactactcaaacaagcaggtgacgtggaggagaatcccgggcctactagtatggactggatttggcgcatccttttccttgtcggcgctgctaccggcgcgcattccttcgaagaagtgcaactggtggaaagcgggggaggcgtggtgcagccaggcggatctctgagactgagctgtgccgccagcggcttcaccttcagcagctacgccatgagctgggtgcgccaggcccctggaaaaggcctggaatgggtgtccgccatctctggctctggcggcagcacctactacgccgatagcgtgaagggccggttcagcatcagccgggacaacagcaagaacaccctgtacctccagatgaacagcctgcgggccgaggacaccgccgtgtactactgtgccagaaccagaagctccggggccttcgacatctggggccagggaacactcgtgaccgtgtcctctacgcgtatccagaaccctgatcctgccgtgtaccagctgcgggatagcaagagcagcgacaagagcgtgtgtctgttcaccgacttcgacagccagaccaacgtgtcccagagcaaggactccgacgtgtacatcaccgataagtgcgtgctggacatgcggagcatggacttcaagagcaactccgccgtggcctggtccaacaagtccgatttcgcctgcgccaacgccttcaacaacagcattatccccgaggacacattcttcccaagccccgagagcagctgcgacgtgaagctggtggaaaagagcttcgagacagacaccaacctgaacttccagatcctgtacgagatcctgctgggcaaggccaccctgtacgccgtgctggtgtctgccctggtgctgatggctatggtcaagcggaaggacagccgggga

SEQ ID NO: 5381 - DNA, 2265 bp, synthetic construct
  source 1..2265: mol_type = other DNA
atggccttaccagtgaccgccttgctcctgccgctggccttgctgctccacgccgccaggccggaagtgcagctggttgaatctggcggaggactggttcagcctggcggatctctgagactgtcttgtgccgccagcggcttcagcttcagcgacttttggatgagctgggtccgacaggcccctggcaaaggacttgaatgggtcgccacaatcagccaggccggcagcgagaaggactacgtggactctgtgaagggcagattcaccatcagccgggacaacgccaagaagtccctgtacctccagatgaacagcctgagagccgaggacaccgccgtgtactattgtgcctctggcgtgtacagcttcgactacagaggccagggcaccctggtcacagtctcttctggtaccggcggaggcggatctggcggcggaggtagcggtggcggaggatctgaattcgacatccagatgaaccagagccccagcagcctgagcgccagcctgggcgataccatcaccatcacctgtcacgccagccagaacatcaacgtgtggctgagctggtatcagcagaagcccggcaacatccccaagctgctgatctacaaggccagcaacctgcacaccggcgtgcccagcagattttctggcagcggctctggcaccggcttcaccattaccatcagctccctccagcccgaggacattgccacctactactgccagcagggccagagctacccctggacatttggcggaggcaccaagctggaaatcaagagactcgaggacctgaagaacgtgttcccacctgaggtggccgtgttcgagcctagcgaggccgagatcagccacacccagaaagccaccctcgtgtgcctggctaccggcttctaccccgaccatgtggaactgtcttggtgggtcaacggcaaagaggtgcacagcggcgtgtgtaccgacccccagccactgaaagaacagcccgccctgaacgacagccggtactgcctgagcagcagactgagagtgtccgccaccttctggcagaacccccggaaccacttcagatgccaggtgcagttctacggcctgagcgagaacgacgagtggacccaggacagagccaagcccgtgacccagatcgtgtctgccgaagcctggggcagagccgattgcggctttaccagcgagagctaccagcagggcgtgctgagcgccaccaacctgagcgtgatcggcttcagaatcctgctgctgaaagtggccggctttaacctgctgatgaccctgcggctgtggtccagcagggccaagcgatctggatctggagcaacaaacttctcactactcaaacaagcaggtgacgtggaggagaatcccgggcctactagtatggactggatttggcgcatccttttccttgtcggcgctgctaccggcgcgcattccttcgaagaagtgcaactccagcagagcggcccagagcttgtgaagcctggcgcttccgtgaagattagctgcaaagccagcggctacagcttcaccggctacttcatgaactgggtcaagcagagccacggcaagagcctggagtacatcggcagattcaacccctacaacggcgagacactgtacaaccagaagttcaagggcaaggccaccctgaccgtggacaagagcagcagcaccgtgcacatggaactgctgagcgtgaccagcgaggacagcgccgtgtactactgtggcagaagcggcaacgacgacgctatggactattggggccagggcaccagcgtgaccgtgtctagtgctacgcgtatccagaaccctgatcctgccgtgtaccagctgcgggatagcaagagcagcgacaagagcgtgtgtctgttcaccgacttcgacagccagaccaacgtgtcccagagcaaggactccgacgtgtacatcaccgataagtgcgtgctggacatgcggagcatggacttcaagagcaactccgccgtggcctggtccaacaagtccgatttcgcctgcgccaacgccttcaacaacagcattatccccgaggacacattcttcccaagccccgagagcagctgcgacgtgaagctggtggaaaagagcttcgagacagacaccaacctgaacttccagatcctgtacgagatcctgctgggcaaggccaccctgtacgccgtgctggtgtctgccctggtgctgatggctatggtcaagcggaaggacagccgggga

SEQ ID NO: 5382 - DNA, 2268 bp, synthetic construct
  source 1..2268: mol_type = other DNA
atggccttaccagtgaccgccttgctcctgccgctggccttgctgctccacgccgccaggccggaagtgcagctggttgaatctggcggaggactggttcagcctggcggatctctgagactgtcttgtgccgccagcggcttcagcttcagcgacttttggatgagctgggtccgacaggcccctggcaaaggacttgaatgggtcgccacaatcagccaggccggcagcgagaaggactacgtggactctgtgaagggcagattcaccatcagccgggacaacgccaagaagtccctgtacctccagatgaacagcctgagagccgaggacaccgccgtgtactattgtgcctctggcgtgtacagcttcgactacagaggccagggcaccctggtcacagtctcttctggtaccggcggaggcggatctggcggcggaggtagcggtggcggaggatctgaattcgagatcgtgctgacacagagccctgccaccctgtctctgagccctggcgaaagagccaccctgagctgtagagccagccagagcgtgcggagctacctggcctggtatcagcagaagcctggacaggcccccagactgctgatctacgacgccagcaatcgggccacaggcatccccgccagattttctggctctggcagcggcaccgacttcaccctgacaatcagcagcctggaacccgaggacttcgccgtgtactactgccagcagcggagcaactggccccctacctttggacagggcaccaaggtggaaatcaagctcgaggacctgaagaacgtgttcccacctgaggtggccgtgttcgagcctagcgaggccgagatcagccacacccagaaagccaccctcgtgtgcctggctaccggcttctaccccgaccatgtggaactgtcttggtgggtcaacggcaaagaggtgcacagcggcgtgtgtaccgacccccagccactgaaagaacagcccgccctgaacgacagccggtactgcctgagcagcagactgagagtgtccgccaccttctggcagaacccccggaaccacttcagatgccaggtgcagttctacggcctgagcgagaacgacgagtggacccaggacagagccaagcccgtgacccagatcgtgtctgccgaagcctggggcagagccgattgcggctttaccagcgagagctaccagcagggcgtgctgagcgccaccaacctgagcgtgatcggcttcagaatcctgctgctgaaagtggccggctttaacctgctgatgaccctgcggctgtggtccagcagggccaagcgatctggatctggagcaacaaacttctcactactcaaacaagcaggtgacgtggaggagaatcccgggcctactagtatggactggatttggcgcatccttttccttgtcggcgctgctaccggcgcgcattccttcgaacaactccaggtgcaggaatctggccccggactcgtgaagcccagcgagacactgagcctgacctgtaccgtgtccggcggcagcatcagcaacagctacttctcctggggctggatcagacagccccctggcaagggcctggaatggatcggcagcttctactacggcgagaaaacctactacaaccccagcctgaagtccagagccaccatcagcatcgacaccagcaagagccagttctccctgaagctgagcagcgtgacagccgccgacaccgccgtgtattattgccccagaggccccaccatgatccggggcgtgatcgactcttggggccagggaacactcgtgaccgtgtcctctacgcgtatccagaaccctgatcctgccgtgtaccagctgcgggatagcaagagcagcgacaagagcgtgtgtctgttcaccgacttcgacagccagaccaacgtgtcccagagcaaggactccgacgtgtacatcaccgataagtgcgtgctggacatgcggagcatggacttcaagagcaactccgccgtggcctggtccaacaagtccgatttcgcctgcgccaacgccttcaacaacagcattatccccgaggacacattcttcccaagccccgagagcagctgcgacgtgaagctggtggaaaagagcttcgagacagacaccaacctgaacttccagatcctgtacgagatcctgctgggcaaggccaccctgtacgccgtgctggtgtctgccctggtgctgatggctatggtcaagcggaaggacagccgggga

SEQ ID NO: 5383 - DNA, 2295 bp, synthetic construct
  source 1..2295: mol_type = other DNA
atggccttaccagtgaccgccttgctcctgccgctggccttgctgctccacgccgccaggccggaagtgcagctggttgaatctggcggaggactggttcagcctggcggatctctgagactgtcttgtgccgccagcggcttcagcttcagcgacttttggatgagctgggtccgacaggcccctggcaaaggacttgaatgggtcgccacaatcagccaggccggcagcgagaaggactacgtggactctgtgaagggcagattcaccatcagccgggacaacgccaagaagtccctgtacctccagatgaacagcctgagagccgaggacaccgccgtgtactattgtgcctctggcgtgtacagcttcgactacagaggccagggcaccctggtcacagtctcttctggtaccggcggaggcggatctggcggcggaggtagcggtggcggaggatctgaattcgacatcgtgatgacccagacccccctgagcctgcctgtgacacctggcgagcctgccagcatctcctgcagaagcagcagaagcctgctggacagcgacgacggcaacacctacctggactggtatctgcagaaacccggccagagcccccaactgctgatctacaccctgagctacagagccagcggcgtgcccgatagattttccggctctggcagcggcaccgacttcaccctgaagatcagccgggtggaagccgaggacgtgggcgtgtactactgtatgcagcgggtggaatttcccatcaccttcggccagggcaccagactggaaatcaagagactcgaggacctgaagaacgtgttcccacctgaggtggccgtgttcgagcctagcgaggccgagatcagccacacccagaaagccaccctcgtgtgcctggctaccggcttctaccccgaccatgtggaactgtcttggtgggtcaacggcaaagaggtgcacagcggcgtgtgtaccgacccccagccactgaaagaacagcccgccctgaacgacagccggtactgcctgagcagcagactgagagtgtccgccaccttctggcagaacccccggaaccacttcagatgccaggtgcagttctacggcctgagcgagaacgacgagtggacccaggacagagccaagcccgtgacccagatcgtgtctgccgaagcctggggcagagccgattgcggctttaccagcgagagctaccagcagggcgtgctgagcgccaccaacctgagcgtgatcggcttcagaatcctgctgctgaaagtggccggctttaacctgctgatgaccctgcggctgtggtccagcagggccaagcgatctggatctggagcaacaaacttctcactactcaaacaagcaggtgacgtggaggagaatcccgggcctactagtatggactggatttggcgcatccttttccttgtcggcgctgctaccggcgcgcattccttcgaacaggtgcaactggtggaatctggcgggggagtggtgcagcctggcagatccctgagactgagctgtgccgccagcggcttcatcttcagcagatacggaatgcactgggtgcgccaggcccctggcaagggactgaaatgggtggccgtgatttggtacgacggcagcaacaagctgtacgccgacagcgtgaagggccggttcaccatcagcagagacaacagcaagaacaccctgtacctgcagatgaacagcctgcgggccgaggacaccgccgtgtactattgcgccagagactactacgacaacagccggcaccactggggcttcgactattggggccagggaacccttgtgaccgtgtcctctacgcgtatccagaaccctgatcctgccgtgtaccagctgcgggatagcaagagcagcgacaagagcgtgtgtctgttcaccgacttcgacagccagaccaacgtgtcccagagcaaggactccgacgtgtacatcaccgataagtgcgtgctggacatgcggagcatggacttcaagagcaactccgccgtggcctggtccaacaagtccgatttcgcctgcgccaacgccttcaacaacagcattatccccgaggacacattcttcccaagccccgagagcagctgcgacgtgaagctggtggaaaagagcttcgagacagacaccaacctgaacttccagatcctgtacgagatcctgctgggcaaggccaccctgtacgccgtgctggtgtctgccctggtgctgatggctatggtcaagcggaaggacagccgggga

SEQ ID NO: 5384 - DNA, 2265 bp, synthetic construct
  source 1..2265: mol_type = other DNA
atggccttaccagtgaccgccttgctcctgccgctggccttgctgctccacgccgccaggccggaagtgcagctggttgaatctggcggaggactggttcagcctggcggatctctgagactgtcttgtgccgccagcggcttcagcttcagcgacttttggatgagctgggtccgacaggcccctggcaaaggacttgaatgggtcgccacaatcagccaggccggcagcgagaaggactacgtggactctgtgaagggcagattcaccatcagccgggacaacgccaagaagtccctgtacctccagatgaacagcctgagagccgaggacaccgccgtgtactattgtgcctctggcgtgtacagcttcgactacagaggccagggcaccctggtcacagtctcttctggtaccggcggaggcggatctggcggcggaggtagcggtggcggaggatctgaattcgagatccagatgacccagagccccagcagcatgtctgccagcctgggcgacaccatcaccatcacatgccaggccacccaggacatcttcaagaacctgaactggtatcagcagaagcccggcaagccccccagcctgctgatctactatgccaccgaactggccgagggcgtgcccagcagattttctggcagcggcagcggctccgactacagcctgaccatcagcaacctggaaagcgaggacttcgccgcctactactgcctccagttcttcgagttcccattcaccttcggctccggcaccaagctggaaatgaagctcgaggacctgaagaacgtgttcccacctgaggtggccgtgttcgagcctagcgaggccgagatcagccacacccagaaagccaccctcgtgtgcctggctaccggcttctaccccgaccatgtggaactgtcttggtgggtcaacggcaaagaggtgcacagcggcgtgtgtaccgacccccagccactgaaagaacagcccgccctgaacgacagccggtactgcctgagcagcagactgagagtgtccgccaccttctggcagaacccccggaaccacttcagatgccaggtgcagttctacggcctgagcgagaacgacgagtggacccaggacagagccaagcccgtgacccagatcgtgtctgccgaagcctggggcagagccgattgcggctttaccagcgagagctaccagcagggcgtgctgagcgccaccaacctgagcgtgatcggcttcagaatcctgctgctgaaagtggccggctttaacctgctgatgaccctgcggctgtggtccagcagggccaagcgatctggatctggagcaacaaacttctcactactcaaacaagcaggtgacgtggaggagaatcccgggcctactagtatggactggatttggcgcatccttttccttgtcggcgctgctaccggcgcgcattccttcgaacaggtgcaactccagcagtctggcgctgagcttgtgcggcctggcacctctgtgaaggtgtcctgtaaagccagcggctacgtgttcaccaactactggatcgagtggatcaagcagcggccaggccagggcctggaatggatcggcgtgatgaatccaggcagcggcgagacaacctacaacgagaagttcaagggcaaggccaccctgaccgccgacaagagcagcagcacagcctacatgcaactgtcctccctgaccagcgtggacagcgccgtgtacttctgcgccagggaccacgaccgggactactacgctatggactactggggccagggcaccagcgtgaccgtgtcatctacgcgtatccagaaccctgatcctgccgtgtaccagctgcgggatagcaagagcagcgacaagagcgtgtgtctgttcaccgacttcgacagccagaccaacgtgtcccagagcaaggactccgacgtgtacatcaccgataagtgcgtgctggacatgcggagcatggacttcaagagcaactccgccgtggcctggtccaacaagtccgatttcgcctgcgccaacgccttcaacaacagcattatccccgaggacacattcttcccaagccccgagagcagctgcgacgtgaagctggtggaaaagagcttcgagacagacaccaacctgaacttccagatcctgtacgagatcctgctgggcaaggccaccctgtacgccgtgctggtgtctgccctggtgctgatggctatggtcaagcggaaggacagccgggga

SEQ ID NO: 5385 - DNA, 2256 bp, synthetic construct
  source 1..2256: mol_type = other DNA
atggccttaccagtgaccgccttgctcctgccgctggccttgctgctccacgccgccaggccggaagtgcagctggttgaatctggcggaggactggttcagcctggcggatctctgagactgtcttgtgccgccagcggcttcagcttcagcgacttttggatgagctgggtccgacaggcccctggcaaaggacttgaatgggtcgccacaatcagccaggccggcagcgagaaggactacgtggactctgtgaagggcagattcaccatcagccgggacaacgccaagaagtccctgtacctccagatgaacagcctgagagccgaggacaccgccgtgtactattgtgcctctggcgtgtacagcttcgactacagaggccagggcaccctggtcacagtctcttctggtaccggcggaggcggatctggcggcggaggtagcggtggcggaggatctgaattcgacatcctgctgacacagagccccgccatcctgtccgtgtctccaggcgagagagtgtcctttagctgccgggccagccagaacatcggcaccagcatccactggtatcagcagcggaccaacggcagccccagactgctgattaagtacgccagcgagtccgtgtccggcatccccagcagattttctggcagcggctccggcaccgacttcaccctgagcatcaacagcgtggaaagcgaggacattgccgactactactgccagcacaccaatagctggcccaccacctttggcggaggcaccaagctggaaatcaagagactcgaggacctgaagaacgtgttcccacctgaggtggccgtgttcgagcctagcgaggccgagatcagccacacccagaaagccaccctcgtgtgcctggctaccggcttctaccccgaccatgtggaactgtcttggtgggtcaacggcaaagaggtgcacagcggcgtgtgtaccgacccccagccactgaaagaacagcccgccctgaacgacagccggtactgcctgagcagcagactgagagtgtccgccaccttctggcagaacccccggaaccacttcagatgccaggtgcagttctacggcctgagcgagaacgacgagtggacccaggacagagccaagcccgtgacccagatcgtgtctgccgaagcctggggcagagccgattgcggctttaccagcgagagctaccagcagggcgtgctgagcgccaccaacctgagcgtgatcggcttcagaatcctgctgctgaaagtggccggctttaacctgctgatgaccctgcggctgtggtccagcagggccaagcgatctggatctggagcaacaaacttctcactactcaaacaagcaggtgacgtggaggagaatcccgggcctactagtatggactggatttggcgcatccttttccttgtcggcgctgctaccggcgcgcattccttcgaacaggtgcaactccagcagtccgacgccgagcttgtgaagcctggcgcttccgtgaagattagctgcaaggccagcggctacaccttcaccgaccacgccattcactgggtcaagcagaagcccgagcagggcctggaatggatcggctacttcagccccggcaacggcgacatcaagtacaacgagaagttcaagggcaaggccaccctgaccgccgacaagagcagcagcacagcctacatgcaactgaacagcctgaccagcgaggactccgccgtgtacttctgcaagcggagctacggcaactacgactactggggccagggcaccacactgaccgtgtctagtacgcgtatccagaaccctgatcctgccgtgtaccagctgcgggatagcaagagcagcgacaagagcgtgtgtctgttcaccgacttcgacagccagaccaacgtgtcccagagcaaggactccgacgtgtacatcaccgataagtgcgtgctggacatgcggagcatggacttcaagagcaactccgccgtggcctggtccaacaagtccgatttcgcctgcgccaacgccttcaacaacagcattatccccgaggacacattcttcccaagccccgagagcagctgcgacgtgaagctggtggaaaagagcttcgagacagacaccaacctgaacttccagatcctgtacgagatcctgctgggcaaggccaccctgtacgccgtgctggtgtctgccctggtgctgatggctatggtcaagcggaaggacagccgggga

SEQ ID NO: 5386 - DNA, 2271 bp, synthetic construct
  source 1..2271: mol_type = other DNA
atggccttaccagtgaccgccttgctcctgccgctggccttgctgctccacgccgccaggccggaagtgcagctggttgaatctggcggaggactggttcagcctggcggatctctgagactgtcttgtgccgccagcggcttcagcttcagcgacttttggatgagctgggtccgacaggcccctggcaaaggacttgaatgggtcgccacaatcagccaggccggcagcgagaaggactacgtggactctgtgaagggcagattcaccatcagccgggacaacgccaagaagtccctgtacctccagatgaacagcctgagagccgaggacaccgccgtgtactattgtgcctctggcgtgtacagcttcgactacagaggccagggcaccctggtcacagtctcttctggtaccggcggaggcggatctggcggcggaggtagcggtggcggaggatctgaattcgacatcgtgatgacccagagccccgatagcctggccgtgtctctgggagagagagccaccatcaactgcaagagcagccagagcctgctgaacagcggcgaccagaagaactacctgacctggtatcagcagaagcccggccagccccccaagctgctgatctactgggccagcaccagagaaagcggcgtgcccgatagattcagcggcagcggaagtggcaccgacttcaccctgaccatcagttctcttcaggccgaggacgtggccgtgtactactgccagaacgactacagctaccccctgaccttcggccagggcaccaaggtggaaatcaagctcgaggacctgaagaacgtgttcccacctgaggtggccgtgttcgagcctagcgaggccgagatcagccacacccagaaagccaccctcgtgtgcctggctaccggcttctaccccgaccatgtggaactgtcttggtgggtcaacggcaaagaggtgcacagcggcgtgtgtaccgacccccagccactgaaagaacagcccgccctgaacgacagccggtactgcctgagcagcagactgagagtgtccgccaccttctggcagaacccccggaaccacttcagatgccaggtgcagttctacggcctgagcgagaacgacgagtggacccaggacagagccaagcccgtgacccagatcgtgtctgccgaagcctggggcagagccgattgcggctttaccagcgagagctaccagcagggcgtgctgagcgccaccaacctgagcgtgatcggcttcagaatcctgctgctgaaagtggccggctttaacctgctgatgaccctgcggctgtggtccagcagggccaagcgatctggatctggagcaacaaacttctcactactcaaacaagcaggtgacgtggaggagaatcccgggcctactagtatggactggatttggcgcatccttttccttgtcggcgctgctaccggcgcgcattccttcgaacaggtgcagctggtgcagtctggggccgaagtgaagaaaaccggcagcagcgtgaaggtgtcctgcaaggccagcggctacacctttaccgaccacgccattcacgtgtggcggcaggctccaggacaggccctggaatggatgggccacttcagccccggcaacaccgacatcaagtacaacgacaagttcaagggcagagtgaccctgaccgtggaccgcagcatgagcaccgcctacatggaactgagcagcctgcggagcgaggacaccgccatgtactattgcaagaccagcaccttctttttcgactactggggccagggaacaatggtcaccgtgtccagcacgcgtatccagaaccctgatcctgccgtgtaccagctgcgggatagcaagagcagcgacaagagcgtgtgtctgttcaccgacttcgacagccagaccaacgtgtcccagagcaaggactccgacgtgtacatcaccgataagtgcgtgctggacatgcggagcatggacttcaagagcaactccgccgtggcctggtccaacaagtccgatttcgcctgcgccaacgccttcaacaacagcattatccccgaggacacattcttcccaagccccgagagcagctgcgacgtgaagctggtggaaaagagcttcgagacagacaccaacctgaacttccagatcctgtacgagatcctgctgggcaaggccaccctgtacgccgtgctggtgtctgccctggtgctgatggctatggtcaagcggaaggacagccgggga

SEQ ID NO: 5387 - DNA, 2268 bp, synthetic construct
  source 1..2268: mol_type = other DNA
atggccttaccagtgaccgccttgctcctgccgctggccttgctgctccacgccgccaggccggaagtgcagctggttgaatctggcggaggactggttcagcctggcggatctctgagactgtcttgtgccgccagcggcttcagcttcagcgacttttggatgagctgggtccgacaggcccctggcaaaggacttgaatgggtcgccacaatcagccaggccggcagcgagaaggactacgtggactctgtgaagggcagattcaccatcagccgggacaacgccaagaagtccctgtacctccagatgaacagcctgagagccgaggacaccgccgtgtactattgtgcctctggcgtgtacagcttcgactacagaggccagggcaccctggtcacagtctcttctggtaccggcggaggcggatctggcggcggaggtagcggtggcggaggatctgaattcgacatccagatgacccagagccccagcagcctgtctgccagcgtgggcgacagagtgaccatcacatgcaaggccagccaggacgtgtccattgccgtggcctggtatcagcagaagcccggcaaggcccccaaggtgctgatctacagcgccagctacagatacaccggcgtgcccgacagattcagcggctctggcagcggcaccgacttcaccttcaccatcagctccctccagcccgaggatattgccgtgtactactgccagcagcactacatcacccccctgacctttggcggaggcaccaaggtggaaatcaagctcgaggacctgaagaacgtgttcccacctgaggtggccgtgttcgagcctagcgaggccgagatcagccacacccagaaagccaccctcgtgtgcctggctaccggcttctaccccgaccatgtggaactgtcttggtgggtcaacggcaaagaggtgcacagcggcgtgtgtaccgacccccagccactgaaagaacagcccgccctgaacgacagccggtactgcctgagcagcagactgagagtgtccgccaccttctggcagaacccccggaaccacttcagatgccaggtgcagttctacggcctgagcgagaacgacgagtggacccaggacagagccaagcccgtgacccagatcgtgtctgccgaagcctggggcagagccgattgcggctttaccagcgagagctaccagcagggcgtgctgagcgccaccaacctgagcgtgatcggcttcagaatcctgctgctgaaagtggccggctttaacctgctgatgaccctgcggctgtggtccagcagggccaagcgatctggatctggagcaacaaacttctcactactcaaacaagcaggtgacgtggaggagaatcccgggcctactagtatggactggatttggcgcatccttttccttgtcggcgctgctaccggcgcgcattccttcgaacagatccaactggtgcagagcggccacgaagtgaagaaacctggggccagcgtgaaggtgtcctgcaaagccagcggctacacctttaccaactacggcatgaactgggtgcgccaggcccctggacagggcctggaatggatgggctggatcaacaccaagaccggcgagcccacctacgccgaagagttcaagggcagattcgtgttcagcctggaaaccagcgcctccaccgcctacctccagatcagctctctgaaggccgaggacaccgccatgtacttttgcggcagaggcggctacggcagcagctactggtacttcgatgtgtggggccagggcaccaccgtgaccgtgtcatctacgcgtatccagaaccctgatcctgccgtgtaccagctgcgggatagcaagagcagcgacaagagcgtgtgtctgttcaccgacttcgacagccagaccaacgtgtcccagagcaaggactccgacgtgtacatcaccgataagtgcgtgctggacatgcggagcatggacttcaagagcaactccgccgtggcctggtccaacaagtccgatttcgcctgcgccaacgccttcaacaacagcattatccccgaggacacattcttcccaagccccgagagcagctgcgacgtgaagctggtggaaaagagcttcgagacagacaccaacctgaacttccagatcctgtacgagatcctgctgggcaaggccaccctgtacgccgtgctggtgtctgccctggtgctgatggctatggtcaagcggaaggacagccgggga

SEQ ID NO: 5388 - DNA, 2274 bp, synthetic construct
  source 1..2274: mol_type = other DNA
atggccttaccagtgaccgccttgctcctgccgctggccttgctgctccacgccgccaggccggaagtgcagctggttgaatctggcggaggactggttcagcctggcggatctctgagactgtcttgtgccgccagcggcttcagcttcagcgacttttggatgagctgggtccgacaggcccctggcaaaggacttgaatgggtcgccacaatcagccaggccggcagcgagaaggactacgtggactctgtgaagggcagattcaccatcagccgggacaacgccaagaagtccctgtacctccagatgaacagcctgagagccgaggacaccgccgtgtactattgtgcctctggcgtgtacagcttcgactacagaggccagggcaccctggtcacagtctcttctggtaccggcggaggcggatctggcggcggaggtagcggtggcggaggatctgaattcgacatcgtgatgacccagagccccgatagcctggccgtgtctctgggagagagagccaccatcaactgccgggccagcaagagcgtgtccaccagcggctacagctacatgcactggtatcagcagaagcccggccagccccccaagctgctgatctacctggcctccaacctggaaagcggcgtgcccgatagattcagcggcagcggctctggcaccgacttcaccctgaccatcagttctcttcaggccgaggacgtggccgtgtactactgccagcacagcagagagctgccctacaccttcggccagggcaccaagctggaaatcaagctcgaggacctgaagaacgtgttcccacctgaggtggccgtgttcgagcctagcgaggccgagatcagccacacccagaaagccaccctcgtgtgcctggctaccggcttctaccccgaccatgtggaactgtcttggtgggtcaacggcaaagaggtgcacagcggcgtgtgtaccgacccccagccactgaaagaacagcccgccctgaacgacagccggtactgcctgagcagcagactgagagtgtccgccaccttctggcagaacccccggaaccacttcagatgccaggtgcagttctacggcctgagcgagaacgacgagtggacccaggacagagccaagcccgtgacccagatcgtgtctgccgaagcctggggcagagccgattgcggctttaccagcgagagctaccagcagggcgtgctgagcgccaccaacctgagcgtgatcggcttcagaatcctgctgctgaaagtggccggctttaacctgctgatgaccctgcggctgtggtccagcagggccaagcgatctggatctggagcaacaaacttctcactactcaaacaagcaggtgacgtggaggagaatcccgggcctactagtatggactggatttggcgcatccttttccttgtcggcgctgctaccggcgcgcattccttcgaacaggtgcaactccaggaatctggccctggccttgtgaagcccagcgagacactgagcctgacctgtaccgtgtccggcggcagcatcagctcttacggcgtgcactggattcggcagcctccaggcaagggcctggaatggatcggcgtgatctggacctccggcgtgaccgactacaacagcgccctgatgggcagagtgaccatctccgtggacaccagcaagaaccagttcagcctgaagctgagcagcgtgacagccgccgataccgccgtgtattattgcgccagagatggcgactacgaccgctacacaatggactactggggccagggaacccttgtgaccgtgtcctctacgcgtatccagaaccctgatcctgccgtgtaccagctgcgggatagcaagagcagcgacaagagcgtgtgtctgttcaccgacttcgacagccagaccaacgtgtcccagagcaaggactccgacgtgtacatcaccgataagtgcgtgctggacatgcggagcatggacttcaagagcaactccgccgtggcctggtccaacaagtccgatttcgcctgcgccaacgccttcaacaacagcattatccccgaggacacattcttcccaagccccgagagcagctgcgacgtgaagctggtggaaaagagcttcgagacagacaccaacctgaacttccagatcctgtacgagatcctgctgggcaaggccaccctgtacgccgtgctggtgtctgccctggtgctgatggctatggtcaagcggaaggacagccgggga

SEQ ID NO: 5389 - DNA, 2274 bp, synthetic construct
  source 1..2274: mol_type = other DNA
atggccttaccagtgaccgccttgctcctgccgctggccttgctgctccacgccgccaggccggaagtgcagctggttgaatctggcggaggactggttcagcctggcggatctctgagactgtcttgtgccgccagcggcttcagcttcagcgacttttggatgagctgggtccgacaggcccctggcaaaggacttgaatgggtcgccacaatcagccaggccggcagcgagaaggactacgtggactctgtgaagggcagattcaccatcagccgggacaacgccaagaagtccctgtacctccagatgaacagcctgagagccgaggacaccgccgtgtactattgtgcctctggcgtgtacagcttcgactacagaggccagggcaccctggtcacagtctcttctggtaccggcggaggcggatctggcggcggaggtagcggtggcggaggatctgaattcgacatccagatgacccagagccccagcagcctgtctgccagcgtgggcgacagagtgaccatcacctgtagagccagccagagcatcggcaccagcctgcactggtatcagcagaagcctggcaaggcccccaagctgctgattaagttcgccagcagactgcagagcggcgtgcccagcagattttctggcagcggctccggcaccgacttcaccctgacaatcagctccctgcagcccgaggacttcgccacctactactgccagcagagccccggcttccctccaacctttggacagggcaccaagctggaaatcaagcggctcgaggacctgaagaacgtgttcccacctgaggtggccgtgttcgagcctagcgaggccgagatcagccacacccagaaagccaccctcgtgtgcctggctaccggcttctaccccgaccatgtggaactgtcttggtgggtcaacggcaaagaggtgcacagcggcgtgtgtaccgacccccagccactgaaagaacagcccgccctgaacgacagccggtactgcctgagcagcagactgagagtgtccgccaccttctggcagaacccccggaaccacttcagatgccaggtgcagttctacggcctgagcgagaacgacgagtggacccaggacagagccaagcccgtgacccagatcgtgtctgccgaagcctggggcagagccgattgcggctttaccagcgagagctaccagcagggcgtgctgagcgccaccaacctgagcgtgatcggcttcagaatcctgctgctgaaagtggccggctttaacctgctgatgaccctgcggctgtggtccagcagggccaagcgatctggatctggagcaacaaacttctcactactcaaacaagcaggtgacgtggaggagaatcccgggcctactagtatggactggatttggcgcatccttttccttgtcggcgctgctaccggcgcgcattccttcgaacaggtgcaactggtggaatctggcggcggacttgtgaagccaggcggcagcctgagactgagctgtgccgccagcggcttcagcatcaccaccagcggctactactggacctggatcagacagttccccggcaagggcctggaatggatgggctacatcggctacaacagcaagacctactacaaccccgccctgaagtcccggatcaccatcagcagagacaacgccaagaacagcctgtacctgcagatgaactccctgagagccgaggataccgccgtgtactactgcgccagatccctgtacggcggctacaaggacgccttcgatagctggggccagggaacccttgtgaccgtgtctagcacgcgtatccagaaccctgatcctgccgtgtaccagctgcgggatagcaagagcagcgacaagagcgtgtgtctgttcaccgacttcgacagccagaccaacgtgtcccagagcaaggactccgacgtgtacatcaccgataagtgcgtgctggacatgcggagcatggacttcaagagcaactccgccgtggcctggtccaacaagtccgatttcgcctgcgccaacgccttcaacaacagcattatccccgaggacacattcttcccaagccccgagagcagctgcgacgtgaagctggtggaaaagagcttcgagacagacaccaacctgaacttccagatcctgtacgagatcctgctgggcaaggccaccctgtacgccgtgctggtgtctgccctggtgctgatggctatggtcaagcggaaggacagccgggga

SEQ ID NO: 5390 - DNA, 2289 bp, synthetic construct
  source 1..2289: mol_type = other DNA
atggccttaccagtgaccgccttgctcctgccgctggccttgctgctccacgccgccaggccggaagtgcagctggttgaatctggcggaggactggttcagcctggcggatctctgagactgtcttgtgccgccagcggcttcagcttcagcgacttttggatgagctgggtccgacaggcccctggcaaaggacttgaatgggtcgccacaatcagccaggccggcagcgagaaggactacgtggactctgtgaagggcagattcaccatcagccgggacaacgccaagaagtccctgtacctccagatgaacagcctgagagccgaggacaccgccgtgtactattgtgcctctggcgtgtacagcttcgactacagaggccagggcaccctggtcacagtctcttctggtaccggcggaggcggatctggcggcggaggtagcggtggcggaggatctgaattcgacgagatcgtgctgacccagagccctctgagcctgcctgtgacacctggcgagcctgccagcatctcctgtagaagcagccagagcctgctgcacagcatcggctacaactacctggactggtatctccagaagcccggccagagcccccaactgctgatctacctgggcagcaacagagccagcggcgtgcccgatagattttccggcagcggctccggcaccgacttcaccctgaagatcagccgggtggaagccgaggacgtgggcgtgtactactgtatgcaggccctccagacccccctgacctttggcggaggcaccaaggtggaaatcaagcggctcgaggacctgaagaacgtgttcccacctgaggtggccgtgttcgagcctagcgaggccgagatcagccacacccagaaagccaccctcgtgtgcctggctaccggcttctaccccgaccatgtggaactgtcttggtgggtcaacggcaaagaggtgcacagcggcgtgtgtaccgacccccagccactgaaagaacagcccgccctgaacgacagccggtactgcctgagcagcagactgagagtgtccgccaccttctggcagaacccccggaaccacttcagatgccaggtgcagttctacggcctgagcgagaacgacgagtggacccaggacagagccaagcccgtgacccagatcgtgtctgccgaagcctggggcagagccgattgcggctttaccagcgagagctaccagcagggcgtgctgagcgccaccaacctgagcgtgatcggcttcagaatcctgctgctgaaagtggccggctttaacctgctgatgaccctgcggctgtggtccagcagggccaagcgatctggatctggagcaacaaacttctcactactcaaacaagcaggtgacgtggaggagaatcccgggcctactagtatggactggatttggcgcatccttttccttgtcggcgctgctaccggcgcgcattccttcgaagaagtgcaactggtggaaagcggaggcggcgtggtgcagcctggaagaagcctgagactgagctgtgccgccagcggcttcaccttccggtcctacggaatgcactgggtgcgccaggcccctggcaaaggactggaatgggtggccgtgatctcctacgacggctccaacaagtactacaccgacagcgtgaacggcagattcaccatcagcagagacaacagcaagaacaccctgtacctccagatgaacagcctgcgggccgaggacaccgccgtgtactattgtgctagaggcggaggctactacgagacaagcggccctgattactggggccagggcacactcgtgaccgtgtctagtacgcgtatccagaaccctgatcctgccgtgtaccagctgcgggatagcaagagcagcgacaagagcgtgtgtctgttcaccgacttcgacagccagaccaacgtgtcccagagcaaggactccgacgtgtacatcaccgataagtgcgtgctggacatgcggagcatggacttcaagagcaactccgccgtggcctggtccaacaagtccgatttcgcctgcgccaacgccttcaacaacagcattatccccgaggacacattcttcccaagccccgagagcagctgcgacgtgaagctggtggaaaagagcttcgagacagacaccaacctgaacttccagatcctgtacgagatcctgctgggcaaggccaccctgtacgccgtgctggtgtctgccctggtgctgatggctatggtcaagcggaaggacagccgggga

SEQ ID NO: 5391 - DNA, 2283 bp, synthetic construct
  source 1..2283: mol_type = other DNA
atggccttaccagtgaccgccttgctcctgccgctggccttgctgctccacgccgccaggccggaagtgcagctggttgaatctggcggaggactggttcagcctggcggatctctgagactgtcttgtgccgccagcggcttcagcttcagcgacttttggatgagctgggtccgacaggcccctggcaaaggacttgaatgggtcgccacaatcagccaggccggcagcgagaaggactacgtggactctgtgaagggcagattcaccatcagccgggacaacgccaagaagtccctgtacctccagatgaacagcctgagagccgaggacaccgccgtgtactattgtgcctctggcgtgtacagcttcgactacagaggccagggcaccctggtcacagtctcttctggtaccggcggaggcggatctggcggcggaggtagcggtggcggaggatctgaattcgacgacgtcgtgatgacccagagccctctgagcctgcctgtgacacctggcgagcctgccagcatctcctgtagaagcagccagagcctgctgcacagcatcggctacaactacctgcactggtttctccagaagcccggccagagcccccaactgctgatctacctgggcagcaacagagccagcggcgtgcccgatagattttccggcagcggctccggcaccgacttcaccctgaagatcagccgggtggaagccgaggacgtgggcgtgtactactgtatgcaggccctccagacccctcccacctttggacagggcaccagactggaaatcaagcggctcgaggacctgaagaacgtgttcccacctgaggtggccgtgttcgagcctagcgaggccgagatcagccacacccagaaagccaccctcgtgtgcctggctaccggcttctaccccgaccatgtggaactgtcttggtgggtcaacggcaaagaggtgcacagcggcgtgtgtaccgacccccagccactgaaagaacagcccgccctgaacgacagccggtactgcctgagcagcagactgagagtgtccgccaccttctggcagaacccccggaaccacttcagatgccaggtgcagttctacggcctgagcgagaacgacgagtggacccaggacagagccaagcccgtgacccagatcgtgtctgccgaagcctggggcagagccgattgcggctttaccagcgagagctaccagcagggcgtgctgagcgccaccaacctgagcgtgatcggcttcagaatcctgctgctgaaagtggccggctttaacctgctgatgaccctgcggctgtggtccagcagggccaagcgatctggatctggagcaacaaacttctcactactcaaacaagcaggtgacgtggaggagaatcccgggcctactagtatggactggatttggcgcatccttttccttgtcggcgctgctaccggcgcgcattccttcgaacaactccaactccaggaaagcggccctggcctcgtgaagcctagcggcacactgagcctgacatgtgccgtgtctggcggcagcatcagcagcagcaactggtggtcttgggtgcgccagcctcctggcaagggcctggaatggatcggcgaaatctaccacagcggcagcaccaactacaaccccagcctgaagtccagagtgaccatcagcgtggacaagagcaagaaccagttctccctgaagctgagcagcgtgacagccgccgataccgccgtgtactattgcgtgggcagcccctacggcgactacgtgctggattattggggccagggcaccctcgtgaccgtgtctagtacgcgtatccagaaccctgatcctgccgtgtaccagctgcgggatagcaagagcagcgacaagagcgtgtgtctgttcaccgacttcgacagccagaccaacgtgtcccagagcaaggactccgacgtgtacatcaccgataagtgcgtgctggacatgcggagcatggacttcaagagcaactccgccgtggcctggtccaacaagtccgatttcgcctgcgccaacgccttcaacaacagcattatccccgaggacacattcttcccaagccccgagagcagctgcgacgtgaagctggtggaaaagagcttcgagacagacaccaacctgaacttccagatcctgtacgagatcctgctgggcaaggccaccctgtacgccgtgctggtgtctgccctggtgctgatggctatggtcaagcggaaggacagccgggga

SEQ ID NO: 5392 - DNA, 2277 bp, synthetic construct
  source 1..2277: mol_type = other DNA
atggccttaccagtgaccgccttgctcctgccgctggccttgctgctccacgccgccaggccggaagtgcagctggttgaatctggcggaggactggttcagcctggcggatctctgagactgtcttgtgccgccagcggcttcagcttcagcgacttttggatgagctgggtccgacaggcccctggcaaaggacttgaatgggtcgccacaatcagccaggccggcagcgagaaggactacgtggactctgtgaagggcagattcaccatcagccgggacaacgccaagaagtccctgtacctccagatgaacagcctgagagccgaggacaccgccgtgtactattgtgcctctggcgtgtacagcttcgactacagaggccagggcaccctggtcacagtctcttctggtaccggcggaggcggatctggcggcggaggtagcggtggcggaggatctgaattcgacgagatcgtgctgacacagagccctggcaccctgagcctgtctctgggagagagagccacactgagctgtcgggccagccagtctatcagcagcagcttcctggcctggtatcagcagaagcccggccaggcccctaagctgctgatctacgccgccagcacaagagccaccggcatccccgatagattcagcggctctggcagcggcaccgacttcaccctgaccatcagcagactggaacccgaggacttcgccgtgtactactgccagcagtacggcagaagcctgagcttcggcggaggcaccaaggtggaagtgaagctcgaggacctgaagaacgtgttcccacctgaggtggccgtgttcgagcctagcgaggccgagatcagccacacccagaaagccaccctcgtgtgcctggctaccggcttctaccccgaccatgtggaactgtcttggtgggtcaacggcaaagaggtgcacagcggcgtgtgtaccgacccccagccactgaaagaacagcccgccctgaacgacagccggtactgcctgagcagcagactgagagtgtccgccaccttctggcagaacccccggaaccacttcagatgccaggtgcagttctacggcctgagcgagaacgacgagtggacccaggacagagccaagcccgtgacccagatcgtgtctgccgaagcctggggcagagccgattgcggctttaccagcgagagctaccagcagggcgtgctgagcgccaccaacctgagcgtgatcggcttcagaatcctgctgctgaaagtggccggctttaacctgctgatgaccctgcggctgtggtccagcagggccaagcgatctggatctggagcaacaaacttctcactactcaaacaagcaggtgacgtggaggagaatcccgggcctactagtatggactggatttggcgcatccttttccttgtcggcgctgctaccggcgcgcattccttcgaacaggtgcaactccagcagtctggccccggactcgtgaagcctagccagacactgagcctgacctgcgccatcagcggcgatagcgtgtccggcaatagcgccacctggaactggatcagacagagcccatctcggggcctggaatggctgggccggacctactaccgcagcaagtggaaccacgactacgccgagagcgtgaagtcccggatcaccatcaaccccgacaccagcaagaaccagttctccttgcaactgaacagcgtgacccccgaggacacagccgtgtattattgcgccagaggcgacagcagctcttggtacgccttcgactattggggccagggcaccctcgtgaccgtgtctagtacgcgtatccagaaccctgatcctgccgtgtaccagctgcgggatagcaagagcagcgacaagagcgtgtgtctgttcaccgacttcgacagccagaccaacgtgtcccagagcaaggactccgacgtgtacatcaccgataagtgcgtgctggacatgcggagcatggacttcaagagcaactccgccgtggcctggtccaacaagtccgatttcgcctgcgccaacgccttcaacaacagcattatccccgaggacacattcttcccaagccccgagagcagctgcgacgtgaagctggtggaaaagagcttcgagacagacaccaacctgaacttccagatcctgtacgagatcctgctgggcaaggccaccctgtacgccgtgctggtgtctgccctggtgctgatggctatggtcaagcggaaggacagccgggga

SEQ ID NO: 5393 - DNA, 2274 bp, synthetic construct
  source 1..2274: mol_type = other DNA
atggccttaccagtgaccgccttgctcctgccgctggccttgctgctccacgccgccaggccggaagtgcagctggttgaatctggcggaggactggttcagcctggcggatctctgagactgtcttgtgccgccagcggcttcagcttcagcgacttttggatgagctgggtccgacaggcccctggcaaaggacttgaatgggtcgccacaatcagccaggccggcagcgagaaggactacgtggactctgtgaagggcagattcaccatcagccgggacaacgccaagaagtccctgtacctccagatgaacagcctgagagccgaggacaccgccgtgtactattgtgcctctggcgtgtacagcttcgactacagaggccagggcaccctggtcacagtctcttctggtaccggcggaggcggatctggcggcggaggtagcggtggcggaggatctgaattcgaccagagcgtcgtgacacagcctcctagcgtgtcagtggcccctggcaagaccgccagaatcacctgtggccggaacaacatcggcagcaagagcgtgcactggtatcagcagaagcccggccaggctcctgtgctggtggtgtacgacgacagcgacagacccagcggcatccccgagagattcagcggcagcaactccggcaataccgccaccctgaccatcagcagagtggaagccggcgacgaggccgactactactgccaagtgtgggacagcagcagcgatcacgtggtgtttggcggaggcaccaagctgacagtgctgggtctcgaggacctgaagaacgtgttcccacctgaggtggccgtgttcgagcctagcgaggccgagatcagccacacccagaaagccaccctcgtgtgcctggctaccggcttctaccccgaccatgtggaactgtcttggtgggtcaacggcaaagaggtgcacagcggcgtgtgtaccgacccccagccactgaaagaacagcccgccctgaacgacagccggtactgcctgagcagcagactgagagtgtccgccaccttctggcagaacccccggaaccacttcagatgccaggtgcagttctacggcctgagcgagaacgacgagtggacccaggacagagccaagcccgtgacccagatcgtgtctgccgaagcctggggcagagccgattgcggctttaccagcgagagctaccagcagggcgtgctgagcgccaccaacctgagcgtgatcggcttcagaatcctgctgctgaaagtggccggctttaacctgctgatgaccctgcggctgtggtccagcagggccaagcgatctggatctggagcaacaaacttctcactactcaaacaagcaggtgacgtggaggagaatcccgggcctactagtatggactggatttggcgcatccttttccttgtcggcgctgctaccggcgcgcattccttcgaagtgcaactggtgcagtctggcggaggggtcatgcggcctggcggatctctgagactgtcttgtgccgccagcggcttcaccttcgacgactacggcatgagctgggtgcgccaggcccctggaaaaggcctggaatgggtgtccggcatcaactggaatggcggcagcaccggctacgccgattctgtgcggggcagattcaccatcagccgggacaacgccaagaacagcctgtacctgcagatgaactccctgcgggccgaggacaccgccctgtactattgcgccagagagcggggctacggctaccacgaccctcacgattattggggccagggcacccttgttaccgtgtcctctacgcgtatccagaaccctgatcctgccgtgtaccagctgcgggatagcaagagcagcgacaagagcgtgtgtctgttcaccgacttcgacagccagaccaacgtgtcccagagcaaggactccgacgtgtacatcaccgataagtgcgtgctggacatgcggagcatggacttcaagagcaactccgccgtggcctggtccaacaagtccgatttcgcctgcgccaacgccttcaacaacagcattatccccgaggacacattcttcccaagccccgagagcagctgcgacgtgaagctggtggaaaagagcttcgagacagacaccaacctgaacttccagatcctgtacgagatcctgctgggcaaggccaccctgtacgccgtgctggtgtctgccctggtgctgatggctatggtcaagcggaaggacagccgggga

SEQ ID NO: 5394 - DNA, 2313 bp, synthetic construct
  source 1..2313: mol_type = other DNA
atggccttaccagtgaccgccttgctcctgccgctggccttgctgctccacgccgccaggccggaagtgcagctggttgaatctggcggaggactggttcagcctggcggatctctgagactgtcttgtgccgccagcggcttcagcttcagcgacttttggatgagctgggtccgacaggcccctggcaaaggacttgaatgggtcgccacaatcagccaggccggcagcgagaaggactacgtggactctgtgaagggcagattcaccatcagccgggacaacgccaagaagtccctgtacctccagatgaacagcctgagagccgaggacaccgccgtgtactattgtgcctctggcgtgtacagcttcgactacagaggccagggcaccctggtcacagtctcttctggtaccggcggaggcggatctggcggcggaggtagcggtggcggaggatctgaattcgaacagaaactcatcagtgaagaagacctggaattccaggctgtcgtgacacagcctcctagcgcctctggcacaccaggccagagagtgaccatctcctgtagcggcagcagcagcaacatcggcagcaacaccgtgaactggtatcagcaggtgcccggcaccgctcccaagctgctgatctacagcaacaaccagcggcccagcggcgtgcccgatagattttctggcagcaagagcggcaccagcgccagcctggctatctctggactccagtccgaggacgaggccgactactattgcgccgcctgggacgatagcctgaacggctgggtgttcggcggaggcaccaagctgacagtgctgctcgaggacctgaagaacgtgttcccacctgaggtggccgtgttcgagcctagcgaggccgagatcagccacacccagaaagccaccctcgtgtgcctggctaccggcttctaccccgaccatgtggaactgtcttggtgggtcaacggcaaagaggtgcacagcggcgtgtgtaccgacccccagccactgaaagaacagcccgccctgaacgacagccggtactgcctgagcagcagactgagagtgtccgccaccttctggcagaacccccggaaccacttcagatgccaggtgcagttctacggcctgagcgagaacgacgagtggacccaggacagagccaagcccgtgacccagatcgtgtctgccgaagcctggggcagagccgattgcggctttaccagcgagagctaccagcagggcgtgctgagcgccaccaacctgagcgtgatcggcttcagaatcctgctgctgaaagtggccggctttaacctgctgatgaccctgcggctgtggtccagcagggccaagcgatctggatctggagcaacaaacttctcactactcaaacaagcaggtgacgtggaggagaatcccgggcctactagtatggactggatttggcgcatccttttccttgtcggcgctgctaccggcgcgcattccttcgaacagatgcaactggtgcagagcggagccgaagtgaaagagcctggcgagagcctgcggatctcctgcaagggcagcggctacagcttcaccaatttctggatctcttgggtgcgccagatgcccggcaagggcctggaatggatgggcagagtggaccccggctactcctacagcacctacagccctagcttccagggccacgtgaccatcagcgccgacaagagcaccagcaccgcctacctccagtggaacagcctgaaggccagcgacaccgccatgtactactgcgccagagtgcagtacagcggctattacgattggttcgacccctggggccagggcacactcgtgacagtgtcaagcacgcgtatccagaaccctgatcctgccgtgtaccagctgcgggatagcaagagcagcgacaagagcgtgtgtctgttcaccgacttcgacagccagaccaacgtgtcccagagcaaggactccgacgtgtacatcaccgataagtgcgtgctggacatgcggagcatggacttcaagagcaactccgccgtggcctggtccaacaagtccgatttcgcctgcgccaacgccttcaacaacagcattatccccgaggacacattcttcccaagccccgagagcagctgcgacgtgaagctggtggaaaagagcttcgagacagacaccaacctgaacttccagatcctgtacgagatcctgctgggcaaggccaccctgtacgccgtgctggtgtctgccctggtgctgatggctatggtcaagcggaaggacagccgggga

SEQ ID NO: 5395 - DNA, 2295 bp, synthetic construct
  source 1..2295: mol_type = other DNA
atggccttaccagtgaccgccttgctcctgccgctggccttgctgctccacgccgccaggccggaagtgcagctggttgaatctggcggaggactggttcagcctggcggatctctgagactgtcttgtgccgccagcggcttcagcttcagcgacttttggatgagctgggtccgacaggcccctggcaaaggacttgaatgggtcgccacaatcagccaggccggcagcgagaaggactacgtggactctgtgaagggcagattcaccatcagccgggacaacgccaagaagtccctgtacctccagatgaacagcctgagagccgaggacaccgccgtgtactattgtgcctctggcgtgtacagcttcgactacagaggccagggcaccctggtcacagtctcttctggtaccggcggaggcggatctggcggcggaggtagcggtggcggaggatctgaattcgaacagaaactcatcagtgaagaagacctggaattcgacatccagatgacccagagccccagcacactgagcgccagcgtgggcgacagagtgaccatcacctgtcgggccagccagaacatcaacaagtggctggcctggtatcagcagaggcccggaaaagccccccagctgctgatctacaaggccagcagcctggaaagcggcgtgcccagcagattttctggcagcggctctggcaccgagtacaccctgaccatcagctccctccagcccgacgacttcgccacctactactgccagcagtacaacagctacgccaccttcggccagggcaccaaggtggaaatcaagagactcgaggacctgaagaacgtgttcccacctgaggtggccgtgttcgagcctagcgaggccgagatcagccacacccagaaagccaccctcgtgtgcctggctaccggcttctaccccgaccatgtggaactgtcttggtgggtcaacggcaaagaggtgcacagcggcgtgtgtaccgacccccagccactgaaagaacagcccgccctgaacgacagccggtactgcctgagcagcagactgagagtgtccgccaccttctggcagaacccccggaaccacttcagatgccaggtgcagttctacggcctgagcgagaacgacgagtggacccaggacagagccaagcccgtgacccagatcgtgtctgccgaagcctggggcagagccgattgcggctttaccagcgagagctaccagcagggcgtgctgagcgccaccaacctgagcgtgatcggcttcagaatcctgctgctgaaagtggccggctttaacctgctgatgaccctgcggctgtggtccagcagggccaagcgatctggatctggagcaacaaacttctcactactcaaacaagcaggtgacgtggaggagaatcccgggcctactagtatggactggatttggcgcatccttttccttgtcggcgctgctaccggcgcgcattccttcgaacaggtgcagctggtgcagtctggggccgaagtgaagaagcctggcgagagcctgaagatcagctgcaagggctccggctacaacttctctaacaagtggatcggctgggtgcgccagctgcctggcagaggactggaatggatcgccatcatctaccccggctacagcgacatcacctacagccccagcttccagggccgcgtgacaatcagcgccgacaccagcatcaacaccgcctacctgcactggcacagcctgaaggccagcgacaccgccatgtactactgcgtgcggcatacagccctggctggcttcgattattggggcctgggcaccctcgtgaccgtgtctagtacgcgtatccagaaccctgatcctgccgtgtaccagctgcgggatagcaagagcagcgacaagagcgtgtgtctgttcaccgacttcgacagccagaccaacgtgtcccagagcaaggactccgacgtgtacatcaccgataagtgcgtgctggacatgcggagcatggacttcaagagcaactccgccgtggcctggtccaacaagtccgatttcgcctgcgccaacgccttcaacaacagcattatccccgaggacacattcttcccaagccccgagagcagctgcgacgtgaagctggtggaaaagagcttcgagacagacaccaacctgaacttccagatcctgtacgagatcctgctgggcaaggccaccctgtacgccgtgctggtgtctgccctggtgctgatggctatggtcaagcggaaggacagccgggga

SEQ ID NO: 5396 - DNA, 2268 bp, synthetic construct
  source 1..2268: mol_type = other DNA
atggccttaccagtgaccgccttgctcctgccgctggccttgctgctccacgccgccaggccggaagtgcagctggttgaatctggcggaggactggttcagcctggcggatctctgagactgtcttgtgccgccagcggcttcagcttcagcgacttttggatgagctgggtccgacaggcccctggcaaaggacttgaatgggtcgccacaatcagccaggccggcagcgagaaggactacgtggactctgtgaagggcagattcaccatcagccgggacaacgccaagaagtccctgtacctccagatgaacagcctgagagccgaggacaccgccgtgtactattgtgcctctggcgtgtacagcttcgactacagaggccagggcaccctggtcacagtctcttctggtaccggcggaggcggatctggcggcggaggtagcggtggcggaggatctgaattcatcgtgctgacacagagccctgcttctctggccgtgtctctgggacagagagccaccatcagctgtagagccagcgagagcgtggacaactacggcaacaccttcatgcactggtatcagcagaagcccggccagcctcctaagctgctgatctacagagccagcaacctggaaagcggcatccccgccagattttctggcagcggcagcagaaccgacttcaccctgaccatcaatcccgtggaagccgacgacgtggcaacctactactgccagcagagcaacgaggaccctcctacatttggagccggcaccaagctggaactgaaactcgaggacctgaagaacgtgttcccacctgaggtggccgtgttcgagcctagcgaggccgagatcagccacacccagaaagccaccctcgtgtgcctggctaccggcttctaccccgaccatgtggaactgtcttggtgggtcaacggcaaagaggtgcacagcggcgtgtgtaccgacccccagccactgaaagaacagcccgccctgaacgacagccggtactgcctgagcagcagactgagagtgtccgccaccttctggcagaacccccggaaccacttcagatgccaggtgcagttctacggcctgagcgagaacgacgagtggacccaggacagagccaagcccgtgacccagatcgtgtctgccgaagcctggggcagagccgattgcggctttaccagcgagagctaccagcagggcgtgctgagcgccaccaacctgagcgtgatcggcttcagaatcctgctgctgaaagtggccggctttaacctgctgatgaccctgcggctgtggtccagcagggccaagcgatctggatctggagcaacaaacttctcactactcaaacaagcaggtgacgtggaggagaatcccgggcctactagtatggactggatttggcgcatccttttccttgtcggcgctgctaccggcgcgcattccttcgaacagattcagctggtgcagtctggccccgagctgaagaaacctggcgagacagtgaagatcagctgcaaggccagcggctacatcttcaccaattacggcatgaactgggtcaagcaggcccctggcaagagcttcaagtggatgggctggatcaacacctacaccggcgagagcacatacagcgccgacttcaagggcagattcgccttcagcctggaaaccagcgccagcacagcctacctgcacatcaacgacctgaagaacgaggacaccgccacctacttttgcgccagaagcggcggctacgaccctatggattattggggccagggcaccagcgtgaccgtttcttctacgcgtatccagaaccctgatcctgccgtgtaccagctgcgggatagcaagagcagcgacaagagcgtgtgtctgttcaccgacttcgacagccagaccaacgtgtcccagagcaaggactccgacgtgtacatcaccgataagtgcgtgctggacatgcggagcatggacttcaagagcaactccgccgtggcctggtccaacaagtccgatttcgcctgcgccaacgccttcaacaacagcattatccccgaggacacattcttcccaagccccgagagcagctgcgacgtgaagctggtggaaaagagcttcgagacagacaccaacctgaacttccagatcctgtacgagatcctgctgggcaaggccaccctgtacgccgtgctggtgtctgccctggtgctgatggctatggtcaagcggaaggacagccgggga

SEQ ID NO: 5397 - DNA, 2265 bp, synthetic construct
  source 1..2265: mol_type = other DNA
atggccttaccagtgaccgccttgctcctgccgctggccttgctgctccacgccgccaggccggaagtgcagctggttgaatctggcggaggactggttcagcctggcggatctctgagactgtcttgtgccgccagcggcttcagcttcagcgacttttggatgagctgggtccgacaggcccctggcaaaggacttgaatgggtcgccacaatcagccaggccggcagcgagaaggactacgtggactctgtgaagggcagattcaccatcagccgggacaacgccaagaagtccctgtacctccagatgaacagcctgagagccgaggacaccgccgtgtactattgtgcctctggcgtgtacagcttcgactacagaggccagggcaccctggtcacagtctcttctggtaccggcggaggcggatctggcggcggaggtagcggtggcggaggatctgaattcgagatcgtgctgacacagagccctggcaccctgagcctgtctccaggcgaaagagccacactgagctgtcgggccagccagagcgtgtccaatacctacctggcctggtatcaccagaggcccggacaggctccccggctgctgatctatggcgcttctagcagagccaccggcatccccgatagattcagcggctctggcagcggcaccgacttcgccctgacaatcagctccctggaacccgaggacttcgccgtgtactactgccagcagtacagcaactcctggaccttcggccagggcaccaaggtggaaatcaagagactcgaggacctgaagaacgtgttcccacctgaggtggccgtgttcgagcctagcgaggccgagatcagccacacccagaaagccaccctcgtgtgcctggctaccggcttctaccccgaccatgtggaactgtcttggtgggtcaacggcaaagaggtgcacagcggcgtgtgtaccgacccccagccactgaaagaacagcccgccctgaacgacagccggtactgcctgagcagcagactgagagtgtccgccaccttctggcagaacccccggaaccacttcagatgccaggtgcagttctacggcctgagcgagaacgacgagtggacccaggacagagccaagcccgtgacccagatcgtgtctgccgaagcctggggcagagccgattgcggctttaccagcgagagctaccagcagggcgtgctgagcgccaccaacctgagcgtgatcggcttcagaatcctgctgctgaaagtggccggctttaacctgctgatgaccctgcggctgtggtccagcagggccaagcgatctggatctggagcaacaaacttctcactactcaaacaagcaggtgacgtggaggagaatcccgggcctactagtatggactggatttggcgcatccttttccttgtcggcgctgctaccggcgcgcattccttcgaacaggtgcaactggtggaatctggcgggggagtggtgcagcctggcagaagcctgagactgtcttgtgccgccagcggcttcaccttcagcagctacgacatgcactgggtgcgccaggcccctggcaaaggactggaatgggtggccgtgatctcctacgacggcaccaacgagtattacgccgacagcgtgaagggccggttcaccatctccagagacaccagcaagaacaccctgtacctccagatgaacagcctgcgggccgaggacacagccgtgtattattgcgccagagagcggtacttcgactggtccttcgactactggggccagggaaccctggtgtccgtgtctagtacgcgtatccagaaccctgatcctgccgtgtaccagctgcgggatagcaagagcagcgacaagagcgtgtgtctgttcaccgacttcgacagccagaccaacgtgtcccagagcaaggactccgacgtgtacatcaccgataagtgcgtgctggacatgcggagcatggacttcaagagcaactccgccgtggcctggtccaacaagtccgatttcgcctgcgccaacgccttcaacaacagcattatccccgaggacacattcttcccaagccccgagagcagctgcgacgtgaagctggtggaaaagagcttcgagacagacaccaacctgaacttccagatcctgtacgagatcctgctgggcaaggccaccctgtacgccgtgctggtgtctgccctggtgctgatggctatggtcaagcggaaggacagccgggga

SEQ ID NO: 5398 - DNA, 2262 bp, synthetic construct
  source 1..2262: mol_type = other DNA
atggccttaccagtgaccgccttgctcctgccgctggccttgctgctccacgccgccaggccggaagtgcagctggttgaatctggcggaggactggttcagcctggcggatctctgagactgtcttgtgccgccagcggcttcagcttcagcgacttttggatgagctgggtccgacaggcccctggcaaaggacttgaatgggtcgccacaatcagccaggccggcagcgagaaggactacgtggactctgtgaagggcagattcaccatcagccgggacaacgccaagaagtccctgtacctccagatgaacagcctgagagccgaggacaccgccgtgtactattgtgcctctggcgtgtacagcttcgactacagaggccagggcaccctggtcacagtctcttctggtaccggcggaggcggatctggcggcggaggtagcggtggcggaggatctgaattcgagctgacacaggaccctgctgtgtctgttgccctgggccagacagtgcggattacctgtcaaggcgacagcctgagaagcaactacgccaactggtatcagcagaagcccggacaggctcccgtgctggttatctacggccagaacaacagacccagcggcatccccgatagattcagcggctctagctctggcaataccgccagcctgacaatcactggcgctcaggctgccgatgaggccgactactactgcgatagcagagtgtccaccggcaatcacgtggtgtttggcggcggaacaaagctgacagtgctcggacaactcgaggacctgaagaacgtgttcccacctgaggtggccgtgttcgagcctagcgaggccgagatcagccacacccagaaagccaccctcgtgtgcctggctaccggcttctaccccgaccatgtggaactgtcttggtgggtcaacggcaaagaggtgcacagcggcgtgtgtaccgacccccagccactgaaagaacagcccgccctgaacgacagccggtactgcctgagcagcagactgagagtgtccgccaccttctggcagaacccccggaaccacttcagatgccaggtgcagttctacggcctgagcgagaacgacgagtggacccaggacagagccaagcccgtgacccagatcgtgtctgccgaagcctggggcagagccgattgcggctttaccagcgagagctaccagcagggcgtgctgagcgccaccaacctgagcgtgatcggcttcagaatcctgctgctgaaagtggccggctttaacctgctgatgaccctgcggctgtggtccagcagggccaagcgatctggatctggagcaacaaacttctcactactcaaacaagcaggtgacgtggaggagaatcccgggcctactagtatggactggatttggcgcatccttttccttgtcggcgctgctaccggcgcgcattccttcgaagaagttcagctggtgcagagcggagccgaagtgaagaaacctggggcctctgtgaaggtgtcctgcaaggcttccggctacacctttaccagctacgccatgcactgggtccgacaggcacctggacaacggcttgaatggatgggctggatcaacgccggcaacggcaacaccaagtacagccagaaattccagggccgcgtgaccatcaccagagatacaagcgccagcaccgcctacatggaactgtctagcctgagatccgaggacaccgccgtgtactactgtgccagagacatcagctacggcagcttcgactattggggccagggcacactggtcaccgttagctctacgcgtatccagaaccctgatcctgccgtgtaccagctgcgggatagcaagagcagcgacaagagcgtgtgtctgttcaccgacttcgacagccagaccaacgtgtcccagagcaaggactccgacgtgtacatcaccgataagtgcgtgctggacatgcggagcatggacttcaagagcaactccgccgtggcctggtccaacaagtccgatttcgcctgcgccaacgccttcaacaacagcattatccccgaggacacattcttcccaagccccgagagcagctgcgacgtgaagctggtggaaaagagcttcgagacagacaccaacctgaacttccagatcctgtacgagatcctgctgggcaaggccaccctgtacgccgtgctggtgtctgccctggtgctgatggctatggtcaagcggaaggacagccgggga

SEQ ID NO: 5399 - DNA, 2268 bp, synthetic construct
  source 1..2268: mol_type = other DNA
atggccttaccagtgaccgccttgctcctgccgctggccttgctgctccacgccgccaggccggaagtgcagctggttgaatctggcggaggactggttcagcctggcggatctctgagactgtcttgtgccgccagcggcttcagcttcagcgacttttggatgagctgggtccgacaggcccctggcaaaggacttgaatgggtcgccacaatcagccaggccggcagcgagaaggactacgtggactctgtgaagggcagattcaccatcagccgggacaacgccaagaagtccctgtacctccagatgaacagcctgagagccgaggacaccgccgtgtactattgtgcctctggcgtgtacagcttcgactacagaggccagggcaccctggtcacagtctcttctggtaccggcggaggcggatctggcggcggaggtagcggtggcggaggatctgaattcgacatcgtgctgacacagacaccagccacactgagcgtgacacctggcgattctgtgtccctgagctgtagagccagccagagcatcagcaacaacctgcactggtatcagcagaagtcccacgagagccccagactgctgattaagaacgccagccagtctatcagcggcatccccagcaagtttagcggctctggcagcggcaccgacttcaccctgagaatcaacagcgtggaaaccgaggacttcgggatgtacttctgccagcagagcaatagctggccctacacatttggctccggcaccaagctggaaatcaaactcgaggacctgaagaacgtgttcccacctgaggtggccgtgttcgagcctagcgaggccgagatcagccacacccagaaagccaccctcgtgtgcctggctaccggcttctaccccgaccatgtggaactgtcttggtgggtcaacggcaaagaggtgcacagcggcgtgtgtaccgacccccagccactgaaagaacagcccgccctgaacgacagccggtactgcctgagcagcagactgagagtgtccgccaccttctggcagaacccccggaaccacttcagatgccaggtgcagttctacggcctgagcgagaacgacgagtggacccaggacagagccaagcccgtgacccagatcgtgtctgccgaagcctggggcagagccgattgcggctttaccagcgagagctaccagcagggcgtgctgagcgccaccaacctgagcgtgatcggcttcagaatcctgctgctgaaagtggccggctttaacctgctgatgaccctgcggctgtggtccagcagggccaagcgatctggatctggagcaacaaacttctcactactcaaacaagcaggtgacgtggaggagaatcccgggcctactagtatggactggatttggcgcatccttttccttgtcggcgctgctaccggcgcgcattccttcgaacaagtgaagctgcaacagagcggacccgagctggttaagccaggcgcttccgtgaagattagctgcaaggccagcggctacagcttcaccggctactacatgcactgggtcaagcagagccacggcaacatcctggactggatcggctacatctacccctacaacggcgtgtccagctacaaccagaagttcaagggcaaagccactctgaccgtggacaagagcagcagcaccgcctacatggaactgagaagcctgaccagcgaggacagcgccgtgtactattgtgccagagagcggggcctgtaccagctcagagcaatggattattggggccagggcaccagcgtgaccgtttcttctacgcgtatccagaaccctgatcctgccgtgtaccagctgcgggatagcaagagcagcgacaagagcgtgtgtctgttcaccgacttcgacagccagaccaacgtgtcccagagcaaggactccgacgtgtacatcaccgataagtgcgtgctggacatgcggagcatggacttcaagagcaactccgccgtggcctggtccaacaagtccgatttcgcctgcgccaacgccttcaacaacagcattatccccgaggacacattcttcccaagccccgagagcagctgcgacgtgaagctggtggaaaagagcttcgagacagacaccaacctgaacttccagatcctgtacgagatcctgctgggcaaggccaccctgtacgccgtgctggtgtctgccctggtgctgatggctatggtcaagcggaaggacagccgggga

SEQ ID NO: 5400 - DNA, 2241 bp, synthetic construct
  source 1..2241: mol_type = other DNA
atggccttaccagtgaccgccttgctcctgccgctggccttgctgctccacgccgccaggccggaagtgcagctggttgaatctggcggaggactggttcagcctggcggatctctgagactgtcttgtgccgccagcggcttcagcttcagcgacttttggatgagctgggtccgacaggcccctggcaaaggacttgaatgggtcgccacaatcagccaggccggcagcgagaaggactacgtggactctgtgaagggcagattcaccatcagccgggacaacgccaagaagtccctgtacctccagatgaacagcctgagagccgaggacaccgccgtgtactattgtgcctctggcgtgtacagcttcgactacagaggccagggcaccctggtcacagtctcttctggtaccggcggaggcggatctggcggcggaggtagcggtggcggaggatctgaattcgacatcgtgatgacacagacccctgccatcatgagcgcctctccaggccagaaagtgaccatcacatgtagcgccagcagcagcgtgaactacatgcactggtatcagcagaagctgggcagcagccccaagctgtggatctacgataccagcaaactggcccctggcgtgccagccagattttctggttctggcagcggcaccagctacagcctgacaatcagcagcatggaagccgaggatgccgccagctacttctgccatcagtggtctagctacccctacacctttggctccggcaccaagctggaaatcaaactcgaggacctgaagaacgtgttcccacctgaggtggccgtgttcgagcctagcgaggccgagatcagccacacccagaaagccaccctcgtgtgcctggctaccggcttctaccccgaccatgtggaactgtcttggtgggtcaacggcaaagaggtgcacagcggcgtgtgtaccgacccccagccactgaaagaacagcccgccctgaacgacagccggtactgcctgagcagcagactgagagtgtccgccaccttctggcagaacccccggaaccacttcagatgccaggtgcagttctacggcctgagcgagaacgacgagtggacccaggacagagccaagcccgtgacccagatcgtgtctgccgaagcctggggcagagccgattgcggctttaccagcgagagctaccagcagggcgtgctgagcgccaccaacctgagcgtgatcggcttcagaatcctgctgctgaaagtggccggctttaacctgctgatgaccctgcggctgtggtccagcagggccaagcgatctggatctggagcaacaaacttctcactactcaaacaagcaggtgacgtggaggagaatcccgggcctactagtatggactggatttggcgcatccttttccttgtcggcgctgctaccggcgcgcattccttcgaagaagttcagctccaagagtctggccccgacctggtcaagcctagccaaagcctgagcctgacctgtaccgtgaccggctacagcatcacaagcggctatggatggcactggatcagacagttccccggcaacaaactggaatggatgggctacatccactacagcggcagcaccacctacaatcccagcctgaagtcccggatcagcatcagcagagacaccagcaagaaccagttcttcctgcaactgaacagcgtgaccaccgaggacaccgccacctactattgtgctcggagcctgagatattggggccagggcacaaccctgaccgtgtcatctacgcgtatccagaaccctgatcctgccgtgtaccagctgcgggatagcaagagcagcgacaagagcgtgtgtctgttcaccgacttcgacagccagaccaacgtgtcccagagcaaggactccgacgtgtacatcaccgataagtgcgtgctggacatgcggagcatggacttcaagagcaactccgccgtggcctggtccaacaagtccgatttcgcctgcgccaacgccttcaacaacagcattatccccgaggacacattcttcccaagccccgagagcagctgcgacgtgaagctggtggaaaagagcttcgagacagacaccaacctgaacttccagatcctgtacgagatcctgctgggcaaggccaccctgtacgccgtgctggtgtctgccctggtgctgatggctatggtcaagcggaaggacagccgggga

SEQ ID NO: 5401 - DNA, 2250 bp, synthetic construct
  source 1..2250: mol_type = other DNA
atggccttaccagtgaccgccttgctcctgccgctggccttgctgctccacgccgccaggccggaagtgcagctggttgaatctggcggaggactggttcagcctggcggatctctgagactgtcttgtgccgccagcggcttcagcttcagcgacttttggatgagctgggtccgacaggcccctggcaaaggacttgaatgggtcgccacaatcagccaggccggcagcgagaaggactacgtggactctgtgaagggcagattcaccatcagccgggacaacgccaagaagtccctgtacctccagatgaacagcctgagagccgaggacaccgccgtgtactattgtgcctctggcgtgtacagcttcgactacagaggccagggcaccctggtcacagtctcttctggtaccggcggaggcggatctggcggcggaggtagcggtggcggaggatctgaattcgacatccagatgacacagagccctagcagcctgtctgccagcgtgggagacagagtgaccatcacctgtagcgccaccagcagcatcagctacatgcactggtatcagcagaagcccggcaaggcccctaaaggctggatctacgataccagcaaactggcccacggcgtgcccagcagattttctggttctggcagcggcaccgacttcaccctgacaatatctagcctccagcctgaggacttcgccacctactactgccaccagagaagaagctaccccttcaccttcggccagggcaccaaggtggaaatcaaactcgaggacctgaagaacgtgttcccacctgaggtggccgtgttcgagcctagcgaggccgagatcagccacacccagaaagccaccctcgtgtgcctggctaccggcttctaccccgaccatgtggaactgtcttggtgggtcaacggcaaagaggtgcacagcggcgtgtgtaccgacccccagccactgaaagaacagcccgccctgaacgacagccggtactgcctgagcagcagactgagagtgtccgccaccttctggcagaacccccggaaccacttcagatgccaggtgcagttctacggcctgagcgagaacgacgagtggacccaggacagagccaagcccgtgacccagatcgtgtctgccgaagcctggggcagagccgattgcggctttaccagcgagagctaccagcagggcgtgctgagcgccaccaacctgagcgtgatcggcttcagaatcctgctgctgaaagtggccggctttaacctgctgatgaccctgcggctgtggtccagcagggccaagcgatctggatctggagcaacaaacttctcactactcaaacaagcaggtgacgtggaggagaatcccgggcctactagtatggactggatttggcgcatccttttccttgtcggcgctgctaccggcgcgcattccttcgaagaagtgcaactggttcagagcggagccgaagtgaagaaacctggggcctctgtgaaggtgtcctgcaaggcttccggctacacctttaccaatttctggattcactgggtccgacaggctccaggccaaggactggaatggatcggagagatcgaccccagcgacagctacaccaactacaaccagaaattcaaaggccgggtcaccatcaccagagacaccagcacaagcaccgcctacctggaactgagcagcctgagaagcgaggacaccgccgtgtactactgcgccagggaaatcaccaccgtggattattggggccagggaaccctggtcaccgtgtcatctacgcgtatccagaaccctgatcctgccgtgtaccagctgcgggatagcaagagcagcgacaagagcgtgtgtctgttcaccgacttcgacagccagaccaacgtgtcccagagcaaggactccgacgtgtacatcaccgataagtgcgtgctggacatgcggagcatggacttcaagagcaactccgccgtggcctggtccaacaagtccgatttcgcctgcgccaacgccttcaacaacagcattatccccgaggacacattcttcccaagccccgagagcagctgcgacgtgaagctggtggaaaagagcttcgagacagacaccaacctgaacttccagatcctgtacgagatcctgctgggcaaggccaccctgtacgccgtgctggtgtctgccctggtgctgatggctatggtcaagcggaaggacagccgggga

SEQ ID NO: 5402 - DNA, 2271 bp, synthetic construct
  source 1..2271: mol_type = other DNA
atggccttaccagtgaccgccttgctcctgccgctggccttgctgctccacgccgccaggccggaagtgcagctggttgaatctggcggaggactggttcagcctggcggatctctgagactgtcttgtgccgccagcggcttcagcttcagcgacttttggatgagctgggtccgacaggcccctggcaaaggacttgaatgggtcgccacaatcagccaggccggcagcgagaaggactacgtggactctgtgaagggcagattcaccatcagccgggacaacgccaagaagtccctgtacctccagatgaacagcctgagagccgaggacaccgccgtgtactattgtgcctctggcgtgtacagcttcgactacagaggccagggcaccctggtcacagtctcttctggtaccggcggaggcggatctggcggcggaggtagcggtggcggaggatctgaattcgacatccagatgacacagagccctagcagcctgtctgccagcgtgggagacagagtgaccatcacatgcaaggccagccagggcttcaacaaatacgtggcctggtatcagcagaagcccggcaaggctcctaagctgctgatctactacaccagcacactccagcctggcgtgcccagcagattttctggctctggcagcggcagagactacaccctgacaatatccagcctccagccagaggacttcgccacctactactgtctccagtacggcaacctgctgtacgcctttggacagggcaccaaggtggaaatcaagagactcgaggacctgaagaacgtgttcccacctgaggtggccgtgttcgagcctagcgaggccgagatcagccacacccagaaagccaccctcgtgtgcctggctaccggcttctaccccgaccatgtggaactgtcttggtgggtcaacggcaaagaggtgcacagcggcgtgtgtaccgacccccagccactgaaagaacagcccgccctgaacgacagccggtactgcctgagcagcagactgagagtgtccgccaccttctggcagaacccccggaaccacttcagatgccaggtgcagttctacggcctgagcgagaacgacgagtggacccaggacagagccaagcccgtgacccagatcgtgtctgccgaagcctggggcagagccgattgcggctttaccagcgagagctaccagcagggcgtgctgagcgccaccaacctgagcgtgatcggcttcagaatcctgctgctgaaagtggccggctttaacctgctgatgaccctgcggctgtggtccagcagggccaagcgatctggatctggagcaacaaacttctcactactcaaacaagcaggtgacgtggaggagaatcccgggcctactagtatggactggatttggcgcatccttttccttgtcggcgctgctaccggcgcgcattccttcgaagaagttcagcttgtgcagagcggagccgaagtgaagaaacctggggcctctgtgaaggtgtcctgcaaagccagcggctacacctttaccagctactggatcggctgggtccgacaggctcctggacaaggactggaatggatcggcgacatctatcccggcggaggctacaccaactacaacgagaagttcaagggccgcgtgacaatcaccagagacacctctacaagcaccgcctacctggaactgagcagcctgagaagcgaggacaccgccgtgtactactgcgccagactggatggcagcagctacagaggcgctatggattcttggggccagggcacactggtcaccgtttcttctacgcgtatccagaaccctgatcctgccgtgtaccagctgcgggatagcaagagcagcgacaagagcgtgtgtctgttcaccgacttcgacagccagaccaacgtgtcccagagcaaggactccgacgtgtacatcaccgataagtgcgtgctggacatgcggagcatggacttcaagagcaactccgccgtggcctggtccaacaagtccgatttcgcctgcgccaacgccttcaacaacagcattatccccgaggacacattcttcccaagccccgagagcagctgcgacgtgaagctggtggaaaagagcttcgagacagacaccaacctgaacttccagatcctgtacgagatcctgctgggcaaggccaccctgtacgccgtgctggtgtctgccctggtgctgatggctatggtcaagcggaaggacagccgggga

SEQ ID NO: 5403 - DNA, 2259 bp, synthetic construct
  source 1..2259: mol_type = other DNA
atggccttaccagtgaccgccttgctcctgccgctggccttgctgctccacgccgccaggccggaagtgcagctggttgaatctggcggaggactggttcagcctggcggatctctgagactgtcttgtgccgccagcggcttcagcttcagcgacttttggatgagctgggtccgacaggcccctggcaaaggacttgaatgggtcgccacaatcagccaggccggcagcgagaaggactacgtggactctgtgaagggcagattcaccatcagccgggacaacgccaagaagtccctgtacctccagatgaacagcctgagagccgaggacaccgccgtgtactattgtgcctctggcgtgtacagcttcgactacagaggccagggcaccctggtcacagtctcttctggtaccggcggaggcggatctggcggcggaggtagcggtggcggaggatctgaattcgacatccagatgacacagagccctagcagcctgtctgccagcgtgggagacagagtgaccatcacctgtagagccagccaggacatccggtactacctgaactggtatcagcagaagcccggcaaggcccctaagctgctgatctatgtggcctccagcctccagagcggagtgccttctagattttctggcagcggctccggcaccgagtttaccctgacagtgtctagcttgcagcccgaggacttcgccacctactactgcctgcaagtgtacagcacccctcggacctttggacagggcaccaaggtggaaatcaaactcgaggacctgaagaacgtgttcccacctgaggtggccgtgttcgagcctagcgaggccgagatcagccacacccagaaagccaccctcgtgtgcctggctaccggcttctaccccgaccatgtggaactgtcttggtgggtcaacggcaaagaggtgcacagcggcgtgtgtaccgacccccagccactgaaagaacagcccgccctgaacgacagccggtactgcctgagcagcagactgagagtgtccgccaccttctggcagaacccccggaaccacttcagatgccaggtgcagttctacggcctgagcgagaacgacgagtggacccaggacagagccaagcccgtgacccagatcgtgtctgccgaagcctggggcagagccgattgcggctttaccagcgagagctaccagcagggcgtgctgagcgccaccaacctgagcgtgatcggcttcagaatcctgctgctgaaagtggccggctttaacctgctgatgaccctgcggctgtggtccagcagggccaagcgatctggatctggagcaacaaacttctcactactcaaacaagcaggtgacgtggaggagaatcccgggcctactagtatggactggatttggcgcatccttttccttgtcggcgctgctaccggcgcgcattccttcgaagaagtgcagcttgttgaatctggcggcggactggctaagcctggcggatctctgagactgtcttgtgccgccagcggcttccggttcaccttcaacaactactacatggactgggtccgacaggcccctggacaaggacttgaatgggtgtccagaatcagcagcagcggcgaccctacttggtacgccgattctgtgaagggcagattcaccatcagcagagagaacgccaagaacaccctgttcctccagatgaactccctgagagccgaggacaccgccgtgtactattgtgcctctctgaccaccggcagcgattcttggggacagggcgtgctggttaccgtgtcatctacgcgtatccagaaccctgatcctgccgtgtaccagctgcgggatagcaagagcagcgacaagagcgtgtgtctgttcaccgacttcgacagccagaccaacgtgtcccagagcaaggactccgacgtgtacatcaccgataagtgcgtgctggacatgcggagcatggacttcaagagcaactccgccgtggcctggtccaacaagtccgatttcgcctgcgccaacgccttcaacaacagcattatccccgaggacacattcttcccaagccccgagagcagctgcgacgtgaagctggtggaaaagagcttcgagacagacaccaacctgaacttccagatcctgtacgagatcctgctgggcaaggccaccctgtacgccgtgctggtgtctgccctggtgctgatggctatggtcaagcggaaggacagccgggga

SEQ ID NO: 5404 - DNA, 2262 bp, synthetic construct
  source 1..2262: mol_type = other DNA
atggccttaccagtgaccgccttgctcctgccgctggccttgctgctccacgccgccaggccggaagtgcagctggttgaatctggcggaggactggttcagcctggcggatctctgagactgtcttgtgccgccagcggcttcagcttcagcgacttttggatgagctgggtccgacaggcccctggcaaaggacttgaatgggtcgccacaatcagccaggccggcagcgagaaggactacgtggactctgtgaagggcagattcaccatcagccgggacaacgccaagaagtccctgtacctccagatgaacagcctgagagccgaggacaccgccgtgtactattgtgcctctggcgtgtacagcttcgactacagaggccagggcaccctggtcacagtctcttctggtaccggcggaggcggatctggcggcggaggtagcggtggcggaggatctgaattcgagatcgtgatgacacagagccccgccacactgagtgtgtctccaggcgaaagagccacactgtcctgtagagccagccagagcgtgtccagaaacctggcctggtatcagcagaagcctggacaggctccccggctgttgatctacggcgcttctacaagagccaccggcattcccgccagattttctggctctggcagcggcaccgagttcaccctgacaatcggaagcctccagagcgaggacttcgccgtgtactactgccagcagtacaagacctggcctcggacctttggacagggcaccaacgtggaaatcaaactcgaggacctgaagaacgtgttcccacctgaggtggccgtgttcgagcctagcgaggccgagatcagccacacccagaaagccaccctcgtgtgcctggctaccggcttctaccccgaccatgtggaactgtcttggtgggtcaacggcaaagaggtgcacagcggcgtgtgtaccgacccccagccactgaaagaacagcccgccctgaacgacagccggtactgcctgagcagcagactgagagtgtccgccaccttctggcagaacccccggaaccacttcagatgccaggtgcagttctacggcctgagcgagaacgacgagtggacccaggacagagccaagcccgtgacccagatcgtgtctgccgaagcctggggcagagccgattgcggctttaccagcgagagctaccagcagggcgtgctgagcgccaccaacctgagcgtgatcggcttcagaatcctgctgctgaaagtggccggctttaacctgctgatgaccctgcggctgtggtccagcagggccaagcgatctggatctggagcaacaaacttctcactactcaaacaagcaggtgacgtggaggagaatcccgggcctactagtatggactggatttggcgcatccttttccttgtcggcgctgctaccggcgcgcattccttcgaacaagttcagctgcaacaatggggagccggcctgctgaagcctagcgaaacactgtctctgacctgcgccgtgttcggcggctctttcagcggctactactggtcctggatcagacagcctcctggcaaaggactggaatggatcggcgagatcaaccaccggggcaacaccaacgacaaccccagcctgaaaagcagagtgaccatcagcgtggacaccagcaagaaccagttcgccctgaagctgagcagcgtgacagccgctgataccgccgtgtattattgcgccagagagcggggctacacctacggcaatttcgatcactggggccagggcaccctggtcacagtttcttctacgcgtatccagaaccctgatcctgccgtgtaccagctgcgggatagcaagagcagcgacaagagcgtgtgtctgttcaccgacttcgacagccagaccaacgtgtcccagagcaaggactccgacgtgtacatcaccgataagtgcgtgctggacatgcggagcatggacttcaagagcaactccgccgtggcctggtccaacaagtccgatttcgcctgcgccaacgccttcaacaacagcattatccccgaggacacattcttcccaagccccgagagcagctgcgacgtgaagctggtggaaaagagcttcgagacagacaccaacctgaacttccagatcctgtacgagatcctgctgggcaaggccaccctgtacgccgtgctggtgtctgccctggtgctgatggctatggtcaagcggaaggacagccgggga

SEQ ID NO: 5405 - DNA, 2265 bp, synthetic construct
  source 1..2265: mol_type = other DNA
atggccttaccagtgaccgccttgctcctgccgctggccttgctgctccacgccgccaggccggaagtgcagctggttgaatctggcggaggactggttcagcctggcggatctctgagactgtcttgtgccgccagcggcttcagcttcagcgacttttggatgagctgggtccgacaggcccctggcaaaggacttgaatgggtcgccacaatcagccaggccggcagcgagaaggactacgtggactctgtgaagggcagattcaccatcagccgggacaacgccaagaagtccctgtacctccagatgaacagcctgagagccgaggacaccgccgtgtactattgtgcctctggcgtgtacagcttcgactacagaggccagggcaccctggtcacagtctcttctggtaccggcggaggcggatctggcggcggaggtagcggtggcggaggatctgaattcgagatcgtgatgacccctagcagcgccacactgagtgtgtctccaggcgaaagagccacactgtcctgtagagccagccagagcgtgtccagaaacctggcctggtatcagcagaagcctggacaggctccccggctgttgatctacggcgcttctacaagagccaccggcattcccgccagattttctggctctggcagcggcaccgagttcaccctgacaatctctagcctccagagcgaggacttcgccgtgtactactgccaccagtacagcaactggatgtgcagcttcggccagggcaccaagctggaaatcaaactcgaggacctgaagaacgtgttcccacctgaggtggccgtgttcgagcctagcgaggccgagatcagccacacccagaaagccaccctcgtgtgcctggctaccggcttctaccccgaccatgtggaactgtcttggtgggtcaacggcaaagaggtgcacagcggcgtgtgtaccgacccccagccactgaaagaacagcccgccctgaacgacagccggtactgcctgagcagcagactgagagtgtccgccaccttctggcagaacccccggaaccacttcagatgccaggtgcagttctacggcctgagcgagaacgacgagtggacccaggacagagccaagcccgtgacccagatcgtgtctgccgaagcctggggcagagccgattgcggctttaccagcgagagctaccagcagggcgtgctgagcgccaccaacctgagcgtgatcggcttcagaatcctgctgctgaaagtggccggctttaacctgctgatgaccctgcggctgtggtccagcagggccaagcgatctggatctggagcaacaaacttctcactactcaaacaagcaggtgacgtggaggagaatcccgggcctactagtatggactggatttggcgcatccttttccttgtcggcgctgctaccggcgcgcattccttcgaagaagttcagctccttgagtcaggtggcggcctggttcaacctggcggatctctgagactgagctgtgccgccagcggcttcacctttagcagatacgccatgaactgggtccgacaggcccctggcaaaggactggaatgggtgtccggcatctctggaagcggcggcagaacctactacgccgattctgtgaagggcagattcaccatcagccgggacaacagcaagaacaccctgtacctccagatgaacagcctgagagccgaggacacagccgtgtattattgcgccaaggaccgggacttttggagcggcccttttgactattggggccagggaaccctggtcaccgttagctctacgcgtatccagaaccctgatcctgccgtgtaccagctgcgggatagcaagagcagcgacaagagcgtgtgtctgttcaccgacttcgacagccagaccaacgtgtcccagagcaaggactccgacgtgtacatcaccgataagtgcgtgctggacatgcggagcatggacttcaagagcaactccgccgtggcctggtccaacaagtccgatttcgcctgcgccaacgccttcaacaacagcattatccccgaggacacattcttcccaagccccgagagcagctgcgacgtgaagctggtggaaaagagcttcgagacagacaccaacctgaacttccagatcctgtacgagatcctgctgggcaaggccaccctgtacgccgtgctggtgtctgccctggtgctgatggctatggtcaagcggaaggacagccgggga

SEQ ID NO: 5406 - DNA, 2280 bp, synthetic construct
  source 1..2280: mol_type = other DNA
atggccttaccagtgaccgccttgctcctgccgctggccttgctgctccacgccgccaggccggaagtgcagctggttgaatctggcggaggactggttcagcctggcggatctctgagactgtcttgtgccgccagcggcttcagcttcagcgacttttggatgagctgggtccgacaggcccctggcaaaggacttgaatgggtcgccacaatcagccaggccggcagcgagaaggactacgtggactctgtgaagggcagattcaccatcagccgggacaacgccaagaagtccctgtacctccagatgaacagcctgagagccgaggacaccgccgtgtactattgtgcctctggcgtgtacagcttcgactacagaggccagggcaccctggtcacagtctcttctggtaccggcggaggcggatctggcggcggaggtagcggtggcggaggatctgaattcgacatccagatgacccagagccccagcagcctgtctgccagcgtgggcgacagagtgaccatcacatgcaaggccagcaagaacatcagaagctacctggcctggtatcagcagaagcccggcaaggcccccaagctgctgatctacagcggcagcacactgcacagcggcgtgcccagcagattttccggctctggcagcggcaccgacttcaccctgaccatctctagcctccagcccgaggacttcgccacctactactgccagcagcaccacgagtaccccctgacattcggccagggcaccaaggtggaaatcaagagactcgaggacctgaagaacgtgttcccacctgaggtggccgtgttcgagcctagcgaggccgagatcagccacacccagaaagccaccctcgtgtgcctggctaccggcttctaccccgaccatgtggaactgtcttggtgggtcaacggcaaagaggtgcacagcggcgtgtgtaccgacccccagccactgaaagaacagcccgccctgaacgacagccggtactgcctgagcagcagactgagagtgtccgccaccttctggcagaacccccggaaccacttcagatgccaggtgcagttctacggcctgagcgagaacgacgagtggacccaggacagagccaagcccgtgacccagatcgtgtctgccgaagcctggggcagagccgattgcggctttaccagcgagagctaccagcagggcgtgctgagcgccaccaacctgagcgtgatcggcttcagaatcctgctgctgaaagtggccggctttaacctgctgatgaccctgcggctgtggtccagcagggccaagcgatctggatctggagcaacaaacttctcactactcaaacaagcaggtgacgtggaggagaatcccgggcctactagtatggactggatttggcgcatccttttccttgtcggcgctgctaccggcgcgcattccttcgaacaggtgcaactccaggaatctggccccggactcgtgaagcccagcgagacactgagcctgacctgtaccgtgtccggctacaccatcaccagcggctacgactggtcctggatcagacagcctcctggcaagggcctggaatggatcggctacatcaactacggcggctccaccaactacaagcccagcctgggaagccgcgtgacaatcagcgtggacacctccaagaaccagttcagcctgaagctgagcagcgtgacagccgccgataccgccgtgtactactgcgcccggtacaacgagtacaagagctacatctacgattggtacttcgacttctggggccagggaaccctcgtgaccgtgtctagtacgcgtatccagaaccctgatcctgccgtgtaccagctgcgggatagcaagagcagcgacaagagcgtgtgtctgttcaccgacttcgacagccagaccaacgtgtcccagagcaaggactccgacgtgtacatcaccgataagtgcgtgctggacatgcggagcatggacttcaagagcaactccgccgtggcctggtccaacaagtccgatttcgcctgcgccaacgccttcaacaacagcattatccccgaggacacattcttcccaagccccgagagcagctgcgacgtgaagctggtggaaaagagcttcgagacagacaccaacctgaacttccagatcctgtacgagatcctgctgggcaaggccaccctgtacgccgtgctggtgtctgccctggtgctgatggctatggtcaagcggaaggacagccgggga

SEQ ID NO: 5407 - DNA, 2286 bp, synthetic construct
  source 1..2286: mol_type = other DNA
atggccttaccagtgaccgccttgctcctgccgctggccttgctgctccacgccgccaggccggaagtgcagctggttgaatctggcggaggactggttcagcctggcggatctctgagactgtcttgtgccgccagcggcttcagcttcagcgacttttggatgagctgggtccgacaggcccctggcaaaggacttgaatgggtcgccacaatcagccaggccggcagcgagaaggactacgtggactctgtgaagggcagattcaccatcagccgggacaacgccaagaagtccctgtacctccagatgaacagcctgagagccgaggacaccgccgtgtactattgtgcctctggcgtgtacagcttcgactacagaggccagggcaccctggtcacagtctcttctggtaccggcggaggcggatctggcggcggaggtagcggtggcggaggatctgaattccagtctgtggtcacacagcctccatccgtgtctgctgcccctggacagaaagtgaccatctcctgtagcggcagcagcagcaacatcggcaacaactacgtgtcctggtatcagcagctccccggcacagctcccaaactgctgatctacgacaacaacaagcggcccagcggcatccccgatagattttctggcagcaagagcggcaccagcgccacactgggaattaccggacttcagacaggcgacgaggccgactactactgtggcacatgggatggcagcctgtacaccatgcttttcggcggaggcaccaagctgacagtgcttctcgaggacctgaagaacgtgttcccacctgaggtggccgtgttcgagcctagcgaggccgagatcagccacacccagaaagccaccctcgtgtgcctggctaccggcttctaccccgaccatgtggaactgtcttggtgggtcaacggcaaagaggtgcacagcggcgtgtgtaccgacccccagccactgaaagaacagcccgccctgaacgacagccggtactgcctgagcagcagactgagagtgtccgccaccttctggcagaacccccggaaccacttcagatgccaggtgcagttctacggcctgagcgagaacgacgagtggacccaggacagagccaagcccgtgacccagatcgtgtctgccgaagcctggggcagagccgattgcggctttaccagcgagagctaccagcagggcgtgctgagcgccaccaacctgagcgtgatcggcttcagaatcctgctgctgaaagtggccggctttaacctgctgatgaccctgcggctgtggtccagcagggccaagcgatctggatctggagcaacaaacttctcactactcaaacaagcaggtgacgtggaggagaatcccgggcctactagtatggactggatttggcgcatccttttccttgtcggcgctgctaccggcgcgcattccttcgaagaagtgcaactggtggaatctggcggcggactggttaagcctggcggatctctgagactgtcttgtgccgccagcggcttcaccttcagcaatgcctggatgagctgggttcgacaggcccctggaaaaggactggaatgggtcggattcatccggtccaaagcctacggcggcaccacagaatatgccgcctctgtgaagggcagattcaccatcagccgggacgacagcaagtctatcgcctacctccagatgaacaacctgaaaaccgaggacaccgccgtgtactactgcgccagagatggcctgtacagcagctcttggtacgacagcgattactggggccagggcacactggtcacagtgtcatctacgcgtatccagaaccctgatcctgccgtgtaccagctgcgggatagcaagagcagcgacaagagcgtgtgtctgttcaccgacttcgacagccagaccaacgtgtcccagagcaaggactccgacgtgtacatcaccgataagtgcgtgctggacatgcggagcatggacttcaagagcaactccgccgtggcctggtccaacaagtccgatttcgcctgcgccaacgccttcaacaacagcattatccccgaggacacattcttcccaagccccgagagcagctgcgacgtgaagctggtggaaaagagcttcgagacagacaccaacctgaacttccagatcctgtacgagatcctgctgggcaaggccaccctgtacgccgtgctggtgtctgccctggtgctgatggctatggtcaagcggaaggacagccgggga

SEQ ID NO: 5408 - DNA, 2301 bp, synthetic construct
  source 1..2301: mol_type = other DNA
atggccttaccagtgaccgccttgctcctgccgctggccttgctgctccacgccgccaggccggaagtgcagctggttgaatctggcggaggactggttcagcctggcggatctctgagactgtcttgtgccgccagcggcttcagcttcagcgacttttggatgagctgggtccgacaggcccctggcaaaggacttgaatgggtcgccacaatcagccaggccggcagcgagaaggactacgtggactctgtgaagggcagattcaccatcagccgggacaacgccaagaagtccctgtacctccagatgaacagcctgagagccgaggacaccgccgtgtactattgtgcctctggcgtgtacagcttcgactacagaggccagggcaccctggtcacagtctcttctggtaccggcggaggcggatctggcggcggaggtagcggtggcggaggatctgaattccagtctgtgctgacacagcctcctagtgtgtctggcgctcctggacagagagtgaccatctcttgtaccggcagcagcagcaatatcggagccggctatgacgtgcactggtatcagcagctccctggcacagcccctaaactgctgatcttcggcaacagcaacagacccagcggcgtgcccgatagattcagcggctttaagagcggcacaagcgccagcctggctatcactggactgcaagccgaggacgaggccgactacttctgccagagctacgatagcagcctgagcggcagcggagtgtttggcacaggcaccaaagtgacagtgcttggcctcgaggacctgaagaacgtgttcccacctgaggtggccgtgttcgagcctagcgaggccgagatcagccacacccagaaagccaccctcgtgtgcctggctaccggcttctaccccgaccatgtggaactgtcttggtgggtcaacggcaaagaggtgcacagcggcgtgtgtaccgacccccagccactgaaagaacagcccgccctgaacgacagccggtactgcctgagcagcagactgagagtgtccgccaccttctggcagaacccccggaaccacttcagatgccaggtgcagttctacggcctgagcgagaacgacgagtggacccaggacagagccaagcccgtgacccagatcgtgtctgccgaagcctggggcagagccgattgcggctttaccagcgagagctaccagcagggcgtgctgagcgccaccaacctgagcgtgatcggcttcagaatcctgctgctgaaagtggccggctttaacctgctgatgaccctgcggctgtggtccagcagggccaagcgatctggatctggagcaacaaacttctcactactcaaacaagcaggtgacgtggaggagaatcccgggcctactagtatggactggatttggcgcatccttttccttgtcggcgctgctaccggcgcgcattccttcgaacaaatgcaactggttcaaagcggcggtggcctggtgcaacctggaagaagtctgagactgagctgtgccgccagcggcttcaccttcgatgattacgccatgcactgggtccgacaggcccctggaaaaggactggaatgggtgtccggcatctcctggaatagcggctctatcggctacgccgacagcgtgaagggcagattcaccatcagccgggacaacgccaagaacagcctgtacctccagatgaactccctgagagccgaggatacagccctgtactactgcgccaaggacatccacagcggcagctactacggcctgctgtactacgctatggacgtgtggggccagggcacaaccgtgacagtttcttctacgcgtatccagaaccctgatcctgccgtgtaccagctgcgggatagcaagagcagcgacaagagcgtgtgtctgttcaccgacttcgacagccagaccaacgtgtcccagagcaaggactccgacgtgtacatcaccgataagtgcgtgctggacatgcggagcatggacttcaagagcaactccgccgtggcctggtccaacaagtccgatttcgcctgcgccaacgccttcaacaacagcattatccccgaggacacattcttcccaagccccgagagcagctgcgacgtgaagctggtggaaaagagcttcgagacagacaccaacctgaacttccagatcctgtacgagatcctgctgggcaaggccaccctgtacgccgtgctggtgtctgccctggtgctgatggctatggtcaagcggaaggacagccgggga

SEQ ID NO: 5409 - DNA, 2301 bp, synthetic construct
  source 1..2301: mol_type = other DNA
atggccttaccagtgaccgccttgctcctgccgctggccttgctgctccacgccgccaggccggaagtgcagctggttgaatctggcggaggactggttcagcctggcggatctctgagactgtcttgtgccgccagcggcttcagcttcagcgacttttggatgagctgggtccgacaggcccctggcaaaggacttgaatgggtcgccacaatcagccaggccggcagcgagaaggactacgtggactctgtgaagggcagattcaccatcagccgggacaacgccaagaagtccctgtacctccagatgaacagcctgagagccgaggacaccgccgtgtactattgtgcctctggcgtgtacagcttcgactacagaggccagggcaccctggtcacagtctcttctggtaccggcggaggcggatctggcggcggaggtagcggtggcggaggatctgaattcctgcctgttctgacacagcctccatctgcctctggcacacctggacagagagtgaccatcagctgtagcggcagaagcagcaacatcggcagcaacagcgtgaactggtacagacagcttcctggcgctgcccctaagctgctgatctacagcaacaaccagcggcctcctggcgtgccagtcagattttctggcagcaagagcggcacaagcgccagcctggctatttctggactccagtctgaggacgaggccacctactactgtgccacctgggacgacaacctgaacgtgcactacgtgttcggcaccggcaccaaagtgacagtgcttggaagtagactcgaggacctgaagaacgtgttcccacctgaggtggccgtgttcgagcctagcgaggccgagatcagccacacccagaaagccaccctcgtgtgcctggctaccggcttctaccccgaccatgtggaactgtcttggtgggtcaacggcaaagaggtgcacagcggcgtgtgtaccgacccccagccactgaaagaacagcccgccctgaacgacagccggtactgcctgagcagcagactgagagtgtccgccaccttctggcagaacccccggaaccacttcagatgccaggtgcagttctacggcctgagcgagaacgacgagtggacccaggacagagccaagcccgtgacccagatcgtgtctgccgaagcctggggcagagccgattgcggctttaccagcgagagctaccagcagggcgtgctgagcgccaccaacctgagcgtgatcggcttcagaatcctgctgctgaaagtggccggctttaacctgctgatgaccctgcggctgtggtccagcagggccaagcgatctggatctggagcaacaaacttctcactactcaaacaagcaggtgacgtggaggagaatcccgggcctactagtatggactggatttggcgcatccttttccttgtcggcgctgctaccggcgcgcattccttcgaacttgaaatggctcaggtgcagctggtgcagagcggagccgaagtgaagaaacctggcagcagcgtgaaggtgtcctgcaaagcttctggcggcaccttcagcagctacgccatctcttgggttcgacaggcccctggacaaggactggaatggatgggcagaatcatccccatcctgggaatcgccaactacgcccagaaattccagggcagagtgacaatcaccgccgacaagagcaccagcaccgcctacatggaactgagcagcctgagaagcgaggacaccgccgtgtactattgtgcaagaggcggctactacagccacgacatgtggagcgaagattggggccagggcacactggtcacagtgtcatctacgcgtatccagaaccctgatcctgccgtgtaccagctgcgggatagcaagagcagcgacaagagcgtgtgtctgttcaccgacttcgacagccagaccaacgtgtcccagagcaaggactccgacgtgtacatcaccgataagtgcgtgctggacatgcggagcatggacttcaagagcaactccgccgtggcctggtccaacaagtccgatttcgcctgcgccaacgccttcaacaacagcattatccccgaggacacattcttcccaagccccgagagcagctgcgacgtgaagctggtggaaaagagcttcgagacagacaccaacctgaacttccagatcctgtacgagatcctgctgggcaaggccaccctgtacgccgtgctggtgtctgccctggtgctgatggctatggtcaagcggaaggacagccgggga

SEQ ID NO: 5410 - DNA, 2283 bp, synthetic construct
  source 1..2283: mol_type = other DNA
atggccttaccagtgaccgccttgctcctgccgctggccttgctgctccacgccgccaggccggaagtgcagctggttgaatctggcggaggactggttcagcctggcggatctctgagactgtcttgtgccgccagcggcttcagcttcagcgacttttggatgagctgggtccgacaggcccctggcaaaggacttgaatgggtcgccacaatcagccaggccggcagcgagaaggactacgtggactctgtgaagggcagattcaccatcagccgggacaacgccaagaagtccctgtacctccagatgaacagcctgagagccgaggacaccgccgtgtactattgtgcctctggcgtgtacagcttcgactacagaggccagggcaccctggtcacagtctcttctggtaccggcggaggcggatctggcggcggaggtagcggtggcggaggatctgaattcgacttcgtgatgacacagagccctgatagcctggccgtgtctctcggcgagcgagtgaccatgagctgcaagtctagccagagcctgctgaacagcggcaaccagaagaactacctgacctggtatcagcagaagcccggccagcctcctaagctgctgatctactgggccagcaccagagaaagcggcgtgcccgatagattttctggctctggcagcggcaccgacttcaccctgacaatttctagcctgcaagccgaggacgtggccgtgtactactgccagaacgactacagctacccctacaccttcggccagggcaccaagctggaaatcaaactcgaggacctgaagaacgtgttcccacctgaggtggccgtgttcgagcctagcgaggccgagatcagccacacccagaaagccaccctcgtgtgcctggctaccggcttctaccccgaccatgtggaactgtcttggtgggtcaacggcaaagaggtgcacagcggcgtgtgtaccgacccccagccactgaaagaacagcccgccctgaacgacagccggtactgcctgagcagcagactgagagtgtccgccaccttctggcagaacccccggaaccacttcagatgccaggtgcagttctacggcctgagcgagaacgacgagtggacccaggacagagccaagcccgtgacccagatcgtgtctgccgaagcctggggcagagccgattgcggctttaccagcgagagctaccagcagggcgtgctgagcgccaccaacctgagcgtgatcggcttcagaatcctgctgctgaaagtggccggctttaacctgctgatgaccctgcggctgtggtccagcagggccaagcgatctggatctggagcaacaaacttctcactactcaaacaagcaggtgacgtggaggagaatcccgggcctactagtatggactggatttggcgcatccttttccttgtcggcgctgctaccggcgcgcattccttcgaagaagtgcaactggttcagagcggagccgagctgaagaaacctggggccagcgtgaaggtgtcctgtaaagccagcggctacacctttaccgactactacatgaaatgggtccgacaggccccaggccagggactcgaatggatcggcgatattatccccagcaacggggccaccttctacaaccagaaattcaagggccgcgtgaccatcaccgtggacaagagcacaagcaccgcctacatggaactgagcagcctgagaagcgaggacaccgccgtgtattattgcgccagaagccatctgctgcgggccagttggttcgcctattggggacagggaaccctggtcaccgttagctctacgcgtatccagaaccctgatcctgccgtgtaccagctgcgggatagcaagagcagcgacaagagcgtgtgtctgttcaccgacttcgacagccagaccaacgtgtcccagagcaaggactccgacgtgtacatcaccgataagtgcgtgctggacatgcggagcatggacttcaagagcaactccgccgtggcctggtccaacaagtccgatttcgcctgcgccaacgccttcaacaacagcattatccccgaggacacattcttcccaagccccgagagcagctgcgacgtgaagctggtggaaaagagcttcgagacagacaccaacctgaacttccagatcctgtacgagatcctgctgggcaaggccaccctgtacgccgtgctggtgtctgccctggtgctgatggctatggtcaagcggaaggacagccgggga

SEQ ID NO: 5411 - DNA, 2283 bp, synthetic construct
  source 1..2283: mol_type = other DNA
atggccttaccagtgaccgccttgctcctgccgctggccttgctgctccacgccgccaggccggaagtgcagctggttgaatctggcggaggactggttcagcctggcggatctctgagactgtcttgtgccgccagcggcttcagcttcagcgacttttggatgagctgggtccgacaggcccctggcaaaggacttgaatgggtcgccacaatcagccaggccggcagcgagaaggactacgtggactctgtgaagggcagattcaccatcagccgggacaacgccaagaagtccctgtacctccagatgaacagcctgagagccgaggacaccgccgtgtactattgtgcctctggcgtgtacagcttcgactacagaggccagggcaccctggtcacagtctcttctggtaccggcggaggcggatctggcggcggaggtagcggtggcggaggatctgaattcgacttcgtgatgacacagagccctgatagcctggccgtgtctctcggcgagcgagtgaccatgagctgcaagtctagccagagcctgctgaacagcggcaaccagaagaactacctgacctggtatcagcagaagcccggccagcctcctaagctgctgatctactgggccagcaccagagaaagcggcgtgcccgatagattttctggctctggcagcggcaccgacttcaccctgacaatttctagcctgcaagccgaggacgtggccgtgtactactgccagaacgactacagctacccctacaccttcggccagggcaccaagctggaaatcaaactcgaggacctgaagaacgtgttcccacctgaggtggccgtgttcgagcctagcgaggccgagatcagccacacccagaaagccaccctcgtgtgcctggctaccggcttctaccccgaccatgtggaactgtcttggtgggtcaacggcaaagaggtgcacagcggcgtgtgtaccgacccccagccactgaaagaacagcccgccctgaacgacagccggtactgcctgagcagcagactgagagtgtccgccaccttctggcagaacccccggaaccacttcagatgccaggtgcagttctacggcctgagcgagaacgacgagtggacccaggacagagccaagcccgtgacccagatcgtgtctgccgaagcctggggcagagccgattgcggctttaccagcgagagctaccagcagggcgtgctgagcgccaccaacctgagcgtgatcggcttcagaatcctgctgctgaaagtggccggctttaacctgctgatgaccctgcggctgtggtccagcagggccaagcgatctggatctggagcaacaaacttctcactactcaaacaagcaggtgacgtggaggagaatcccgggcctactagtatggactggatttggcgcatccttttccttgtcggcgctgctaccggcgcgcattccttcgaacaagtgcaactggttcagagcggagccgagctgaagaaacctggggccagcgtgaaggtgtcctgtaaagccagcggctacacctttaccgactactacatgaaatgggtccgacaggccccaggccagggactcgaatggatcggcgatattatccccagcaacggggccaccttctacaaccagaaattcaagggccgcgtgaccatcaccgtggacaagagcacaagcaccgcctacatggaactgagcagcctgagaagcgaggacaccgccgtgtattattgcgccagaagccatctgctgcgggccagttggttcgcctattggggacagggaaccctggtcaccgttagctctacgcgtatccagaaccctgatcctgccgtgtaccagctgcgggatagcaagagcagcgacaagagcgtgtgtctgttcaccgacttcgacagccagaccaacgtgtcccagagcaaggactccgacgtgtacatcaccgataagtgcgtgctggacatgcggagcatggacttcaagagcaactccgccgtggcctggtccaacaagtccgatttcgcctgcgccaacgccttcaacaacagcattatccccgaggacacattcttcccaagccccgagagcagctgcgacgtgaagctggtggaaaagagcttcgagacagacaccaacctgaacttccagatcctgtacgagatcctgctgggcaaggccaccctgtacgccgtgctggtgtctgccctggtgctgatggctatggtcaagcggaaggacagccgggga

SEQ ID NO: 5412 - DNA, 2253 bp, synthetic construct
  source 1..2253: mol_type = other DNA
atggccttaccagtgaccgccttgctcctgccgctggccttgctgctccacgccgccaggccggaagtgcagctggttgaatctggcggaggactggttcagcctggcggatctctgagactgtcttgtgccgccagcggcttcagcttcagcgacttttggatgagctgggtccgacaggcccctggcaaaggacttgaatgggtcgccacaatcagccaggccggcagcgagaaggactacgtggactctgtgaagggcagattcaccatcagccgggacaacgccaagaagtccctgtacctccagatgaacagcctgagagccgaggacaccgccgtgtactattgtgcctctggcgtgtacagcttcgactacagaggccagggcaccctggtcacagtctcttctggtaccggcggaggcggatctggcggcggaggtagcggtggcggaggatctgaattcgacgtgcagatcacacagagccctagctacctggctgcctctcctggcgagacaatcaccatcaactgtcgggccagcaagagcatcagcaaggacctggcctggtatcaagagaagcccggcaagaccaacaagctgctgatctacagcggcagcacactccagtctggcatccccagcagattttccggctctggcagcggcaccgatttcaccctgaccataagcagcctggaacctgaggacttcgccatgtactactgccagcagcacaacaagtacccctacacctttggcggaggcaccaagctggaaatcaagagactcgaggacctgaagaacgtgttcccacctgaggtggccgtgttcgagcctagcgaggccgagatcagccacacccagaaagccaccctcgtgtgcctggctaccggcttctaccccgaccatgtggaactgtcttggtgggtcaacggcaaagaggtgcacagcggcgtgtgtaccgacccccagccactgaaagaacagcccgccctgaacgacagccggtactgcctgagcagcagactgagagtgtccgccaccttctggcagaacccccggaaccacttcagatgccaggtgcagttctacggcctgagcgagaacgacgagtggacccaggacagagccaagcccgtgacccagatcgtgtctgccgaagcctggggcagagccgattgcggctttaccagcgagagctaccagcagggcgtgctgagcgccaccaacctgagcgtgatcggcttcagaatcctgctgctgaaagtggccggctttaacctgctgatgaccctgcggctgtggtccagcagggccaagcgatctggatctggagcaacaaacttctcactactcaaacaagcaggtgacgtggaggagaatcccgggcctactagtatggactggatttggcgcatccttttccttgtcggcgctgctaccggcgcgcattccttcgaacaagttcaactgcaacagcctggggccgagcttgttagacctggcgcttctgtgaagctgagctgcaaggccagcggctacaccttcaccagctactggatgaactgggtcaagcagcggcctgaccagggcctcgaatggatcggcagaatcgacccctacgacagcgagacacactacaaccagaagttcaaggacaaggccatcctgaccgtggacaagagcagctccaccgcctacatgcaactgagcagcctgacctctgaggatagcgccgtgtactattgcgccagaggcaactgggacgactattggggccagggcacaaccctgacagtgtctagtacgcgtatccagaaccctgatcctgccgtgtaccagctgcgggatagcaagagcagcgacaagagcgtgtgtctgttcaccgacttcgacagccagaccaacgtgtcccagagcaaggactccgacgtgtacatcaccgataagtgcgtgctggacatgcggagcatggacttcaagagcaactccgccgtggcctggtccaacaagtccgatttcgcctgcgccaacgccttcaacaacagcattatccccgaggacacattcttcccaagccccgagagcagctgcgacgtgaagctggtggaaaagagcttcgagacagacaccaacctgaacttccagatcctgtacgagatcctgctgggcaaggccaccctgtacgccgtgctggtgtctgccctggtgctgatggctatggtcaagcggaaggacagccgggga

SEQ ID NO: 5413 - DNA, 2259 bp, synthetic construct
  source 1..2259: mol_type = other DNA
atggccttaccagtgaccgccttgctcctgccgctggccttgctgctccacgccgccaggccggaagtgcagctggttgaatctggcggaggactggttcagcctggcggatctctgagactgtcttgtgccgccagcggcttcagcttcagcgacttttggatgagctgggtccgacaggcccctggcaaaggacttgaatgggtcgccacaatcagccaggccggcagcgagaaggactacgtggactctgtgaagggcagattcaccatcagccgggacaacgccaagaagtccctgtacctccagatgaacagcctgagagccgaggacaccgccgtgtactattgtgcctctggcgtgtacagcttcgactacagaggccagggcaccctggtcacagtctcttctggtaccggcggaggcggatctggcggcggaggtagcggtggcggaggatctgaattcgagatcgtgctgacacagagccctaccagcatgacagcctctccaggcgagcaagtgaccatcacctgtagagccagcagcagcatcaactacatgcactggtatcagcagaagcctggcgcaagccccagaccttggatctacgagacaagcaagctggcctccggcgtgcccgatagattttctggatctgccagcggcaccagctacagcctgaccatcaacaacatggaagccgaggacgccgccacctactactgccagcagtggaattacccctcctggacctttggcggaggcaccaagctggaacttaaactcgaggacctgaagaacgtgttcccacctgaggtggccgtgttcgagcctagcgaggccgagatcagccacacccagaaagccaccctcgtgtgcctggctaccggcttctaccccgaccatgtggaactgtcttggtgggtcaacggcaaagaggtgcacagcggcgtgtgtaccgacccccagccactgaaagaacagcccgccctgaacgacagccggtactgcctgagcagcagactgagagtgtccgccaccttctggcagaacccccggaaccacttcagatgccaggtgcagttctacggcctgagcgagaacgacgagtggacccaggacagagccaagcccgtgacccagatcgtgtctgccgaagcctggggcagagccgattgcggctttaccagcgagagctaccagcagggcgtgctgagcgccaccaacctgagcgtgatcggcttcagaatcctgctgctgaaagtggccggctttaacctgctgatgaccctgcggctgtggtccagcagggccaagcgatctggatctggagcaacaaacttctcactactcaaacaagcaggtgacgtggaggagaatcccgggcctactagtatggactggatttggcgcatccttttccttgtcggcgctgctaccggcgcgcattccttcgaagaagtgcagctcgttgagtctggtggcggactggttcagcctggaagaagcctgaagctgagctgtgccgccagcggcttcaccttcagcgactacaatatggcctgggtccgacaggcccctaagaaaggactggaatgggtcgccaccatcctgtacgatggcggcagaacctactaccggggcagcgtgaagggcagattcaccatcagcagagacaacgccaagagcaccctgtacctgcggatggactctctgagaagcgaggataccgccacatattactgtgccacacacagccggggcaccgactactttgattattggggccagggcgtgatggttaccgtgtctagtacgcgtatccagaaccctgatcctgccgtgtaccagctgcgggatagcaagagcagcgacaagagcgtgtgtctgttcaccgacttcgacagccagaccaacgtgtcccagagcaaggactccgacgtgtacatcaccgataagtgcgtgctggacatgcggagcatggacttcaagagcaactccgccgtggcctggtccaacaagtccgatttcgcctgcgccaacgccttcaacaacagcattatccccgaggacacattcttcccaagccccgagagcagctgcgacgtgaagctggtggaaaagagcttcgagacagacaccaacctgaacttccagatcctgtacgagatcctgctgggcaaggccaccctgtacgccgtgctggtgtctgccctggtgctgatggctatggtcaagcggaaggacagccgggga

SEQ ID NO: 5414 - DNA, 2286 bp, synthetic construct
  source 1..2286: mol_type = other DNA
atggccttaccagtgaccgccttgctcctgccgctggccttgctgctccacgccgccaggccggaagtgcagctggttgaatctggcggaggactggttcagcctggcggatctctgagactgtcttgtgccgccagcggcttcagcttcagcgacttttggatgagctgggtccgacaggcccctggcaaaggacttgaatgggtcgccacaatcagccaggccggcagcgagaaggactacgtggactctgtgaagggcagattcaccatcagccgggacaacgccaagaagtccctgtacctccagatgaacagcctgagagccgaggacaccgccgtgtactattgtgcctctggcgtgtacagcttcgactacagaggccagggcaccctggtcacagtctcttctggtaccggcggaggcggatctggcggcggaggtagcggtggcggaggatctgaattcgacatcgtgatgacacagagcccttctagcctggccgtgtctgagggcgagacagtgaccatcaactgcaagagcagccagagcttcctgtctagcggcgacggcaagaattacgtggcctggtatcagtacaagcccggacagagccccaagctgctgatctactgggccagcacaagacagagcggcgtgcccgatagattcatcggctctggcagcggcaccgacttcaccctgacaatctctacagtgcaggccgaggacctggctatctactactgccagcagtattacgacacccctctgacctttggctccggcaccaagctggaaatcaaactcgaggacctgaagaacgtgttcccacctgaggtggccgtgttcgagcctagcgaggccgagatcagccacacccagaaagccaccctcgtgtgcctggctaccggcttctaccccgaccatgtggaactgtcttggtgggtcaacggcaaagaggtgcacagcggcgtgtgtaccgacccccagccactgaaagaacagcccgccctgaacgacagccggtactgcctgagcagcagactgagagtgtccgccaccttctggcagaacccccggaaccacttcagatgccaggtgcagttctacggcctgagcgagaacgacgagtggacccaggacagagccaagcccgtgacccagatcgtgtctgccgaagcctggggcagagccgattgcggctttaccagcgagagctaccagcagggcgtgctgagcgccaccaacctgagcgtgatcggcttcagaatcctgctgctgaaagtggccggctttaacctgctgatgaccctgcggctgtggtccagcagggccaagcgatctggatctggagcaacaaacttctcactactcaaacaagcaggtgacgtggaggagaatcccgggcctactagtatggactggatttggcgcatccttttccttgtcggcgctgctaccggcgcgcattccttcgaagaagtgaagctgcaagagtctggccccagcctggtgcagagtagccaaacactgagcctgacctgtaccgtgtccggctttagcctgaccagctaccacatccactgggtccgacagacccctggcaaaggactggaatggatgggcgtgatgtggagcgacggcgacaccagctataacagcgccctgaagtcccggctgagcatcagcagagatacaagccagagccaggtgttcctgaagatgaacagcctccagaccgaggacaccgccacctactattgtgccagaggctactacagcagctacctgtacctttggttcgcctattggggccagggcaccctggttacagtcagctctacgcgtatccagaaccctgatcctgccgtgtaccagctgcgggatagcaagagcagcgacaagagcgtgtgtctgttcaccgacttcgacagccagaccaacgtgtcccagagcaaggactccgacgtgtacatcaccgataagtgcgtgctggacatgcggagcatggacttcaagagcaactccgccgtggcctggtccaacaagtccgatttcgcctgcgccaacgccttcaacaacagcattatccccgaggacacattcttcccaagccccgagagcagctgcgacgtgaagctggtggaaaagagcttcgagacagacaccaacctgaacttccagatcctgtacgagatcctgctgggcaaggccaccctgtacgccgtgctggtgtctgccctggtgctgatggctatggtcaagcggaaggacagccgggga

SEQ ID NO: 5415 - DNA, 2298 bp, synthetic construct
  source 1..2298: mol_type = other DNA
atggccttaccagtgaccgccttgctcctgccgctggccttgctgctccacgccgccaggccggaagtgcagctggttgaatctggcggaggactggttcagcctggcggatctctgagactgtcttgtgccgccagcggcttcagcttcagcgacttttggatgagctgggtccgacaggcccctggcaaaggacttgaatgggtcgccacaatcagccaggccggcagcgagaaggactacgtggactctgtgaagggcagattcaccatcagccgggacaacgccaagaagtccctgtacctccagatgaacagcctgagagccgaggacaccgccgtgtactattgtgcctctggcgtgtacagcttcgactacagaggccagggcaccctggtcacagtctcttctggtaccggcggaggcggatctggcggcggaggtagcggtggcggaggatctgaattcgacgtgctgatgacccagacacctgtgtctctgccagtgtctctcggaggccaggtgtccatctcctgtagaagcagccagagcctggtgcactccgacggcgatacctacctgcactggtatctccagaagcctggacagagccctcagctcctgatctaccgggtgtccaacagattcagcggcgtgcccgatagattttccggcagcggctctggcaccgacttcaccctgaagatcagcagagtggaacccgaggacctgggcctgtactactgtctccagaccacacacttcccaccttggacctttggcggaggcaccaagctggaaatgaaactcgaggacctgaagaacgtgttcccacctgaggtggccgtgttcgagcctagcgaggccgagatcagccacacccagaaagccaccctcgtgtgcctggctaccggcttctaccccgaccatgtggaactgtcttggtgggtcaacggcaaagaggtgcacagcggcgtgtgtaccgacccccagccactgaaagaacagcccgccctgaacgacagccggtactgcctgagcagcagactgagagtgtccgccaccttctggcagaacccccggaaccacttcagatgccaggtgcagttctacggcctgagcgagaacgacgagtggacccaggacagagccaagcccgtgacccagatcgtgtctgccgaagcctggggcagagccgattgcggctttaccagcgagagctaccagcagggcgtgctgagcgccaccaacctgagcgtgatcggcttcagaatcctgctgctgaaagtggccggctttaacctgctgatgaccctgcggctgtggtccagcagggccaagcgatctggatctggagcaacaaacttctcactactcaaacaagcaggtgacgtggaggagaatcccgggcctactagtatggactggatttggcgcatccttttccttgtcggcgctgctaccggcgcgcattccttcgaacaggttcagctccagcagtctggacccgagcttagaaggccaggatctagcgtcagactgagctgcaaggccagcggctaccggatcaaggacttcctgatccactggattaagaacagacccgagcacggcctggaatggatcggatggattgaccctgaggacggcgagactaagtacgcccagaagttccagaccaaggccacactgaccgccgacacctctagcaacaccgcctacatgcaactgagcagcctgaccagcgaggacaccgccacctacttttgtgctagatggggcgacgtgtactacggcctgatgagaggccatgtgatggatgcctggggccagggaacaagcgtgacagtctcttctacgcgtatccagaaccctgatcctgccgtgtaccagctgcgggatagcaagagcagcgacaagagcgtgtgtctgttcaccgacttcgacagccagaccaacgtgtcccagagcaaggactccgacgtgtacatcaccgataagtgcgtgctggacatgcggagcatggacttcaagagcaactccgccgtggcctggtccaacaagtccgatttcgcctgcgccaacgccttcaacaacagcattatccccgaggacacattcttcccaagccccgagagcagctgcgacgtgaagctggtggaaaagagcttcgagacagacaccaacctgaacttccagatcctgtacgagatcctgctgggcaaggccaccctgtacgccgtgctggtgtctgccctggtgctgatggctatggtcaagcggaaggacagccgggga

SEQ ID NO: 5416 - DNA, 2283 bp, synthetic construct
  source 1..2283: mol_type = other DNA
atggccttaccagtgaccgccttgctcctgccgctggccttgctgctccacgccgccaggccggaagtgcagctggttgaatctggcggaggactggttcagcctggcggatctctgagactgtcttgtgccgccagcggcttcagcttcagcgacttttggatgagctgggtccgacaggcccctggcaaaggacttgaatgggtcgccacaatcagccaggccggcagcgagaaggactacgtggactctgtgaagggcagattcaccatcagccgggacaacgccaagaagtccctgtacctccagatgaacagcctgagagccgaggacaccgccgtgtactattgtgcctctggcgtgtacagcttcgactacagaggccagggcaccctggtcacagtctcttctggtaccggcggaggcggatctggcggcggaggtagcggtggcggaggatctgaattcgacatcgtgatgacacagagccccgccacactgtcactgtctccaggcgaaagagccacactgagctgtcggagcagcaagagcctccagaacgtgaacggcaacacctacctgtactggttccagcagaagcccggccagtctcctcagctcctgatctacagaatgagcaacctgaacagcggcgtgcccgacagattttctggcagcggaagcggcaccgagttcaccctgaccataagcagcctggaacctgaggacttcgccgtgtactactgtatgcagcacctggaataccccatcaccttcggagccggcaccaagctggaaatcaaactcgaggacctgaagaacgtgttcccacctgaggtggccgtgttcgagcctagcgaggccgagatcagccacacccagaaagccaccctcgtgtgcctggctaccggcttctaccccgaccatgtggaactgtcttggtgggtcaacggcaaagaggtgcacagcggcgtgtgtaccgacccccagccactgaaagaacagcccgccctgaacgacagccggtactgcctgagcagcagactgagagtgtccgccaccttctggcagaacccccggaaccacttcagatgccaggtgcagttctacggcctgagcgagaacgacgagtggacccaggacagagccaagcccgtgacccagatcgtgtctgccgaagcctggggcagagccgattgcggctttaccagcgagagctaccagcagggcgtgctgagcgccaccaacctgagcgtgatcggcttcagaatcctgctgctgaaagtggccggctttaacctgctgatgaccctgcggctgtggtccagcagggccaagcgatctggatctggagcaacaaacttctcactactcaaacaagcaggtgacgtggaggagaatcccgggcctactagtatggactggatttggcgcatccttttccttgtcggcgctgctaccggcgcgcattccttcgaagaagtgcaactggttgaatctggcggcggactggttaagcctggcggatctctgaagctgagctgtgccgccagcggctacacctttaccagctacgtgatgcactgggtccgacaggcccctggcaaaggacttgagtggatcggctacatcaacccctacaacgatggcaccaagtacaacgagaagttccagggcagagtgaccatcagctccgacaagagcatcagcaccgcctacatggaactgagcagcctgagaagcgaggataccgccatgtactattgcgccagaggcacctactactacggcaccagagtgttcgactactggggccagggaaccctggtcacagtctcttctacgcgtatccagaaccctgatcctgccgtgtaccagctgcgggatagcaagagcagcgacaagagcgtgtgtctgttcaccgacttcgacagccagaccaacgtgtcccagagcaaggactccgacgtgtacatcaccgataagtgcgtgctggacatgcggagcatggacttcaagagcaactccgccgtggcctggtccaacaagtccgatttcgcctgcgccaacgccttcaacaacagcattatccccgaggacacattcttcccaagccccgagagcagctgcgacgtgaagctggtggaaaagagcttcgagacagacaccaacctgaacttccagatcctgtacgagatcctgctgggcaaggccaccctgtacgccgtgctggtgtctgccctggtgctgatggctatggtcaagcggaaggacagccgggga

SEQ ID NO: 5417 - DNA, 2271 bp, synthetic construct
  source 1..2271: mol_type = other DNA
atggccttaccagtgaccgccttgctcctgccgctggccttgctgctccacgccgccaggccggaagtgcagctggttgaatctggcggaggactggttcagcctggcggatctctgagactgtcttgtgccgccagcggcttcagcttcagcgacttttggatgagctgggtccgacaggcccctggcaaaggacttgaatgggtcgccacaatcagccaggccggcagcgagaaggactacgtggactctgtgaagggcagattcaccatcagccgggacaacgccaagaagtccctgtacctccagatgaacagcctgagagccgaggacaccgccgtgtactattgtgcctctggcgtgtacagcttcgactacagaggccagggcaccctggtcacagtctcttctggtaccggcggaggcggatctggcggcggaggtagcggtggcggaggatctgaattcgacatccagatgacacagagccctagcagcctgtctgccagcgtgggagacagagtgaccatcacatgcaaggccagcgaccacatcaacaactggctggcctggtatcagcagaagcctggacaggcccctaagctgctgatctacggcgctaccacactggaaacaggcgtgcccagcagattttctggcagcggctctggcaccgactacaccctgacaatatccagcctccagcctgaggacttcgccacctactactgtcagcagagctggaacaccccttggacattcggccagggcaccaagctggaaatcaagagactcgaggacctgaagaacgtgttcccacctgaggtggccgtgttcgagcctagcgaggccgagatcagccacacccagaaagccaccctcgtgtgcctggctaccggcttctaccccgaccatgtggaactgtcttggtgggtcaacggcaaagaggtgcacagcggcgtgtgtaccgacccccagccactgaaagaacagcccgccctgaacgacagccggtactgcctgagcagcagactgagagtgtccgccaccttctggcagaacccccggaaccacttcagatgccaggtgcagttctacggcctgagcgagaacgacgagtggacccaggacagagccaagcccgtgacccagatcgtgtctgccgaagcctggggcagagccgattgcggctttaccagcgagagctaccagcagggcgtgctgagcgccaccaacctgagcgtgatcggcttcagaatcctgctgctgaaagtggccggctttaacctgctgatgaccctgcggctgtggtccagcagggccaagcgatctggatctggagcaacaaacttctcactactcaaacaagcaggtgacgtggaggagaatcccgggcctactagtatggactggatttggcgcatccttttccttgtcggcgctgctaccggcgcgcattccttcgaacaagttcagcttcaacagcctggcgctgagctggtcaaacctggcgcttctgtgaagatgagctgcaaagccagcggctacgccttcagcagctactggatcaactggatgaagcagaaacccggccagggactcgaatggatcggccaaatctatcccggcgacggcgacaccaactacaacggcaagttcaagggcagagccacactgaccgccgatacctctagcagcacagcctacatgcagctgagcagcctgaccagcgaagatagcgccgtgtacttctgtgcccggtccatcacaacagtcgtgggctgcgctatggactattggggccagggaacaagcgtgaccgtgtctagtacgcgtatccagaaccctgatcctgccgtgtaccagctgcgggatagcaagagcagcgacaagagcgtgtgtctgttcaccgacttcgacagccagaccaacgtgtcccagagcaaggactccgacgtgtacatcaccgataagtgcgtgctggacatgcggagcatggacttcaagagcaactccgccgtggcctggtccaacaagtccgatttcgcctgcgccaacgccttcaacaacagcattatccccgaggacacattcttcccaagccccgagagcagctgcgacgtgaagctggtggaaaagagcttcgagacagacaccaacctgaacttccagatcctgtacgagatcctgctgggcaaggccaccctgtacgccgtgctggtgtctgccctggtgctgatggctatggtcaagcggaaggacagccgggga

SEQ ID NO: 5418 - DNA, 2277 bp, synthetic construct
  source 1..2277: mol_type = other DNA
atggccttaccagtgaccgccttgctcctgccgctggccttgctgctccacgccgccaggccggaagtgcagctggttgaatctggcggaggactggttcagcctggcggatctctgagactgtcttgtgccgccagcggcttcagcttcagcgacttttggatgagctgggtccgacaggcccctggcaaaggacttgaatgggtcgccacaatcagccaggccggcagcgagaaggactacgtggactctgtgaagggcagattcaccatcagccgggacaacgccaagaagtccctgtacctccagatgaacagcctgagagccgaggacaccgccgtgtactattgtgcctctggcgtgtacagcttcgactacagaggccagggcaccctggtcacagtctcttctggtaccggcggaggcggatctggcggcggaggtagcggtggcggaggatctgaattccagatcgtgctgtctcagtctcctgccatcctgagcgcttccccaggcgagaaagtgaccatgacctgtagagccagcagcagcgtgtcctacatgcactggtatcagcagaagcccggcagcagccctaagccttggatctacgccaccagcaatctggcctctggcgtgccagccagattttctggctctggcagcggcaccagctacagcttcacaatcagcagagtggaagccgaggacgccgccacctactattgtcagcagtggaccttcaatcctcctaccttcggcggaggcacccggctggaaatcaaaagaacagtggctgctctcgaggacctgaagaacgtgttcccacctgaggtggccgtgttcgagcctagcgaggccgagatcagccacacccagaaagccaccctcgtgtgcctggctaccggcttctaccccgaccatgtggaactgtcttggtgggtcaacggcaaagaggtgcacagcggcgtgtgtaccgacccccagccactgaaagaacagcccgccctgaacgacagccggtactgcctgagcagcagactgagagtgtccgccaccttctggcagaacccccggaaccacttcagatgccaggtgcagttctacggcctgagcgagaacgacgagtggacccaggacagagccaagcccgtgacccagatcgtgtctgccgaagcctggggcagagccgattgcggctttaccagcgagagctaccagcagggcgtgctgagcgccaccaacctgagcgtgatcggcttcagaatcctgctgctgaaagtggccggctttaacctgctgatgaccctgcggctgtggtccagcagggccaagcgatctggatctggagcaacaaacttctcactactcaaacaagcaggtgacgtggaggagaatcccgggcctactagtatggactggatttggcgcatccttttccttgtcggcgctgctaccggcgcgcattccttcgaacaggcttatctgcaacagagcggagccgaactcgtcagacctggcgcttctgtgaagatgagctgcaaggccagcggctacaccttcaccagctataatatgcactgggtcaagcagacccctcggcagggactcgaatggatcggcggaatctatcccggcaacggcgacacctcctacaaccagaagttcaagggcaaagccacactgaccgtgggcaagagcagcagcaccgcctatatgcagctcagcagcctgaccagcgaggacagcgccgtgtacttctgcgccagatacgactacaactacgctatggactactggggccagggcaccagcgtgacagttagctctgccagcacgcgtatccagaaccctgatcctgccgtgtaccagctgcgggatagcaagagcagcgacaagagcgtgtgtctgttcaccgacttcgacagccagaccaacgtgtcccagagcaaggactccgacgtgtacatcaccgataagtgcgtgctggacatgcggagcatggacttcaagagcaactccgccgtggcctggtccaacaagtccgatttcgcctgcgccaacgccttcaacaacagcattatccccgaggacacattcttcccaagccccgagagcagctgcgacgtgaagctggtggaaaagagcttcgagacagacaccaacctgaacttccagatcctgtacgagatcctgctgggcaaggccaccctgtacgccgtgctggtgtctgccctggtgctgatggctatggtcaagcggaaggacagccgggga

SEQ ID NO: 5419 - DNA, 2271 bp, synthetic construct
  source 1..2271: mol_type = other DNA
atggccttaccagtgaccgccttgctcctgccgctggccttgctgctccacgccgccaggccggaagtgcagctggttgaatctggcggaggactggttcagcctggcggatctctgagactgtcttgtgccgccagcggcttcagcttcagcgacttttggatgagctgggtccgacaggcccctggcaaaggacttgaatgggtcgccacaatcagccaggccggcagcgagaaggactacgtggactctgtgaagggcagattcaccatcagccgggacaacgccaagaagtccctgtacctccagatgaacagcctgagagccgaggacaccgccgtgtactattgtgcctctggcgtgtacagcttcgactacagaggccagggcaccctggtcacagtctcttctggtaccggcggaggcggatctggcggcggaggtagcggtggcggaggatctgaattcgagatcgtgctgacacagagccctgccaccctgtctctgagccctggcgaaagagccaccctgagctgtagagccagccagagcgtgtccagctacctggcctggtatcagcagaagcccggccaggctccccggctgctgatctacgatgccagcaatagagccaccggcatccccgccagattttccggctctggcagcggcaccgacttcaccctgaccatcagctccctggaacccgaggacttcgccgtgtactactgccagcagcggagcaactggcccatcacattcggccagggcacccggctggaaatcaaactcgaggacctgaagaacgtgttcccacctgaggtggccgtgttcgagcctagcgaggccgagatcagccacacccagaaagccaccctcgtgtgcctggctaccggcttctaccccgaccatgtggaactgtcttggtgggtcaacggcaaagaggtgcacagcggcgtgtgtaccgacccccagccactgaaagaacagcccgccctgaacgacagccggtactgcctgagcagcagactgagagtgtccgccaccttctggcagaacccccggaaccacttcagatgccaggtgcagttctacggcctgagcgagaacgacgagtggacccaggacagagccaagcccgtgacccagatcgtgtctgccgaagcctggggcagagccgattgcggctttaccagcgagagctaccagcagggcgtgctgagcgccaccaacctgagcgtgatcggcttcagaatcctgctgctgaaagtggccggctttaacctgctgatgaccctgcggctgtggtccagcagggccaagcgatctggatctggagcaacaaacttctcactactcaaacaagcaggtgacgtggaggagaatcccgggcctactagtatggactggatttggcgcatccttttccttgtcggcgctgctaccggcgcgcattccttcgaagaggtgcagcttgttgagtctggcggaggactggtgcagcccgatagaagcctgagactgtcttgtgccgccagcggcttcaccttccacgattatgccatgcactgggtccgacaggcccctggcaaaggacttgaatgggtgtccaccatctcttggaacagcggcacaatcggctacgccgactctgtgaagggcagattcaccatcagccgggacaacgccaagaacagcctgtacctccagatgaactccctgagagccgaggacacagccctgtactactgcgccaaggacatccagtacggcaactactactacggcatggacgtgtggggccagggcacaacagtgacagtctcttctacgcgtatccagaaccctgatcctgccgtgtaccagctgcgggatagcaagagcagcgacaagagcgtgtgtctgttcaccgacttcgacagccagaccaacgtgtcccagagcaaggactccgacgtgtacatcaccgataagtgcgtgctggacatgcggagcatggacttcaagagcaactccgccgtggcctggtccaacaagtccgatttcgcctgcgccaacgccttcaacaacagcattatccccgaggacacattcttcccaagccccgagagcagctgcgacgtgaagctggtggaaaagagcttcgagacagacaccaacctgaacttccagatcctgtacgagatcctgctgggcaaggccaccctgtacgccgtgctggtgtctgccctggtgctgatggctatggtcaagcggaaggacagccgggga

SEQ ID NO: 5420 - DNA, 2256 bp, synthetic construct
  source 1..2256: mol_type = other DNA
atggccttaccagtgaccgccttgctcctgccgctggccttgctgctccacgccgccaggccggaagtgcagctggttgaatctggcggaggactggttcagcctggcggatctctgagactgtcttgtgccgccagcggcttcagcttcagcgacttttggatgagctgggtccgacaggcccctggcaaaggacttgaatgggtcgccacaatcagccaggccggcagcgagaaggactacgtggactctgtgaagggcagattcaccatcagccgggacaacgccaagaagtccctgtacctccagatgaacagcctgagagccgaggacaccgccgtgtactattgtgcctctggcgtgtacagcttcgactacagaggccagggcaccctggtcacagtctcttctggtaccggcggaggcggatctggcggcggaggtagcggtggcggaggatctgaattcgacatccagatgacacagagccctagcagcctgtctgccagcgtgggagatagagtgaccatcaactgcaaggccagccaggacatcaacagctacctgagctggttccagcagaagcctggcaaggcccctaagacactgatctaccgggccaacagactggtggatggcgtgccaagcagattttctggcagcggcagcggccaggattacaccctgacaatatccagcctccagcctgaggacttcgccacctactactgcctccagtacgacgagttccctctgacctttggcggaggcaccaaggtggaaatcaaactcgaggacctgaagaacgtgttcccacctgaggtggccgtgttcgagcctagcgaggccgagatcagccacacccagaaagccaccctcgtgtgcctggctaccggcttctaccccgaccatgtggaactgtcttggtgggtcaacggcaaagaggtgcacagcggcgtgtgtaccgacccccagccactgaaagaacagcccgccctgaacgacagccggtactgcctgagcagcagactgagagtgtccgccaccttctggcagaacccccggaaccacttcagatgccaggtgcagttctacggcctgagcgagaacgacgagtggacccaggacagagccaagcccgtgacccagatcgtgtctgccgaagcctggggcagagccgattgcggctttaccagcgagagctaccagcagggcgtgctgagcgccaccaacctgagcgtgatcggcttcagaatcctgctgctgaaagtggccggctttaacctgctgatgaccctgcggctgtggtccagcagggccaagcgatctggatctggagcaacaaacttctcactactcaaacaagcaggtgacgtggaggagaatcccgggcctactagtatggactggatttggcgcatccttttccttgtcggcgctgctaccggcgcgcattccttcgaacaggtgcaactggtgcagtctggggccgaagtgaagaaacctggggcctctgtgaaggtgtcctgcaaagccagcggctacacctttaccaactacgacatcaactgggtccgacaggctccaggccaaggactggaatggatcggctggatctatcctggcgacggcagcaccaagtacaacgagaagttcaaggccaaggccacactgaccgccgataccagcacaagcaccgcctacatggaactgcggagcctgagaagcgacgacaccgccgtgtactattgtgcctccggctacgaggacgctatggactattggggccagggcaccaccgtgacagtgtctagtacgcgtatccagaaccctgatcctgccgtgtaccagctgcgggatagcaagagcagcgacaagagcgtgtgtctgttcaccgacttcgacagccagaccaacgtgtcccagagcaaggactccgacgtgtacatcaccgataagtgcgtgctggacatgcggagcatggacttcaagagcaactccgccgtggcctggtccaacaagtccgatttcgcctgcgccaacgccttcaacaacagcattatccccgaggacacattcttcccaagccccgagagcagctgcgacgtgaagctggtggaaaagagcttcgagacagacaccaacctgaacttccagatcctgtacgagatcctgctgggcaaggccaccctgtacgccgtgctggtgtctgccctggtgctgatggctatggtcaagcggaaggacagccgggga

SEQ ID NO: 5421 - DNA, 2262 bp, synthetic construct
  source 1..2262: mol_type = other DNA
atggccttaccagtgaccgccttgctcctgccgctggccttgctgctccacgccgccaggccggaagtgcagctggttgaatctggcggaggactggttcagcctggcggatctctgagactgtcttgtgccgccagcggcttcagcttcagcgacttttggatgagctgggtccgacaggcccctggcaaaggacttgaatgggtcgccacaatcagccaggccggcagcgagaaggactacgtggactctgtgaagggcagattcaccatcagccgggacaacgccaagaagtccctgtacctccagatgaacagcctgagagccgaggacaccgccgtgtactattgtgcctctggcgtgtacagcttcgactacagaggccagggcaccctggtcacagtctcttctggtaccggcggaggcggatctggcggcggaggtagcggtggcggaggatctgaattcgacatcgtgatgacccagacacctctgagcctgagcgtgacacctggacagcctgccagcattagctgcaagagcagccagtctctgctggacggcgacggcaagacctacctgaattggctgctccagaagcctggacagagccctcagcggctgatctacctggtgtccaagctggatagcggcgtgcccgatagattttctggcagcggctctggcaccgacttcaccctgaagatcagcagagtggaagccgaggacgtgggcgtgtactactgttggcagggcacacacttccccagaacattcggccagggcacaaagctggaaatcaaactcgaggacctgaagaacgtgttcccacctgaggtggccgtgttcgagcctagcgaggccgagatcagccacacccagaaagccaccctcgtgtgcctggctaccggcttctaccccgaccatgtggaactgtcttggtgggtcaacggcaaagaggtgcacagcggcgtgtgtaccgacccccagccactgaaagaacagcccgccctgaacgacagccggtactgcctgagcagcagactgagagtgtccgccaccttctggcagaacccccggaaccacttcagatgccaggtgcagttctacggcctgagcgagaacgacgagtggacccaggacagagccaagcccgtgacccagatcgtgtctgccgaagcctggggcagagccgattgcggctttaccagcgagagctaccagcagggcgtgctgagcgccaccaacctgagcgtgatcggcttcagaatcctgctgctgaaagtggccggctttaacctgctgatgaccctgcggctgtggtccagcagggccaagcgatctggatctggagcaacaaacttctcactactcaaacaagcaggtgacgtggaggagaatcccgggcctactagtatggactggatttggcgcatccttttccttgtcggcgctgctaccggcgcgcattccttcgaacaagtgcaactggttcagagcggagccgaagtgaagaaacctggggcctctgtgaaggtgtcctgcaaggccagcggctacaccttcaaggacacctacatccactgggtccgacaggcccctggacaaggacttgagtggatgggcagaatcgaccccgccaacggcaacaccaaatacgaccccaagttccagggcagagtgaccatgaccagagacaccagcatcagcaccgcctacatggaactgagccggctgagatccgatgacaccgccgtgtactattgcgctagaagaggcggagtggattggggccagggaacactggttaccgtgtctagtacgcgtatccagaaccctgatcctgccgtgtaccagctgcgggatagcaagagcagcgacaagagcgtgtgtctgttcaccgacttcgacagccagaccaacgtgtcccagagcaaggactccgacgtgtacatcaccgataagtgcgtgctggacatgcggagcatggacttcaagagcaactccgccgtggcctggtccaacaagtccgatttcgcctgcgccaacgccttcaacaacagcattatccccgaggacacattcttcccaagccccgagagcagctgcgacgtgaagctggtggaaaagagcttcgagacagacaccaacctgaacttccagatcctgtacgagatcctgctgggcaaggccaccctgtacgccgtgctggtgtctgccctggtgctgatggctatggtcaagcggaaggacagccgggga

SEQ ID NO: 5422 - DNA, 2265 bp, synthetic construct
  source 1..2265: mol_type = other DNA
atggccttaccagtgaccgccttgctcctgccgctggccttgctgctccacgccgccaggccggaagtgcagctggttgaatctggcggaggactggttcagcctggcggatctctgagactgtcttgtgccgccagcggcttcagcttcagcgacttttggatgagctgggtccgacaggcccctggcaaaggacttgaatgggtcgccacaatcagccaggccggcagcgagaaggactacgtggactctgtgaagggcagattcaccatcagccgggacaacgccaagaagtccctgtacctccagatgaacagcctgagagccgaggacaccgccgtgtactattgtgcctctggcgtgtacagcttcgactacagaggccagggcaccctggtcacagtctcttctggtaccggcggaggcggatctggcggcggaggtagcggtggcggaggatctgaattcgacatccagatgacacagagccctagcagcctgtctgccagcgtgggagacagagtgaccatcacatgcaaggccagccaggatgtgtctacagccgtggcctggttccagcagaagcctggaaaagcccctaagctgctgatctacagccccagctacagatacaccggcgtgcccagcagattttctggcagcggctctggcaccgacttcaccctgacaatatccagcctccagcctgaggacttcacctactactgccagcagctctacagcaccccttacacattcggccagggcaccaaggtggaaatcaaactcgaggacctgaagaacgtgttcccacctgaggtggccgtgttcgagcctagcgaggccgagatcagccacacccagaaagccaccctcgtgtgcctggctaccggcttctaccccgaccatgtggaactgtcttggtgggtcaacggcaaagaggtgcacagcggcgtgtgtaccgacccccagccactgaaagaacagcccgccctgaacgacagccggtactgcctgagcagcagactgagagtgtccgccaccttctggcagaacccccggaaccacttcagatgccaggtgcagttctacggcctgagcgagaacgacgagtggacccaggacagagccaagcccgtgacccagatcgtgtctgccgaagcctggggcagagccgattgcggctttaccagcgagagctaccagcagggcgtgctgagcgccaccaacctgagcgtgatcggcttcagaatcctgctgctgaaagtggccggctttaacctgctgatgaccctgcggctgtggtccagcagggccaagcgatctggatctggagcaacaaacttctcactactcaaacaagcaggtgacgtggaggagaatcccgggcctactagtatggactggatttggcgcatccttttccttgtcggcgctgctaccggcgcgcattccttcgaagaagtgcaactggttcagagcggagccgaagtgaagaaacctggggcctctgtgaaggtgtcctgcaaagccagcggctacacctttaccgactactacctggacgtggtcgtgcggcaagctcctggacaaggactggaatggatcggcagagtgaacccctacaacggcggcaccatctacaaccagaaattcaagggaagagtgaccctgaccagagacaccagcacctccacagcctacctggaactgagcagcctgagaagcgaagataccgccgtgtactactgcgccagggaccactacagatatgaccctctgctggactactggggccagggaaccctggttacagtgtctagtacgcgtatccagaaccctgatcctgccgtgtaccagctgcgggatagcaagagcagcgacaagagcgtgtgtctgttcaccgacttcgacagccagaccaacgtgtcccagagcaaggactccgacgtgtacatcaccgataagtgcgtgctggacatgcggagcatggacttcaagagcaactccgccgtggcctggtccaacaagtccgatttcgcctgcgccaacgccttcaacaacagcattatccccgaggacacattcttcccaagccccgagagcagctgcgacgtgaagctggtggaaaagagcttcgagacagacaccaacctgaacttccagatcctgtacgagatcctgctgggcaaggccaccctgtacgccgtgctggtgtctgccctggtgctgatggctatggtcaagcggaaggacagccgggga

SEQ ID NO: 5423 - DNA, 2283 bp, synthetic construct
  source 1..2283: mol_type = other DNA
atggccttaccagtgaccgccttgctcctgccgctggccttgctgctccacgccgccaggccggaagtgcagctggttgaatctggcggaggactggttcagcctggcggatctctgagactgtcttgtgccgccagcggcttcagcttcagcgacttttggatgagctgggtccgacaggcccctggcaaaggacttgaatgggtcgccacaatcagccaggccggcagcgagaaggactacgtggactctgtgaagggcagattcaccatcagccgggacaacgccaagaagtccctgtacctccagatgaacagcctgagagccgaggacaccgccgtgtactattgtgcctctggcgtgtacagcttcgactacagaggccagggcaccctggtcacagtctcttctggtaccggcggaggcggatctggcggcggaggtagcggtggcggaggatctgaattcgacatccagatgacacagagccctagcagcctgtctgccagcgtgggagacagagtgaccatcacctgtagagccagccagagcgtgtccaccagcagctacaactacatgcactggtatcagcagaagcccggcaagcctcctaagctgctgattaagtacgccagcaacctggaaagcggcgtgcccagcagattttctggcagcggctctggcaccgacttcaccctgacaatatccagcctccagcctgaggacttcgccacctactactgtcagcactcctgggagatccctctgacattcggccagggcaccaaggtggaaatcaaactcgaggacctgaagaacgtgttcccacctgaggtggccgtgttcgagcctagcgaggccgagatcagccacacccagaaagccaccctcgtgtgcctggctaccggcttctaccccgaccatgtggaactgtcttggtgggtcaacggcaaagaggtgcacagcggcgtgtgtaccgacccccagccactgaaagaacagcccgccctgaacgacagccggtactgcctgagcagcagactgagagtgtccgccaccttctggcagaacccccggaaccacttcagatgccaggtgcagttctacggcctgagcgagaacgacgagtggacccaggacagagccaagcccgtgacccagatcgtgtctgccgaagcctggggcagagccgattgcggctttaccagcgagagctaccagcagggcgtgctgagcgccaccaacctgagcgtgatcggcttcagaatcctgctgctgaaagtggccggctttaacctgctgatgaccctgcggctgtggtccagcagggccaagcgatctggatctggagcaacaaacttctcactactcaaacaagcaggtgacgtggaggagaatcccgggcctactagtatggactggatttggcgcatccttttccttgtcggcgctgctaccggcgcgcattccttcgaagaagtgcaactggttcagagcggagccgaagtgaagaaacctggggcctctgtgaaggtgtcctgcaaggccagcggctacagcttcaccgactattatatgcactgggtccgacaggctccaggccagggacttgagtggatcggcagaatcaacccctacaacggcgctgccttctacagccagaacttcaaggatagagtgaccctgaccgtggacaccagcaccagcacagcctacctggaactgagcagcctgagaagcgaggacaccgccgtgtactactgcgccattgagagaggcgctgacctggaaggctacgctatggattattggggccagggaaccctggtcaccgtgtcatctacgcgtatccagaaccctgatcctgccgtgtaccagctgcgggatagcaagagcagcgacaagagcgtgtgtctgttcaccgacttcgacagccagaccaacgtgtcccagagcaaggactccgacgtgtacatcaccgataagtgcgtgctggacatgcggagcatggacttcaagagcaactccgccgtggcctggtccaacaagtccgatttcgcctgcgccaacgccttcaacaacagcattatccccgaggacacattcttcccaagccccgagagcagctgcgacgtgaagctggtggaaaagagcttcgagacagacaccaacctgaacttccagatcctgtacgagatcctgctgggcaaggccaccctgtacgccgtgctggtgtctgccctggtgctgatggctatggtcaagcggaaggacagccgggga

SEQ ID NO: 5424 - DNA, 2277 bp, synthetic construct
  source 1..2277: mol_type = other DNA
atggccttaccagtgaccgccttgctcctgccgctggccttgctgctccacgccgccaggccggaagtgcagctggttgaatctggcggaggactggttcagcctggcggatctctgagactgtcttgtgccgccagcggcttcagcttcagcgacttttggatgagctgggtccgacaggcccctggcaaaggacttgaatgggtcgccacaatcagccaggccggcagcgagaaggactacgtggactctgtgaagggcagattcaccatcagccgggacaacgccaagaagtccctgtacctccagatgaacagcctgagagccgaggacaccgccgtgtactattgtgcctctggcgtgtacagcttcgactacagaggccagggcaccctggtcacagtctcttctggtaccggcggaggcggatctggcggcggaggtagcggtggcggaggatctgaattcgagatcgtgctgacacagtctccagccacactgagcgcttctccaggcgagagagtgaccctgacctgtagagccagcagcaacgtgatctccagctacgtgcactggtatcagcagaagcctggcagcagccccagactgtttctgtacagcaccagcaatctggcctccggcgtgccaagcagattttctggctctggcagcggcaccgacttcacctttaccatctctagcctggaagccgaggacgccgccacctactactgtcagcagtacagcggctaccctctgaccttcggccagggcacaagactggaaatcaaactcgaggacctgaagaacgtgttcccacctgaggtggccgtgttcgagcctagcgaggccgagatcagccacacccagaaagccaccctcgtgtgcctggctaccggcttctaccccgaccatgtggaactgtcttggtgggtcaacggcaaagaggtgcacagcggcgtgtgtaccgacccccagccactgaaagaacagcccgccctgaacgacagccggtactgcctgagcagcagactgagagtgtccgccaccttctggcagaacccccggaaccacttcagatgccaggtgcagttctacggcctgagcgagaacgacgagtggacccaggacagagccaagcccgtgacccagatcgtgtctgccgaagcctggggcagagccgattgcggctttaccagcgagagctaccagcagggcgtgctgagcgccaccaacctgagcgtgatcggcttcagaatcctgctgctgaaagtggccggctttaacctgctgatgaccctgcggctgtggtccagcagggccaagcgatctggatctggagcaacaaacttctcactactcaaacaagcaggtgacgtggaggagaatcccgggcctactagtatggactggatttggcgcatccttttccttgtcggcgctgctaccggcgcgcattccttcgaacaagttcagctgcaagagtctggccctggcctggtcaagcctagcgaaacactgagcctgacctgcgccgtgtctggctactctatcaccagcgcctactattggaactggatcagacagcctcctggcaaaggactggaatggatcggctacatcagctacgacggcagaaacaactacaaccccagcctgaagaaccggatcaccatcaatcccgacaccagcaagaaccagttcagcctccagctgaacagcgtgacccctgaggataccgccgtgtactactgtgccagagaaggcgactacgacgtgggcaactactacgctatggactactggggccagggaaccctggtcacagtctcttctacgcgtatccagaaccctgatcctgccgtgtaccagctgcgggatagcaagagcagcgacaagagcgtgtgtctgttcaccgacttcgacagccagaccaacgtgtcccagagcaaggactccgacgtgtacatcaccgataagtgcgtgctggacatgcggagcatggacttcaagagcaactccgccgtggcctggtccaacaagtccgatttcgcctgcgccaacgccttcaacaacagcattatccccgaggacacattcttcccaagccccgagagcagctgcgacgtgaagctggtggaaaagagcttcgagacagacaccaacctgaacttccagatcctgtacgagatcctgctgggcaaggccaccctgtacgccgtgctggtgtctgccctggtgctgatggctatggtcaagcggaaggacagccgggga

SEQ ID NO: 5425 - DNA, 2277 bp, synthetic construct
  source 1..2277: mol_type = other DNA
atggccttaccagtgaccgccttgctcctgccgctggccttgctgctccacgccgccaggccggaagtgcagctggttgaatctggcggaggactggttcagcctggcggatctctgagactgtcttgtgccgccagcggcttcagcttcagcgacttttggatgagctgggtccgacaggcccctggcaaaggacttgaatgggtcgccacaatcagccaggccggcagcgagaaggactacgtggactctgtgaagggcagattcaccatcagccgggacaacgccaagaagtccctgtacctccagatgaacagcctgagagccgaggacaccgccgtgtactattgtgcctctggcgtgtacagcttcgactacagaggccagggcaccctggtcacagtctcttctggtaccggcggaggcggatctggcggcggaggtagcggtggcggaggatctgaattcgagatcgtgctgacacagtctcccgccacactgtcactgtctccaggcgaaagagccacactgagctgtagagccagcagcaacgtgatctccagctacgtgcactggtatcagcagaagcctggacaggcccctcggctgctgatctacagcacaagcaatctggcctctggcatccccgccagattttctggctctggaagcggcaccgacttcaccctgaccataagcagcctggaacctgaggacttcgccgtgtactactgccagcagtatagcggctaccctctgaccttcggccagggcacaagactggaaatcaaactcgaggacctgaagaacgtgttcccacctgaggtggccgtgttcgagcctagcgaggccgagatcagccacacccagaaagccaccctcgtgtgcctggctaccggcttctaccccgaccatgtggaactgtcttggtgggtcaacggcaaagaggtgcacagcggcgtgtgtaccgacccccagccactgaaagaacagcccgccctgaacgacagccggtactgcctgagcagcagactgagagtgtccgccaccttctggcagaacccccggaaccacttcagatgccaggtgcagttctacggcctgagcgagaacgacgagtggacccaggacagagccaagcccgtgacccagatcgtgtctgccgaagcctggggcagagccgattgcggctttaccagcgagagctaccagcagggcgtgctgagcgccaccaacctgagcgtgatcggcttcagaatcctgctgctgaaagtggccggctttaacctgctgatgaccctgcggctgtggtccagcagggccaagcgatctggatctggagcaacaaacttctcactactcaaacaagcaggtgacgtggaggagaatcccgggcctactagtatggactggatttggcgcatccttttccttgtcggcgctgctaccggcgcgcattccttcgaagaagtgcaactggtggaaagtggcggcggactggtgcaacctggaagaagcctgagactgtcctgtgccgccagcggctactctatcacaagcgcctactactggaactgggtccgacaggctcctggcaaaggactggaatgggtgtcctacatcagctacgacggcagaaacaactacaaccccagcctgaagaaccgcttcaccatcagccgggacaacgccaagaagtccctgtacctccagatgaacagcctgagagccgaggacacagccctgtactattgcgccaaagagggcgactacgacgtcggcaactactacgctatggactactggggccagggaaccaccgtgactgtctcttctacgcgtatccagaaccctgatcctgccgtgtaccagctgcgggatagcaagagcagcgacaagagcgtgtgtctgttcaccgacttcgacagccagaccaacgtgtcccagagcaaggactccgacgtgtacatcaccgataagtgcgtgctggacatgcggagcatggacttcaagagcaactccgccgtggcctggtccaacaagtccgatttcgcctgcgccaacgccttcaacaacagcattatccccgaggacacattcttcccaagccccgagagcagctgcgacgtgaagctggtggaaaagagcttcgagacagacaccaacctgaacttccagatcctgtacgagatcctgctgggcaaggccaccctgtacgccgtgctggtgtctgccctggtgctgatggctatggtcaagcggaaggacagccgggga

SEQ ID NO: 5426 - DNA, 2274 bp, synthetic construct
  source 1..2274: mol_type = other DNA
atggccttaccagtgaccgccttgctcctgccgctggccttgctgctccacgccgccaggccggaagtgcagctggttgaatctggcggaggactggttcagcctggcggatctctgagactgtcttgtgccgccagcggcttcagcttcagcgacttttggatgagctgggtccgacaggcccctggcaaaggacttgaatgggtcgccacaatcagccaggccggcagcgagaaggactacgtggactctgtgaagggcagattcaccatcagccgggacaacgccaagaagtccctgtacctccagatgaacagcctgagagccgaggacaccgccgtgtactattgtgcctctggcgtgtacagcttcgactacagaggccagggcaccctggtcacagtctcttctggtaccggcggaggcggatctggcggcggaggtagcggtggcggaggatctgaattcgacgtggtcatgacacagaccccactgagcctgcctgtgtctctgggagatcaggccagcatctcctgtagaagcagccagagcctggtgcacagcaacggcaacacctacctgcggtggtatctccagaagcctggacagagccccaaggtgctgatctacaaggtgtccaacagagtgtccggcgtgcccgatagattttctggcagcggctctggcaccgacttcaccctgaagatcaatagagtggaagccgaggacctgggcgtgtacttctgtagccagagcacccatgtgccttggacctttggcggaggcaccaagctggaaatcaagctcgaggacctgaagaacgtgttcccacctgaggtggccgtgttcgagcctagcgaggccgagatcagccacacccagaaagccaccctcgtgtgcctggctaccggcttctaccccgaccatgtggaactgtcttggtgggtcaacggcaaagaggtgcacagcggcgtgtgtaccgacccccagccactgaaagaacagcccgccctgaacgacagccggtactgcctgagcagcagactgagagtgtccgccaccttctggcagaacccccggaaccacttcagatgccaggtgcagttctacggcctgagcgagaacgacgagtggacccaggacagagccaagcccgtgacccagatcgtgtctgccgaagcctggggcagagccgattgcggctttaccagcgagagctaccagcagggcgtgctgagcgccaccaacctgagcgtgatcggcttcagaatcctgctgctgaaagtggccggctttaacctgctgatgaccctgcggctgtggtccagcagggccaagcgatctggatctggagcaacaaacttctcactactcaaacaagcaggtgacgtggaggagaatcccgggcctactagtatggactggatttggcgcatccttttccttgtcggcgctgctaccggcgcgcattccttcgaaggcgtgaagctggacgagacaggcggaggacttgttcaacctggcggagccatgaagctgagctgtgtgaccagcggctttaccttcggccactactggatgaactgggtccgacagtcccctgagaaaggactggaatgggtcgcccagttcagaaacaagccctacaactacgaaacctactacagcgacagcgtgaagggcagattcaccatcagccgggacgacagcaagtccagcgtgtacctccagatgaacaacctgcgcgtggaagataccggcatctactactgtaccggggccagctacggcatggaatatctcggccagggcaccagcgtgaccgtgtctacaacgcgtatccagaaccctgatcctgccgtgtaccagctgcgggatagcaagagcagcgacaagagcgtgtgtctgttcaccgacttcgacagccagaccaacgtgtcccagagcaaggactccgacgtgtacatcaccgataagtgcgtgctggacatgcggagcatggacttcaagagcaactccgccgtggcctggtccaacaagtccgatttcgcctgcgccaacgccttcaacaacagcattatccccgaggacacattcttcccaagccccgagagcagctgcgacgtgaagctggtggaaaagagcttcgagacagacaccaacctgaacttccagatcctgtacgagatcctgctgggcaaggccaccctgtacgccgtgctggtgtctgccctggtgctgatggctatggtcaagcggaaggacagccgggga

SEQ ID NO: 5427 - DNA, 2292 bp, synthetic construct
  source 1..2292: mol_type = other DNA
atggccttaccagtgaccgccttgctcctgccgctggccttgctgctccacgccgccaggccggaagtgcagctggttgaatctggcggaggactggttcagcctggcggatctctgagactgtcttgtgccgccagcggcttcagcttcagcgacttttggatgagctgggtccgacaggcccctggcaaaggacttgaatgggtcgccacaatcagccaggccggcagcgagaaggactacgtggactctgtgaagggcagattcaccatcagccgggacaacgccaagaagtccctgtacctccagatgaacagcctgagagccgaggacaccgccgtgtactattgtgcctctggcgtgtacagcttcgactacagaggccagggcaccctggtcacagtctcttctggtaccggcggaggcggatctggcggcggaggtagcggtggcggaggatctgaattccaggtgcaactggtggaatctggcggcaatctggttcagcctggcggctctctgagactgtcttgtgccgccagcggcttcaccttcggcagcttttctatgagctgggtccgacaagctcctggcggaggacttgaatgggtggcaggactgtctgccagaagcagcctgacacactacgccgactctgtgaagggcagattcaccatcagccgggacaacgccaagaacagcgtgtacctccagatgaacagcctgagagtggaagataccgccgtgtactactgcgccagaagaagctacgacagcagcggctactggggccacttctacagctacatggatgtgtggggccagggcaccctggttacagtttctctcgaggacctgaagaacgtgttcccacctgaggtggccgtgttcgagcctagcgaggccgagatcagccacacccagaaagccaccctcgtgtgcctggctaccggcttctaccccgaccatgtggaactgtcttggtgggtcaacggcaaagaggtgcacagcggcgtgtgtaccgacccccagccactgaaagaacagcccgccctgaacgacagccggtactgcctgagcagcagactgagagtgtccgccaccttctggcagaacccccggaaccacttcagatgccaggtgcagttctacggcctgagcgagaacgacgagtggacccaggacagagccaagcccgtgacccagatcgtgtctgccgaagcctggggcagagccgattgcggctttaccagcgagagctaccagcagggcgtgctgagcgccaccaacctgagcgtgatcggcttcagaatcctgctgctgaaagtggccggctttaacctgctgatgaccctgcggctgtggtccagcagggccaagcgatctggatctggagcaacaaacttctcactactcaaacaagcaggtgacgtggaggagaatcccgggcctactagtatggactggatttggcgcatccttttccttgtcggcgctgctaccggcgcgcattccttcgaatctgtgctgacccagcctagctccgtgtctgctgctcctggacagaaagtgaccatctcctgtagcggcagcaccagcaacatcggcaacaactacgtgtcctggtatcagcagcaccccggcaaggcccctaagctgatgatctacgacgtgtccaagaggcccagcggcgtgccagatagattttccggcagcaagagcggcaacagcgccagcctggatattagcggactccagtctgaggacgaggccgactactattgcgccgcctgggatgatagcctgagcgagtttctgtttggcaccggcaccaagctgacagtgcttggaacgcgtatccagaaccctgatcctgccgtgtaccagctgcgggatagcaagagcagcgacaagagcgtgtgtctgttcaccgacttcgacagccagaccaacgtgtcccagagcaaggactccgacgtgtacatcaccgataagtgcgtgctggacatgcggagcatggacttcaagagcaactccgccgtggcctggtccaacaagtccgatttcgcctgcgccaacgccttcaacaacagcattatccccgaggacacattcttcccaagccccgagagcagctgcgacgtgaagctggtggaaaagagcttcgagacagacaccaacctgaacttccagatcctgtacgagatcctgctgggcaaggccaccctgtacgccgtgctggtgtctgccctggtgctgatggctatggtcaagcggaaggacagccgggga

SEQ ID NO: 5428 - DNA, 2277 bp, synthetic construct
  source 1..2277: mol_type = other DNA
atggccttaccagtgaccgccttgctcctgccgctggccttgctgctccacgccgccaggccggaagtgcagctggttgaatctggcggaggactggttcagcctggcggatctctgagactgtcttgtgccgccagcggcttcagcttcagcgacttttggatgagctgggtccgacaggcccctggcaaaggacttgaatgggtcgccacaatcagccaggccggcagcgagaaggactacgtggactctgtgaagggcagattcaccatcagccgggacaacgccaagaagtccctgtacctccagatgaacagcctgagagccgaggacaccgccgtgtactattgtgcctctggcgtgtacagcttcgactacagaggccagggcaccctggtcacagtctcttctggtaccggcggaggcggatctggcggcggaggtagcggtggcggaggatctgaattcgacgtggtcatgacacagagcccttctagcctgtctgccagcgtgggcgacagagtgacaatcacctgtcagagcagcctggacatcagccactacctgaactggtatcagcagaagcccggcaaggcccctaagctgctgatctacgacgccagcaatctggaaaccggcgtgcccagcagattttctggcagcggaagcggcacccacttcaccttcacaatatccagcctccagcctgaggacttcgccacctactactgccagcagtacgacaacctgcctctgacctttggcggaggcaccaagctggaaatcaagagactcgaggacctgaagaacgtgttcccacctgaggtggccgtgttcgagcctagcgaggccgagatcagccacacccagaaagccaccctcgtgtgcctggctaccggcttctaccccgaccatgtggaactgtcttggtgggtcaacggcaaagaggtgcacagcggcgtgtgtaccgacccccagccactgaaagaacagcccgccctgaacgacagccggtactgcctgagcagcagactgagagtgtccgccaccttctggcagaacccccggaaccacttcagatgccaggtgcagttctacggcctgagcgagaacgacgagtggacccaggacagagccaagcccgtgacccagatcgtgtctgccgaagcctggggcagagccgattgcggctttaccagcgagagctaccagcagggcgtgctgagcgccaccaacctgagcgtgatcggcttcagaatcctgctgctgaaagtggccggctttaacctgctgatgaccctgcggctgtggtccagcagggccaagcgatctggatctggagcaacaaacttctcactactcaaacaagcaggtgacgtggaggagaatcccgggcctactagtatggactggatttggcgcatccttttccttgtcggcgctgctaccggcgcgcattccttcgaacaagttcaactggttcaatcaggcggaggcgtggtgcaacctggtggctctctgagagtgtcttgtgctgcctctggcgtgaccctgagcgactatggaatgcactgggtccgacaggcccctggcaaaggacttgagtgggtcgccttcatcagaaacgacggcagcgacaagtattacgccgacagcgtgaagggcagattcaccatcagccgggacaacagcgagaaaaccgtgtctctccagatgtctagcctgagagccgaggacaccgccgtgtactactgtgccaagaatggcgagagcggccctctggactactggtatctggatctgtggggcagaggcaccctggtcacagtctcttctacgcgtatccagaaccctgatcctgccgtgtaccagctgcgggatagcaagagcagcgacaagagcgtgtgtctgttcaccgacttcgacagccagaccaacgtgtcccagagcaaggactccgacgtgtacatcaccgataagtgcgtgctggacatgcggagcatggacttcaagagcaactccgccgtggcctggtccaacaagtccgatttcgcctgcgccaacgccttcaacaacagcattatccccgaggacacattcttcccaagccccgagagcagctgcgacgtgaagctggtggaaaagagcttcgagacagacaccaacctgaacttccagatcctgtacgagatcctgctgggcaaggccaccctgtacgccgtgctggtgtctgccctggtgctgatggctatggtcaagcggaaggacagccgggga

SEQ ID NO: 5429 - DNA, 2289 bp, synthetic construct
  source 1..2289: mol_type = other DNA
atggccttaccagtgaccgccttgctcctgccgctggccttgctgctccacgccgccaggccggaagtgcagctggttgaatctggcggaggactggttcagcctggcggatctctgagactgtcttgtgccgccagcggcttcagcttcagcgacttttggatgagctgggtccgacaggcccctggcaaaggacttgaatgggtcgccacaatcagccaggccggcagcgagaaggactacgtggactctgtgaagggcagattcaccatcagccgggacaacgccaagaagtccctgtacctccagatgaacagcctgagagccgaggacaccgccgtgtactattgtgcctctggcgtgtacagcttcgactacagaggccagggcaccctggtcacagtctcttctggtaccggcggaggcggatctggcggcggaggtagcggtggcggaggatctgaattcagctacgagctgacacagcctccatccgtgtctggcacacctggacagagagtggctatctcctgtagcggcagcagcagcaacatcggcaccagaatggtcacctggtatcagcacgtgccaggcacagcccctaagctgctgatcttcaacaacaaccagcggcctagcggcgtgcccgatagattttctgccagcaagagcggcacaagcgccagcctggctatcatcggactccagtctgacgacgaggccgactactactgtgccacctgggacgacaacgtgaagtcctacgtgttcggcaccggcaccaaagtgacagtgcttggaagtagactcgaggacctgaagaacgtgttcccacctgaggtggccgtgttcgagcctagcgaggccgagatcagccacacccagaaagccaccctcgtgtgcctggctaccggcttctaccccgaccatgtggaactgtcttggtgggtcaacggcaaagaggtgcacagcggcgtgtgtaccgacccccagccactgaaagaacagcccgccctgaacgacagccggtactgcctgagcagcagactgagagtgtccgccaccttctggcagaacccccggaaccacttcagatgccaggtgcagttctacggcctgagcgagaacgacgagtggacccaggacagagccaagcccgtgacccagatcgtgtctgccgaagcctggggcagagccgattgcggctttaccagcgagagctaccagcagggcgtgctgagcgccaccaacctgagcgtgatcggcttcagaatcctgctgctgaaagtggccggctttaacctgctgatgaccctgcggctgtggtccagcagggccaagcgatctggatctggagcaacaaacttctcactactcaaacaagcaggtgacgtggaggagaatcccgggcctactagtatggactggatttggcgcatccttttccttgtcggcgctgctaccggcgcgcattccttcgaacttgaaatggcccaggttcagctccagcagtggggagctggactgctgaagcctagcgagacactgagcctgacctgtgctgtgtacggcggcagcttcagcggctactactggtcctggatcagacagcctcctggcaaaggactggaatggatcggcgagatcaaccacagcggctccaccaactacaaccccagcctgaagtccagagtgaccatcagcgtggacaccagcaagaaccagttctccctgaagctgagcagcgtgacagccgctgataccgccgtgtactattgcgctagagcccctcagtcttggtacgtgggagatgtgtggggccagggcacactggttacagtgtcatctacgcgtatccagaaccctgatcctgccgtgtaccagctgcgggatagcaagagcagcgacaagagcgtgtgtctgttcaccgacttcgacagccagaccaacgtgtcccagagcaaggactccgacgtgtacatcaccgataagtgcgtgctggacatgcggagcatggacttcaagagcaactccgccgtggcctggtccaacaagtccgatttcgcctgcgccaacgccttcaacaacagcattatccccgaggacacattcttcccaagccccgagagcagctgcgacgtgaagctggtggaaaagagcttcgagacagacaccaacctgaacttccagatcctgtacgagatcctgctgggcaaggccaccctgtacgccgtgctggtgtctgccctggtgctgatggctatggtcaagcggaaggacagccgggga

SEQ ID NO: 5430 - DNA, 2280 bp, synthetic construct
  source 1..2280: mol_type = other DNA
atggccttaccagtgaccgccttgctcctgccgctggccttgctgctccacgccgccaggccggaagtgcagctggttgaatctggcggaggactggttcagcctggcggatctctgagactgtcttgtgccgccagcggcttcagcttcagcgacttttggatgagctgggtccgacaggcccctggcaaaggacttgaatgggtcgccacaatcagccaggccggcagcgagaaggactacgtggactctgtgaagggcagattcaccatcagccgggacaacgccaagaagtccctgtacctccagatgaacagcctgagagccgaggacaccgccgtgtactattgtgcctctggcgtgtacagcttcgactacagaggccagggcaccctggtcacagtctcttctggtaccggcggaggcggatctggcggcggaggtagcggtggcggaggatctgaattccagtctgtgctgacacagcctcctagcctgtctgtggcccctggaaagacagccagcatcacatgcggcggcaacaacatcggcatgaagtccgtgcactggtatcagcagaggccaggacaggctcctgtgctggtcatctactacgacagcgacagaccctctggcatccccggcagattttccggcagcaactctggcaataccgccacactgaccatctccagagtggaagctggcgacgaggccgactactactgccaagtgtgggataccaccggcgatcaccctggctatgtgtttggcaccggcaccaaagtgacagtgcttctcgaggacctgaagaacgtgttcccacctgaggtggccgtgttcgagcctagcgaggccgagatcagccacacccagaaagccaccctcgtgtgcctggctaccggcttctaccccgaccatgtggaactgtcttggtgggtcaacggcaaagaggtgcacagcggcgtgtgtaccgacccccagccactgaaagaacagcccgccctgaacgacagccggtactgcctgagcagcagactgagagtgtccgccaccttctggcagaacccccggaaccacttcagatgccaggtgcagttctacggcctgagcgagaacgacgagtggacccaggacagagccaagcccgtgacccagatcgtgtctgccgaagcctggggcagagccgattgcggctttaccagcgagagctaccagcagggcgtgctgagcgccaccaacctgagcgtgatcggcttcagaatcctgctgctgaaagtggccggctttaacctgctgatgaccctgcggctgtggtccagcagggccaagcgatctggatctggagcaacaaacttctcactactcaaacaagcaggtgacgtggaggagaatcccgggcctactagtatggactggatttggcgcatccttttccttgtcggcgctgctaccggcgcgcattccttcgaacaagttcaactggttcagagcggagccgaagtgaagaaacctggcagcagcgtgaaggtgtcctgcaaagcaagcggcggcacctttagcagctacgccatctcttgggtccgacaggcacctggacaaggactggaatggatgggcggcatcatccccatcttcggcacagccaattacgcccagaaattccagggcagagtgaccatcaccgccgacgagtctacaagcaccgcctacatggaactgagcagcctgagaagcgaggacaccgccgtgtactattgtgccagaggcgtgtacggctacagcggctctgccccttatgatgagtggggccagggaaccctggtcaccgtttcttctacgcgtatccagaaccctgatcctgccgtgtaccagctgcgggatagcaagagcagcgacaagagcgtgtgtctgttcaccgacttcgacagccagaccaacgtgtcccagagcaaggactccgacgtgtacatcaccgataagtgcgtgctggacatgcggagcatggacttcaagagcaactccgccgtggcctggtccaacaagtccgatttcgcctgcgccaacgccttcaacaacagcattatccccgaggacacattcttcccaagccccgagagcagctgcgacgtgaagctggtggaaaagagcttcgagacagacaccaacctgaacttccagatcctgtacgagatcctgctgggcaaggccaccctgtacgccgtgctggtgtctgccctggtgctgatggctatggtcaagcggaaggacagccgggga

SEQ ID NO: 5431 - DNA, 2274 bp, synthetic construct
  source 1..2274: mol_type = other DNA
atggccttaccagtgaccgccttgctcctgccgctggccttgctgctccacgccgccaggccggaagtgcagctggttgaatctggcggaggactggttcagcctggcggatctctgagactgtcttgtgccgccagcggcttcagcttcagcgacttttggatgagctgggtccgacaggcccctggcaaaggacttgaatgggtcgccacaatcagccaggccggcagcgagaaggactacgtggactctgtgaagggcagattcaccatcagccgggacaacgccaagaagtccctgtacctccagatgaacagcctgagagccgaggacaccgccgtgtactattgtgcctctggcgtgtacagcttcgactacagaggccagggcaccctggtcacagtctcttctggtaccggcggaggcggatctggcggcggaggtagcggtggcggaggatctgaattcgaggtgcaactggttgagtctggcggaggactggtgcagcctggaagaagcctgagactgtcttgtgccgccagcggcttcaccttcgacgattatgccatgcactgggtccgacaggcccctggcaaaggacttgaatgggtgtccggcatctcctggaacagcggctctatcggctacgccgattccgtgaagggcagattcaccatcagccgggacaacgccaagaacagcctgtacctccagatgaactccctgagagccgaggacacagccctgtactactgcgccaaagacaaaggcggaggctactacgacttttggagcggcagcgattattggggccagggcacactggtcacagtgtctagcctcgaggacctgaagaacgtgttcccacctgaggtggccgtgttcgagcctagcgaggccgagatcagccacacccagaaagccaccctcgtgtgcctggctaccggcttctaccccgaccatgtggaactgtcttggtgggtcaacggcaaagaggtgcacagcggcgtgtgtaccgacccccagccactgaaagaacagcccgccctgaacgacagccggtactgcctgagcagcagactgagagtgtccgccaccttctggcagaacccccggaaccacttcagatgccaggtgcagttctacggcctgagcgagaacgacgagtggacccaggacagagccaagcccgtgacccagatcgtgtctgccgaagcctggggcagagccgattgcggctttaccagcgagagctaccagcagggcgtgctgagcgccaccaacctgagcgtgatcggcttcagaatcctgctgctgaaagtggccggctttaacctgctgatgaccctgcggctgtggtccagcagggccaagcgatctggatctggagcaacaaacttctcactactcaaacaagcaggtgacgtggaggagaatcccgggcctactagtatggactggatttggcgcatccttttccttgtcggcgctgctaccggcgcgcattccttcgaatcttctgagctgacacaggaccctgccgtgtctgttgctctgggccagacagtgcggattacctgtcagggcgatagcctgagaagctactacgcctcctggtatcagcagaagccaggccaggctcctgtgctggtcatctacggcaagaacaacagacccagcggcatccccgatagattcagcggaagcagctctggcaataccgccagcctgacaattactggcgctcaggccgaggacgaggccgactactactgcaacagcagagatagcagcggctgggttttcggcggaggcacaaaactgacagtgctgacgcgtatccagaaccctgatcctgccgtgtaccagctgcgggatagcaagagcagcgacaagagcgtgtgtctgttcaccgacttcgacagccagaccaacgtgtcccagagcaaggactccgacgtgtacatcaccgataagtgcgtgctggacatgcggagcatggacttcaagagcaactccgccgtggcctggtccaacaagtccgatttcgcctgcgccaacgccttcaacaacagcattatccccgaggacacattcttcccaagccccgagagcagctgcgacgtgaagctggtggaaaagagcttcgagacagacaccaacctgaacttccagatcctgtacgagatcctgctgggcaaggccaccctgtacgccgtgctggtgtctgccctggtgctgatggctatggtcaagcggaaggacagccgggga

SEQ ID NO: 5432 - DNA, 2301 bp, synthetic construct
  source 1..2301: mol_type = other DNA
atggccttaccagtgaccgccttgctcctgccgctggccttgctgctccacgccgccaggccggaagtgcagctggttgaatctggcggaggactggttcagcctggcggatctctgagactgtcttgtgccgccagcggcttcagcttcagcgacttttggatgagctgggtccgacaggcccctggcaaaggacttgaatgggtcgccacaatcagccaggccggcagcgagaaggactacgtggactctgtgaagggcagattcaccatcagccgggacaacgccaagaagtccctgtacctccagatgaacagcctgagagccgaggacaccgccgtgtactattgtgcctctggcgtgtacagcttcgactacagaggccagggcaccctggtcacagtctcttctggtaccggcggaggcggatctggcggcggaggtagcggtggcggaggatctgaattcgaagtgcagctccagcagtctggacctggcctggttaagcctagccagacactgagcctgacctgtgccatcagcggcgatagcgtgctgagcaacagcgacacctggaactggatcagacagagccctagcagaggactggaatggctgggcagaacctaccacagaagcacttggtacgacgactacgccagctctgtgcggggcagagtgtccatcaatgtggacaccagcaagaaccagtacagcctgcaactgaacgccgtgacacctgaggataccggcgtgtactactgcgccagagacagactccaggacggcaactcttggagcgacgcctttgatgtgtggggccagggcacaatggtcaccgtttctagcctcgaggacctgaagaacgtgttcccacctgaggtggccgtgttcgagcctagcgaggccgagatcagccacacccagaaagccaccctcgtgtgcctggctaccggcttctaccccgaccatgtggaactgtcttggtgggtcaacggcaaagaggtgcacagcggcgtgtgtaccgacccccagccactgaaagaacagcccgccctgaacgacagccggtactgcctgagcagcagactgagagtgtccgccaccttctggcagaacccccggaaccacttcagatgccaggtgcagttctacggcctgagcgagaacgacgagtggacccaggacagagccaagcccgtgacccagatcgtgtctgccgaagcctggggcagagccgattgcggctttaccagcgagagctaccagcagggcgtgctgagcgccaccaacctgagcgtgatcggcttcagaatcctgctgctgaaagtggccggctttaacctgctgatgaccctgcggctgtggtccagcagggccaagcgatctggatctggagcaacaaacttctcactactcaaacaagcaggtgacgtggaggagaatcccgggcctactagtatggactggatttggcgcatccttttccttgtcggcgctgctaccggcgcgcattccttcgaacaatctgctctgacacagcctgccagcgtgtcaggatctcctggacagagcatcaccatctcttgcaccggcaccagctctgatgtcggcggctacaattacgtgtcctggtatcagcagcaccccggcaaggcccctaagctgatgatctacgacgtgtccaacagacccagcggcgtgtccaatagattctccggcagcaagagcggcaacaccgccagcctgacaatttctggactgcaagccgaggacgaggccgactactactgtagcagctacaccagcagcagcacactggtgtacgtgttcggcacaggcaccaaagtgaccgtgcttacgcgtatccagaaccctgatcctgccgtgtaccagctgcgggatagcaagagcagcgacaagagcgtgtgtctgttcaccgacttcgacagccagaccaacgtgtcccagagcaaggactccgacgtgtacatcaccgataagtgcgtgctggacatgcggagcatggacttcaagagcaactccgccgtggcctggtccaacaagtccgatttcgcctgcgccaacgccttcaacaacagcattatccccgaggacacattcttcccaagccccgagagcagctgcgacgtgaagctggtggaaaagagcttcgagacagacaccaacctgaacttccagatcctgtacgagatcctgctgggcaaggccaccctgtacgccgtgctggtgtctgccctggtgctgatggctatggtcaagcggaaggacagccgggga

SEQ ID NO: 5433 - DNA, 2235 bp, synthetic construct
  source 1..2235: mol_type = other DNA
atggccttaccagtgaccgccttgctcctgccgctggccttgctgctccacgccgccaggccggaagtgcagctggttgaatctggcggaggactggttcagcctggcggatctctgagactgtcttgtgccgccagcggcttcagcttcagcgacttttggatgagctgggtccgacaggcccctggcaaaggacttgaatgggtcgccacaatcagccaggccggcagcgagaaggactacgtggactctgtgaagggcagattcaccatcagccgggacaacgccaagaagtccctgtacctccagatgaacagcctgagagccgaggacaccgccgtgtactattgtgcctctggcgtgtacagcttcgactacagaggccagggcaccctggtcacagtctcttctggtaccggcggaggcggatctggcggcggaggtagcggtggcggaggatctgaattccaggtgcaactggttcagtctggggccgaagtgaagaaacctggggcctctgtgaaggtgtcctgcaaggcttccggctacacctttaccagctacgacatcaactgggtccgacaggccacaggccaaggactggaatggatgggctggatgaaccccaacagcggcaataccggctacgcccagaaattccagggcagagtgaccatgaccagaaacaccagcatcagcaccgcctacatggaactgagcagcctgagaagcgaggacaccgccgtgtactattgcgccagaggcgacagcaccaaggtggaaatcaaactcgaggacctgaagaacgtgttcccacctgaggtggccgtgttcgagcctagcgaggccgagatcagccacacccagaaagccaccctcgtgtgcctggctaccggcttctaccccgaccatgtggaactgtcttggtgggtcaacggcaaagaggtgcacagcggcgtgtgtaccgacccccagccactgaaagaacagcccgccctgaacgacagccggtactgcctgagcagcagactgagagtgtccgccaccttctggcagaacccccggaaccacttcagatgccaggtgcagttctacggcctgagcgagaacgacgagtggacccaggacagagccaagcccgtgacccagatcgtgtctgccgaagcctggggcagagccgattgcggctttaccagcgagagctaccagcagggcgtgctgagcgccaccaacctgagcgtgatcggcttcagaatcctgctgctgaaagtggccggctttaacctgctgatgaccctgcggctgtggtccagcagggccaagcgatctggatctggagcaacaaacttctcactactcaaacaagcaggtgacgtggaggagaatcccgggcctactagtatggactggatttggcgcatccttttccttgtcggcgctgctaccggcgcgcattccttcgaacaatctgtgctgacccagcctagatccgtgtctggctctcctggacagagcgtgaccatctcttgtaccggcaccagctctgatgtcggcggctacaattacgtgtcctggtatcagcagcaccccggcgaagcccctaagctgattatctacgacgccgacaagcggcccagcggcatcagcaatagattcagctctggcaagagcggcaacaccgccagcctgacaatcagcggactccaggtggaagatgaggccgactactactgctgctcctatgccggcggaagcacctgggttttcggaggcggtacaaaagtgaccgtgctgacgcgtatccagaaccctgatcctgccgtgtaccagctgcgggatagcaagagcagcgacaagagcgtgtgtctgttcaccgacttcgacagccagaccaacgtgtcccagagcaaggactccgacgtgtacatcaccgataagtgcgtgctggacatgcggagcatggacttcaagagcaactccgccgtggcctggtccaacaagtccgatttcgcctgcgccaacgccttcaacaacagcattatccccgaggacacattcttcccaagccccgagagcagctgcgacgtgaagctggtggaaaagagcttcgagacagacaccaacctgaacttccagatcctgtacgagatcctgctgggcaaggccaccctgtacgccgtgctggtgtctgccctggtgctgatggctatggtcaagcggaaggacagccgggga

SEQ ID NO: 5434 - DNA, 2301 bp, synthetic construct
  source 1..2301: mol_type = other DNA
atggccttaccagtgaccgccttgctcctgccgctggccttgctgctccacgccgccaggccggaagtgcagctggttgaatctggcggaggactggttcagcctggcggatctctgagactgtcttgtgccgccagcggcttcagcttcagcgacttttggatgagctgggtccgacaggcccctggcaaaggacttgaatgggtcgccacaatcagccaggccggcagcgagaaggactacgtggactctgtgaagggcagattcaccatcagccgggacaacgccaagaagtccctgtacctccagatgaacagcctgagagccgaggacaccgccgtgtactattgtgcctctggcgtgtacagcttcgactacagaggccagggcaccctggtcacagtctcttctggtaccggcggaggcggatctggcggcggaggtagcggtggcggaggatctgaattcgaagtgcagctccagcagtctggacctggcctggttaagcctagccagacactgagcctgacctgtgccatcagcggcgatagcgtgtcctctaatagcgccgcctggaactggatcagacagagccctagcagaggactggaatggctgggcagaacctactaccgcagcaagtggtacagcgactacgccgtgtccgtgaagtcccggatcaccatcaatcccgacaccagcaagaaccagttcagcctgcaactgaacagcgtgacccctgaggataccgccgtgtactactgcgccagagatccctacgacttttggagcggctaccccgacgcctttgacatctggggacagggcacaatggtcaccgtttctagcctcgaggacctgaagaacgtgttcccacctgaggtggccgtgttcgagcctagcgaggccgagatcagccacacccagaaagccaccctcgtgtgcctggctaccggcttctaccccgaccatgtggaactgtcttggtgggtcaacggcaaagaggtgcacagcggcgtgtgtaccgacccccagccactgaaagaacagcccgccctgaacgacagccggtactgcctgagcagcagactgagagtgtccgccaccttctggcagaacccccggaaccacttcagatgccaggtgcagttctacggcctgagcgagaacgacgagtggacccaggacagagccaagcccgtgacccagatcgtgtctgccgaagcctggggcagagccgattgcggctttaccagcgagagctaccagcagggcgtgctgagcgccaccaacctgagcgtgatcggcttcagaatcctgctgctgaaagtggccggctttaacctgctgatgaccctgcggctgtggtccagcagggccaagcgatctggatctggagcaacaaacttctcactactcaaacaagcaggtgacgtggaggagaatcccgggcctactagtatggactggatttggcgcatccttttccttgtcggcgctgctaccggcgcgcattccttcgaacaatctgctctgacacagcctgccagcgtgtcaggatctcctggacagagcatcaccatctcttgcaccggcaccagctctgatgtcggcggctacaattacgtgtcctggtatcagcagcaccccggcaaggcccctaaagtgattatcagcgaagtgaacaacagacccagcggcgtgtcccacagattcagcggctctaagtctggcaacaccgccagcctgacaatctctggactgcaagccgaggacgaggccgactacttctgtagcagctacaccagcggcagaaccctgtacgtgttcggcacaggcagcaaagtgacagtgctgggaacgcgtatccagaaccctgatcctgccgtgtaccagctgcgggatagcaagagcagcgacaagagcgtgtgtctgttcaccgacttcgacagccagaccaacgtgtcccagagcaaggactccgacgtgtacatcaccgataagtgcgtgctggacatgcggagcatggacttcaagagcaactccgccgtggcctggtccaacaagtccgatttcgcctgcgccaacgccttcaacaacagcattatccccgaggacacattcttcccaagccccgagagcagctgcgacgtgaagctggtggaaaagagcttcgagacagacaccaacctgaacttccagatcctgtacgagatcctgctgggcaaggccaccctgtacgccgtgctggtgtctgccctggtgctgatggctatggtcaagcggaaggacagccgggga

SEQ ID NO: 5435 - DNA, 2298 bp, synthetic construct
  source 1..2298: mol_type = other DNA
atggccttaccagtgaccgccttgctcctgccgctggccttgctgctccacgccgccaggccggaagtgcagctggttgaatctggcggaggactggttcagcctggcggatctctgagactgtcttgtgccgccagcggcttcagcttcagcgacttttggatgagctgggtccgacaggcccctggcaaaggacttgaatgggtcgccacaatcagccaggccggcagcgagaaggactacgtggactctgtgaagggcagattcaccatcagccgggacaacgccaagaagtccctgtacctccagatgaacagcctgagagccgaggacaccgccgtgtactattgtgcctctggcgtgtacagcttcgactacagaggccagggcaccctggtcacagtctcttctggtaccggcggaggcggatctggcggcggaggtagcggtggcggaggatctgaattccaatctgctctgacacagcctgccagcgcctctggatctcctggacagagcgtgaccatctcctgtaccggcacctcttctgatgtcggcggctacaactacgtgtcctggtatcagcagcaccccggcaaggcccctaagctgatgatctacgacgtgtccaacagacccagcggcgtgtccaatagattctccggcagcaagagcggcaacaccgccagcctgacaatttctggactgcaagccgaggacgaggccgactactactgtagcagctacaccagcagcagcacactgtacgtgttcggcacaggcacccagctcacagttcttctcgaggacctgaagaacgtgttcccacctgaggtggccgtgttcgagcctagcgaggccgagatcagccacacccagaaagccaccctcgtgtgcctggctaccggcttctaccccgaccatgtggaactgtcttggtgggtcaacggcaaagaggtgcacagcggcgtgtgtaccgacccccagccactgaaagaacagcccgccctgaacgacagccggtactgcctgagcagcagactgagagtgtccgccaccttctggcagaacccccggaaccacttcagatgccaggtgcagttctacggcctgagcgagaacgacgagtggacccaggacagagccaagcccgtgacccagatcgtgtctgccgaagcctggggcagagccgattgcggctttaccagcgagagctaccagcagggcgtgctgagcgccaccaacctgagcgtgatcggcttcagaatcctgctgctgaaagtggccggctttaacctgctgatgaccctgcggctgtggtccagcagggccaagcgatctggatctggagcaacaaacttctcactactcaaacaagcaggtgacgtggaggagaatcccgggcctactagtatggactggatttggcgcatccttttccttgtcggcgctgctaccggcgcgcattccttcgaagaagtgcagctccagcagtctggacctggcctggttaagcctagccagacactgagcctgacctgtgccatcagcggcgattccatgctgagcaacagcgacacctggaactggatcagacagagccccagcagaggcctggaatggctgggcagaacataccacagaagcacttggtacgacgactacgccagctctgtgcggggcagagtgtccatcaatgtggacaccagcaagaaccagtacagcctgcaactgaacgccgtgacacctgaggataccggcgtgtactactgtgccagagtgcggctccaggacggcaattcttggagcgacgcctttgatgtgtggggccagggcacaatggtcaccgtttctagcacgcgtatccagaaccctgatcctgccgtgtaccagctgcgggatagcaagagcagcgacaagagcgtgtgtctgttcaccgacttcgacagccagaccaacgtgtcccagagcaaggactccgacgtgtacatcaccgataagtgcgtgctggacatgcggagcatggacttcaagagcaactccgccgtggcctggtccaacaagtccgatttcgcctgcgccaacgccttcaacaacagcattatccccgaggacacattcttcccaagccccgagagcagctgcgacgtgaagctggtggaaaagagcttcgagacagacaccaacctgaacttccagatcctgtacgagatcctgctgggcaaggccaccctgtacgccgtgctggtgtctgccctggtgctgatggctatggtcaagcggaaggacagccgggga

SEQ ID NO: 5436 - DNA, 2298 bp, synthetic construct
  source 1..2298: mol_type = other DNA
atggccttaccagtgaccgccttgctcctgccgctggccttgctgctccacgccgccaggccggaagtgcagctggttgaatctggcggaggactggttcagcctggcggatctctgagactgtcttgtgccgccagcggcttcagcttcagcgacttttggatgagctgggtccgacaggcccctggcaaaggacttgaatgggtcgccacaatcagccaggccggcagcgagaaggactacgtggactctgtgaagggcagattcaccatcagccgggacaacgccaagaagtccctgtacctccagatgaacagcctgagagccgaggacaccgccgtgtactattgtgcctctggcgtgtacagcttcgactacagaggccagggcaccctggtcacagtctcttctggtaccggcggaggcggatctggcggcggaggtagcggtggcggaggatctgaattcgacgtgatgctgacccagacaccactgagcctgcctgtgtctctgggcgatcaggccagcatctcctgtagaagcagccagagcatcctgcacagcaccggcgatacctacctggaatggtatctccagaagcctggacagagccccaagctgctgattaacaaggtgtccaaccggctgagcggcgtgcccgatagattttctggcagcggctctggcaccgacttcaccctgaagatcagcagagtggaagccgaggacctgggcgtgtactactgcttccaaggcagccatgttccttggacctttggcggaggcaccaagctggaaatcaagagagctgacgccgctcctaccgtgtccatctttcctctcgaggacctgaagaacgtgttcccacctgaggtggccgtgttcgagcctagcgaggccgagatcagccacacccagaaagccaccctcgtgtgcctggctaccggcttctaccccgaccatgtggaactgtcttggtgggtcaacggcaaagaggtgcacagcggcgtgtgtaccgacccccagccactgaaagaacagcccgccctgaacgacagccggtactgcctgagcagcagactgagagtgtccgccaccttctggcagaacccccggaaccacttcagatgccaggtgcagttctacggcctgagcgagaacgacgagtggacccaggacagagccaagcccgtgacccagatcgtgtctgccgaagcctggggcagagccgattgcggctttaccagcgagagctaccagcagggcgtgctgagcgccaccaacctgagcgtgatcggcttcagaatcctgctgctgaaagtggccggctttaacctgctgatgaccctgcggctgtggtccagcagggccaagcgatctggatctggagcaacaaacttctcactactcaaacaagcaggtgacgtggaggagaatcccgggcctactagtatggactggatttggcgcatccttttccttgtcggcgctgctaccggcgcgcattccttcgaacaagtgaagctccagcagagcggccctagccttgtgaaacctggcgcttccgtgaagatgagctgcaaggccagcggctacaccttcaccgatttctacatgaaatgggtcaagcagagccacggcaagtctctggaatggatcggcgacatcaaccccaacatcggagacaccttctacaaccagaagttcaagggcaaagccacactgaccgtggacaagagcagcagcaccgcctacatgcagctcaacagcctgaccagcgaggacagcgccgtgtacttttgttccgtgggctacttcgacgtgtggggagccggaacaaccgtgacagtctcttctacgcgtatccagaaccctgatcctgccgtgtaccagctgcgggatagcaagagcagcgacaagagcgtgtgtctgttcaccgacttcgacagccagaccaacgtgtcccagagcaaggactccgacgtgtacatcaccgataagtgcgtgctggacatgcggagcatggacttcaagagcaactccgccgtggcctggtccaacaagtccgatttcgcctgcgccaacgccttcaacaacagcattatccccgaggacacattcttcccaagccccgagagcagctgcgacgtgaagctggtggaaaagagcttcgagacagacaccaacctgaacttccagatcctgtacgagatcctgctgggcaaggccaccctgtacgccgtgctggtgtctgccctggtgctgatggctatggtcaagcggaaggacagccgggga

SEQ ID NO: 5437 - DNA, 2286 bp, synthetic construct
  source 1..2286: mol_type = other DNA
atggccttaccagtgaccgccttgctcctgccgctggccttgctgctccacgccgccaggccggaagtgcagctggttgaatctggcggaggactggttcagcctggcggatctctgagactgtcttgtgccgccagcggcttcagcttcagcgacttttggatgagctgggtccgacaggcccctggcaaaggacttgaatgggtcgccacaatcagccaggccggcagcgagaaggactacgtggactctgtgaagggcagattcaccatcagccgggacaacgccaagaagtccctgtacctccagatgaacagcctgagagccgaggacaccgccgtgtactattgtgcctctggcgtgtacagcttcgactacagaggccagggcaccctggtcacagtctcttctggtaccggcggaggcggatctggcggcggaggtagcggtggcggaggatctgaattcgagatcgtgctgacacagtctcccgccacactgtcactgtctccaggcgaaagagccacactgagctgtagagccagccagagcgtgtccatctacctggcctggtatcagcagaagcctggacaggctccccggctgctgatctacgatgccagcaatagagccacaggcatccccgccagattttctggctctggcagcggcaccgatttcaccctgaccataagcagcctggaacctgaggacttcgccgtgtactactgccagcagagaagcaactggcctcctttcacattcggccctggcaccaaggtggacatcaaactcgaggacctgaagaacgtgttcccacctgaggtggccgtgttcgagcctagcgaggccgagatcagccacacccagaaagccaccctcgtgtgcctggctaccggcttctaccccgaccatgtggaactgtcttggtgggtcaacggcaaagaggtgcacagcggcgtgtgtaccgacccccagccactgaaagaacagcccgccctgaacgacagccggtactgcctgagcagcagactgagagtgtccgccaccttctggcagaacccccggaaccacttcagatgccaggtgcagttctacggcctgagcgagaacgacgagtggacccaggacagagccaagcccgtgacccagatcgtgtctgccgaagcctggggcagagccgattgcggctttaccagcgagagctaccagcagggcgtgctgagcgccaccaacctgagcgtgatcggcttcagaatcctgctgctgaaagtggccggctttaacctgctgatgaccctgcggctgtggtccagcagggccaagcgatctggatctggagcaacaaacttctcactactcaaacaagcaggtgacgtggaggagaatcccgggcctactagtatggactggatttggcgcatccttttccttgtcggcgctgctaccggcgcgcattccttcgaacaggtgcagcttgttgaaagcggaggcggagttgtgcagcctggcagaagtctgagactgtcttgtgccgccagcggcttcaccttcagcagctatggaatgcactgggtccgacaggcccctggcaaaggacttgaatgggttgccgtgatctgggacgacggcagcaacaagtattacgtggacagcgtgaagggcagattcaccatcagccgggacaacagcaagaacaccctgtacctccagatgaacagcctgagagccgaggacacagccgtgtattattgcgccagagatgactactacggcagcggctccttcaacagctactatggcacagacgtgtggggccagggcacaacagttaccgttagctctacgcgtatccagaaccctgatcctgccgtgtaccagctgcgggatagcaagagcagcgacaagagcgtgtgtctgttcaccgacttcgacagccagaccaacgtgtcccagagcaaggactccgacgtgtacatcaccgataagtgcgtgctggacatgcggagcatggacttcaagagcaactccgccgtggcctggtccaacaagtccgatttcgcctgcgccaacgccttcaacaacagcattatccccgaggacacattcttcccaagccccgagagcagctgcgacgtgaagctggtggaaaagagcttcgagacagacaccaacctgaacttccagatcctgtacgagatcctgctgggcaaggccaccctgtacgccgtgctggtgtctgccctggtgctgatggctatggtcaagcggaaggacagccgggga

SEQ ID NO: 5438 - DNA, 2241 bp, synthetic construct
  source 1..2241: mol_type = other DNA
atggccttaccagtgaccgccttgctcctgccgctggccttgctgctccacgccgccaggccggaagtgcagctggttgaatctggcggaggactggttcagcctggcggatctctgagactgtcttgtgccgccagcggcttcagcttcagcgacttttggatgagctgggtccgacaggcccctggcaaaggacttgaatgggtcgccacaatcagccaggccggcagcgagaaggactacgtggactctgtgaagggcagattcaccatcagccgggacaacgccaagaagtccctgtacctccagatgaacagcctgagagccgaggacaccgccgtgtactattgtgcctctggcgtgtacagcttcgactacagaggccagggcaccctggtcacagtctcttctggtaccggcggaggcggatctggcggcggaggtagcggtggcggaggatctgaattcgacatccagatgacacagagccctagcagcctgtctgccagcgtgggagacagagtgaccatcacctgtagagccagccagggcatctcttcttggctggcctggtatcagcagaagcccgagaaggcccctaagagcctgatctatgccgccagctctctccagagcggagtgcctagcagattttctggcagcggctccggcaccgatttcaccctgacaatatccagcctccagcctgaggacttcgccacctactactgccagcagtacaacagctacccctacaccttcggccagggcaccaagctggaaatcaaactcgaggacctgaagaacgtgttcccacctgaggtggccgtgttcgagcctagcgaggccgagatcagccacacccagaaagccaccctcgtgtgcctggctaccggcttctaccccgaccatgtggaactgtcttggtgggtcaacggcaaagaggtgcacagcggcgtgtgtaccgacccccagccactgaaagaacagcccgccctgaacgacagccggtactgcctgagcagcagactgagagtgtccgccaccttctggcagaacccccggaaccacttcagatgccaggtgcagttctacggcctgagcgagaacgacgagtggacccaggacagagccaagcccgtgacccagatcgtgtctgccgaagcctggggcagagccgattgcggctttaccagcgagagctaccagcagggcgtgctgagcgccaccaacctgagcgtgatcggcttcagaatcctgctgctgaaagtggccggctttaacctgctgatgaccctgcggctgtggtccagcagggccaagcgatctggatctggagcaacaaacttctcactactcaaacaagcaggtgacgtggaggagaatcccgggcctactagtatggactggatttggcgcatccttttccttgtcggcgctgctaccggcgcgcattccttcgaagaagtgcaactggttcaatctggcggcggactggttcatccaggcggttctctgagactgagctgtgccggctctggcttcaccttcagcacctacctgatgtactgggtccgacaggcccctggcaagacactggaatgggtgtccgctattggcagcggaggcgatacctactacgccgactctgtgaagggcagattcaccatcagccgggacaacgccaagaacagcctgtacctccagatgaactccctgagagccgaggacatggccgtgtactactgtgccagaggactcggctattggggccagggaacactggtcacagtgtcctctacgcgtatccagaaccctgatcctgccgtgtaccagctgcgggatagcaagagcagcgacaagagcgtgtgtctgttcaccgacttcgacagccagaccaacgtgtcccagagcaaggactccgacgtgtacatcaccgataagtgcgtgctggacatgcggagcatggacttcaagagcaactccgccgtggcctggtccaacaagtccgatttcgcctgcgccaacgccttcaacaacagcattatccccgaggacacattcttcccaagccccgagagcagctgcgacgtgaagctggtggaaaagagcttcgagacagacaccaacctgaacttccagatcctgtacgagatcctgctgggcaaggccaccctgtacgccgtgctggtgtctgccctggtgctgatggctatggtcaagcggaaggacagccgggga

SEQ ID NO: 5439 - DNA, 2298 bp, synthetic construct
  source 1..2298: mol_type = other DNA
atggccttaccagtgaccgccttgctcctgccgctggccttgctgctccacgccgccaggccggaagtgcagctggttgaatctggcggaggactggttcagcctggcggatctctgagactgtcttgtgccgccagcggcttcagcttcagcgacttttggatgagctgggtccgacaggcccctggcaaaggacttgaatgggtcgccacaatcagccaggccggcagcgagaaggactacgtggactctgtgaagggcagattcaccatcagccgggacaacgccaagaagtccctgtacctccagatgaacagcctgagagccgaggacaccgccgtgtactattgtgcctctggcgtgtacagcttcgactacagaggccagggcaccctggtcacagtctcttctggtaccggcggaggcggatctggcggcggaggtagcggtggcggaggatctgaattcctgcctgttctgacacagcctccatccgtgtctgtggcccctggaaagaccgccagaatcacatgcggcggcaacaacatcggcagcaagagcgtgcactggtatcagcagaagcctggacaggctcctgtgctggtggtgtacgacgacagcgatagacctagcggcatccccgagagattcagcggcagcaattccggcaataccgccacactgaccatcagcagagtggaagctggcgacgaggccgactactactgccaagtgtgggacagcagcagcgactacgtggtgtttggcggcggaacaaagctgacagtgcttctcgaggacctgaagaacgtgttcccacctgaggtggccgtgttcgagcctagcgaggccgagatcagccacacccagaaagccaccctcgtgtgcctggctaccggcttctaccccgaccatgtggaactgtcttggtgggtcaacggcaaagaggtgcacagcggcgtgtgtaccgacccccagccactgaaagaacagcccgccctgaacgacagccggtactgcctgagcagcagactgagagtgtccgccaccttctggcagaacccccggaaccacttcagatgccaggtgcagttctacggcctgagcgagaacgacgagtggacccaggacagagccaagcccgtgacccagatcgtgtctgccgaagcctggggcagagccgattgcggctttaccagcgagagctaccagcagggcgtgctgagcgccaccaacctgagcgtgatcggcttcagaatcctgctgctgaaagtggccggctttaacctgctgatgaccctgcggctgtggtccagcagggccaagcgatctggatctggagcaacaaacttctcactactcaaacaagcaggtgacgtggaggagaatcccgggcctactagtatggactggatttggcgcatccttttccttgtcggcgctgctaccggcgcgcattccttcgaagaagttcaactggtgcagagcggagccgaagtgaagaagccaggcgagagcctgaagattagctgcaaaggcagcggctacagcttcaccagctactggatcggctgggtccgacagatgcctggcaaaggactggaatggatgggcatcatctaccccggcgacagcgacaccagatacagccctagctttcagggccaagtgaccatctccgccgacaagagcatcagcacagcctacctccagtggtcctctctgaaggccagcgataccgccatgtactactgcgccagacaagtctggggatggcaaggcggcatgtaccccaggtctaactggtggtacaacctggactcttggggccagggcacactggtcacagtctcttctacgcgtatccagaaccctgatcctgccgtgtaccagctgcgggatagcaagagcagcgacaagagcgtgtgtctgttcaccgacttcgacagccagaccaacgtgtcccagagcaaggactccgacgtgtacatcaccgataagtgcgtgctggacatgcggagcatggacttcaagagcaactccgccgtggcctggtccaacaagtccgatttcgcctgcgccaacgccttcaacaacagcattatccccgaggacacattcttcccaagccccgagagcagctgcgacgtgaagctggtggaaaagagcttcgagacagacaccaacctgaacttccagatcctgtacgagatcctgctgggcaaggccaccctgtacgccgtgctggtgtctgccctggtgctgatggctatggtcaagcggaaggacagccgggga

SEQ ID NO: 5440 - DNA, 2277 bp, synthetic construct
  source 1..2277: mol_type = other DNA
atggccttaccagtgaccgccttgctcctgccgctggccttgctgctccacgccgccaggccggaagtgcagctggttgaatctggcggaggactggttcagcctggcggatctctgagactgtcttgtgccgccagcggcttcagcttcagcgacttttggatgagctgggtccgacaggcccctggcaaaggacttgaatgggtcgccacaatcagccaggccggcagcgagaaggactacgtggactctgtgaagggcagattcaccatcagccgggacaacgccaagaagtccctgtacctccagatgaacagcctgagagccgaggacaccgccgtgtactattgtgcctctggcgtgtacagcttcgactacagaggccagggcaccctggtcacagtctcttctggtaccggcggaggcggatctggcggcggaggtagcggtggcggaggatctgaattcgagctggtcatgacacagagccctgcttctctggccgtgtcactgggacagagagccaccatctcttgcagagccagcgagagcgtggacagctacggcaagagcttcatgcactggtatcagctcaagcccggccagcctcctaagctgctgatctacagagcctccaacctggaaagcggcgtgccagccagattttctggcagcggcagcagaaccgacttcaccctgaccattgatcccgtggaagccgatgatgccgccacctactactgccagcagaacaacgaggacccctggacatttggcggaggcaccaagctggaaatcaaactcgaggacctgaagaacgtgttcccacctgaggtggccgtgttcgagcctagcgaggccgagatcagccacacccagaaagccaccctcgtgtgcctggctaccggcttctaccccgaccatgtggaactgtcttggtgggtcaacggcaaagaggtgcacagcggcgtgtgtaccgacccccagccactgaaagaacagcccgccctgaacgacagccggtactgcctgagcagcagactgagagtgtccgccaccttctggcagaacccccggaaccacttcagatgccaggtgcagttctacggcctgagcgagaacgacgagtggacccaggacagagccaagcccgtgacccagatcgtgtctgccgaagcctggggcagagccgattgcggctttaccagcgagagctaccagcagggcgtgctgagcgccaccaacctgagcgtgatcggcttcagaatcctgctgctgaaagtggccggctttaacctgctgatgaccctgcggctgtggtccagcagggccaagcgatctggatctggagcaacaaacttctcactactcaaacaagcaggtgacgtggaggagaatcccgggcctactagtatggactggatttggcgcatccttttccttgtcggcgctgctaccggcgcgcattccttcgaagaagtgcagctcgaacagtctggccccgagcttgtgaaacctggcgcttccgtgaagatgagctgcaaggccagcggctacaccttcaccaactactacatgaaatgggtcaagcagagccacggcaagtccctggaatggatcggcgatctgaaccccaacaacggcgacaccttctacaaccagaagttcaagggcaaagccacactgaccgtggacaagagcagcaacaccgcctacatgcagctcaactccctgaccagcgaggacagcgccgtgtactactgtgccagaaccggcagatacgaagagaacgctatggactactggggccagggcacaagcgtgacagtctcttctacgcgtatccagaaccctgatcctgccgtgtaccagctgcgggatagcaagagcagcgacaagagcgtgtgtctgttcaccgacttcgacagccagaccaacgtgtcccagagcaaggactccgacgtgtacatcaccgataagtgcgtgctggacatgcggagcatggacttcaagagcaactccgccgtggcctggtccaacaagtccgatttcgcctgcgccaacgccttcaacaacagcattatccccgaggacacattcttcccaagccccgagagcagctgcgacgtgaagctggtggaaaagagcttcgagacagacaccaacctgaacttccagatcctgtacgagatcctgctgggcaaggccaccctgtacgccgtgctggtgtctgccctggtgctgatggctatggtcaagcggaaggacagccgggga

SEQ ID NO: 5441 - DNA, 2259 bp, synthetic construct
  source 1..2259: mol_type = other DNA
atggccttaccagtgaccgccttgctcctgccgctggccttgctgctccacgccgccaggccggaagtgcagctggttgaatctggcggaggactggttcagcctggcggatctctgagactgtcttgtgccgccagcggcttcagcttcagcgacttttggatgagctgggtccgacaggcccctggcaaaggacttgaatgggtcgccacaatcagccaggccggcagcgagaaggactacgtggactctgtgaagggcagattcaccatcagccgggacaacgccaagaagtccctgtacctccagatgaacagcctgagagccgaggacaccgccgtgtactattgtgcctctggcgtgtacagcttcgactacagaggccagggcaccctggtcacagtctcttctggtaccggcggaggcggatctggcggcggaggtagcggtggcggaggatctgaattcgacgtggtcatgacacagagcccttctagcctgtctgccagcgtgggcgacagagtgaccatcacctgtatggcctccgaggacatctacatccggctggcctggtatcagcagaagcctggaaacgcccctaagctgctgatctacgccgccacctctctggaaacaggcgtgccaagcagattttccggcagcggctctggcaccgatttcaccctgacaatatccagcctccagcctgaggacttcgccacctactactgccagcagtattggagcagcccctggacatttggcggaggcaccaaggtggaaatcaaactcgaggacctgaagaacgtgttcccacctgaggtggccgtgttcgagcctagcgaggccgagatcagccacacccagaaagccaccctcgtgtgcctggctaccggcttctaccccgaccatgtggaactgtcttggtgggtcaacggcaaagaggtgcacagcggcgtgtgtaccgacccccagccactgaaagaacagcccgccctgaacgacagccggtactgcctgagcagcagactgagagtgtccgccaccttctggcagaacccccggaaccacttcagatgccaggtgcagttctacggcctgagcgagaacgacgagtggacccaggacagagccaagcccgtgacccagatcgtgtctgccgaagcctggggcagagccgattgcggctttaccagcgagagctaccagcagggcgtgctgagcgccaccaacctgagcgtgatcggcttcagaatcctgctgctgaaagtggccggctttaacctgctgatgaccctgcggctgtggtccagcagggccaagcgatctggatctggagcaacaaacttctcactactcaaacaagcaggtgacgtggaggagaatcccgggcctactagtatggactggatttggcgcatccttttccttgtcggcgctgctaccggcgcgcattccttcgaacaggttcagctgcaagagtctggccccggactggtcaagcctagccaaacactgagcctgacctgtaccgtgtccggctacagcatcaccagcgactacacctggaactggatcagacagcctcctggcaacggactggaatggatcggctacatcacctacagcggcagcaccagctacaaccccagcctgaaaagccgggtgctgatctccgtggacaccagcaagaatcaggtgtccctgaagctgagcagcgtgacagccgctgataccgccgtgtactactgtgccagactggggagaagatacacaatggactactggggccagggcaccaccgtgacagtttcttctacgcgtatccagaaccctgatcctgccgtgtaccagctgcgggatagcaagagcagcgacaagagcgtgtgtctgttcaccgacttcgacagccagaccaacgtgtcccagagcaaggactccgacgtgtacatcaccgataagtgcgtgctggacatgcggagcatggacttcaagagcaactccgccgtggcctggtccaacaagtccgatttcgcctgcgccaacgccttcaacaacagcattatccccgaggacacattcttcccaagccccgagagcagctgcgacgtgaagctggtggaaaagagcttcgagacagacaccaacctgaacttccagatcctgtacgagatcctgctgggcaaggccaccctgtacgccgtgctggtgtctgccctggtgctgatggctatggtcaagcggaaggacagccgggga

SEQ ID NO: 5442 - DNA, 2271 bp, synthetic construct
  source 1..2271: mol_type = other DNA
atggccttaccagtgaccgccttgctcctgccgctggccttgctgctccacgccgccaggccggaagtgcagctggttgaatctggcggaggactggttcagcctggcggatctctgagactgtcttgtgccgccagcggcttcagcttcagcgacttttggatgagctgggtccgacaggcccctggcaaaggacttgaatgggtcgccacaatcagccaggccggcagcgagaaggactacgtggactctgtgaagggcagattcaccatcagccgggacaacgccaagaagtccctgtacctccagatgaacagcctgagagccgaggacaccgccgtgtactattgtgcctctggcgtgtacagcttcgactacagaggccagggcaccctggtcacagtctcttctggtaccggcggaggcggatctggcggcggaggtagcggtggcggaggatctgaattcgatattgtgctgactcagagccctgccactctgagccttagtccaggcgacagagctaccatctcctgtagggcctctgaatccgtgaccattctgggctctcatctcatatattggtatcaacaaaagccgggccagcctccacggctgctcattcaactggcctctaacgtgcagaccggcgtgccagctagattttctggctctggctcccggaccgactttacactgacaatcagctccgtggaacccgaagattttgccgtctattattgcctccagtccaggaccattcctcggacattcggccagggaacaaaactcgaaatcaagcggctcgaggacctgaagaacgtgttcccacctgaggtggccgtgttcgagcctagcgaggccgagatcagccacacccagaaagccaccctcgtgtgcctggctaccggcttctaccccgaccatgtggaactgtcttggtgggtcaacggcaaagaggtgcacagcggcgtgtgtaccgacccccagccactgaaagaacagcccgccctgaacgacagccggtactgcctgagcagcagactgagagtgtccgccaccttctggcagaacccccggaaccacttcagatgccaggtgcagttctacggcctgagcgagaacgacgagtggacccaggacagagccaagcccgtgacccagatcgtgtctgccgaagcctggggcagagccgattgcggctttaccagcgagagctaccagcagggcgtgctgagcgccaccaacctgagcgtgatcggcttcagaatcctgctgctgaaagtggccggctttaacctgctgatgaccctgcggctgtggtccagcagggccaagcgatctggatctggagcaacaaacttctcactactcaaacaagcaggtgacgtggaggagaatcccgggcctactagtatggactggatttggcgcatccttttccttgtcggcgctgctaccggcgcgcattccttcgaacaggtgcagctcgttcagagtggccccgaagtgaaaaagccaggcgagtccgtgaagatttcctgcaaagcctccggctacacattccggcactactctatgaattgggtcaagcaggccccaggccagggccttaagtggatgggacgcatcaataccgagtccggcgtgccaatctacgccgatgacttcaaaggccggttcagcttcaccgtggatacctctgcctccaccgcctacctggaaatcagcagcctgaccagcgaggatacagctgtgtacttctgtagcaacgattacctctacagcctggatttctggggacagggaaccacactgaccgtgtctagcacgcgtatccagaaccctgatcctgccgtgtaccagctgcgggatagcaagagcagcgacaagagcgtgtgtctgttcaccgacttcgacagccagaccaacgtgtcccagagcaaggactccgacgtgtacatcaccgataagtgcgtgctggacatgcggagcatggacttcaagagcaactccgccgtggcctggtccaacaagtccgatttcgcctgcgccaacgccttcaacaacagcattatccccgaggacacattcttcccaagccccgagagcagctgcgacgtgaagctggtggaaaagagcttcgagacagacaccaacctgaacttccagatcctgtacgagatcctgctgggcaaggccaccctgtacgccgtgctggtgtctgccctggtgctgatggctatggtcaagcggaaggacagccgggga

SEQ ID NO: 5443 - DNA, 2271 bp, synthetic construct
  source 1..2271: mol_type = other DNA
atggccttaccagtgaccgccttgctcctgccgctggccttgctgctccacgccgccaggccggaagtgcagctggttgaatctggcggaggactggttcagcctggcggatctctgagactgtcttgtgccgccagcggcttcagcttcagcgacttttggatgagctgggtccgacaggcccctggcaaaggacttgaatgggtcgccacaatcagccaggccggcagcgagaaggactacgtggactctgtgaagggcagattcaccatcagccgggacaacgccaagaagtccctgtacctccagatgaacagcctgagagccgaggacaccgccgtgtactattgtgcctctggcgtgtacagcttcgactacagaggccagggcaccctggtcacagtctcttctggtaccggcggaggcggatctggcggcggaggtagcggtggcggaggatctgaattcgacatcgtgctgacacagtctcccgccacactgtcactgagccctggcgatagagccacactgagctgtagagccagcgagagcgtgacaatcctgggcagccacctgatctactggtatcagcagaagcccggacaggcccctagactgctgattcagctcgccagcaatgtgcagacaggcatccctgccagattttccggcagcggcagcagaaccgatttcaccctgaccataagcagcctggaacctgaggacttcgccgtgtactactgcctccagagccggacaatccccagaacctttggacagggcaccaagctggaaatcaagagactcgaggacctgaagaacgtgttcccacctgaggtggccgtgttcgagcctagcgaggccgagatcagccacacccagaaagccaccctcgtgtgcctggctaccggcttctaccccgaccatgtggaactgtcttggtgggtcaacggcaaagaggtgcacagcggcgtgtgtaccgacccccagccactgaaagaacagcccgccctgaacgacagccggtactgcctgagcagcagactgagagtgtccgccaccttctggcagaacccccggaaccacttcagatgccaggtgcagttctacggcctgagcgagaacgacgagtggacccaggacagagccaagcccgtgacccagatcgtgtctgccgaagcctggggcagagccgattgcggctttaccagcgagagctaccagcagggcgtgctgagcgccaccaacctgagcgtgatcggcttcagaatcctgctgctgaaagtggccggctttaacctgctgatgaccctgcggctgtggtccagcagggccaagcgatctggatctggagcaacaaacttctcactactcaaacaagcaggtgacgtggaggagaatcccgggcctactagtatggactggatttggcgcatccttttccttgtcggcgctgctaccggcgcgcattccttcgaacaggttcagctggtgcagtctggcagcgagctgaagaaacctggcgagagcgtgaagatcagctgcaaggccagcggctacaccttcacacactacagcatgaactgggtccgacaggcccctggacaaggactggaatggatgggcagaatcaacaccgagacaggcgagcccctgtacgccgacgatttcaagggcagattcgtgttcagcctggacaccagcgccagcacagcctatctccagatcagctctctgaaggccgaggacaccgccgtgtactactgctccaacgactacctgtactccctggactattggggccagggcacactggtcacagtgtctagtacgcgtatccagaaccctgatcctgccgtgtaccagctgcgggatagcaagagcagcgacaagagcgtgtgtctgttcaccgacttcgacagccagaccaacgtgtcccagagcaaggactccgacgtgtacatcaccgataagtgcgtgctggacatgcggagcatggacttcaagagcaactccgccgtggcctggtccaacaagtccgatttcgcctgcgccaacgccttcaacaacagcattatccccgaggacacattcttcccaagccccgagagcagctgcgacgtgaagctggtggaaaagagcttcgagacagacaccaacctgaacttccagatcctgtacgagatcctgctgggcaaggccaccctgtacgccgtgctggtgtctgccctggtgctgatggctatggtcaagcggaaggacagccgggga

SEQ ID NO: 5444 - DNA, 2274 bp, synthetic construct
  source 1..2274: mol_type = other DNA
atggccttaccagtgaccgccttgctcctgccgctggccttgctgctccacgccgccaggccggaagtgcagctggttgaatctggcggaggactggttcagcctggcggatctctgagactgtcttgtgccgccagcggcttcagcttcagcgacttttggatgagctgggtccgacaggcccctggcaaaggacttgaatgggtcgccacaatcagccaggccggcagcgagaaggactacgtggactctgtgaagggcagattcaccatcagccgggacaacgccaagaagtccctgtacctccagatgaacagcctgagagccgaggacaccgccgtgtactattgtgcctctggcgtgtacagcttcgactacagaggccagggcaccctggtcacagtctcttctggtaccggcggaggcggatctggcggcggaggtagcggtggcggaggatctgaattcgacatccagctgactcagagccctagctttctgagcgccagcgtgggcgacagagtgaccattacatgtagagccagccagggcatcagcaccgacctgaactggtatcagcagaagcctggcaaggcccctaagctgctgatctacgccgccagcaatctggaaagcggcgtgccaagcagattttccggctctggcagcggcaccgagttcaccctgacaatatctagcctccagcctgaggacttcgccacctactactgccagcagagctacaactggccctacacctttggcggaggcaccaaggtggaaatcaagagactcgaggacctgaagaacgtgttcccacctgaggtggccgtgttcgagcctagcgaggccgagatcagccacacccagaaagccaccctcgtgtgcctggctaccggcttctaccccgaccatgtggaactgtcttggtgggtcaacggcaaagaggtgcacagcggcgtgtgtaccgacccccagccactgaaagaacagcccgccctgaacgacagccggtactgcctgagcagcagactgagagtgtccgccaccttctggcagaacccccggaaccacttcagatgccaggtgcagttctacggcctgagcgagaacgacgagtggacccaggacagagccaagcccgtgacccagatcgtgtctgccgaagcctggggcagagccgattgcggctttaccagcgagagctaccagcagggcgtgctgagcgccaccaacctgagcgtgatcggcttcagaatcctgctgctgaaagtggccggctttaacctgctgatgaccctgcggctgtggtccagcagggccaagcgatctggatctggagcaacaaacttctcactactcaaacaagcaggtgacgtggaggagaatcccgggcctactagtatggactggatttggcgcatccttttccttgtcggcgctgctaccggcgcgcattccttcgaagaagttcagctggttgaatcaggcggaggactcgtgaaacctggcggctctctgagactgtcttgtgccgccagcggcttcaccttcagcaacttcgagatgaactgggtccgacaggccccaggcaaaggactggaatgggtgtccggcatcagctccaatggccggtacatcaactacgccgacagcgtgaagggcagattcaccatcagccgggacaacgccaagaacagcctgtacctccagatgaactccctgagagccgaggacaccgccgtgtactattgtgccagagtggtggacttcgaccaggactacaacggcttcgactattggggccagggcaccctggttaccgttagctctacgcgtatccagaaccctgatcctgccgtgtaccagctgcgggatagcaagagcagcgacaagagcgtgtgtctgttcaccgacttcgacagccagaccaacgtgtcccagagcaaggactccgacgtgtacatcaccgataagtgcgtgctggacatgcggagcatggacttcaagagcaactccgccgtggcctggtccaacaagtccgatttcgcctgcgccaacgccttcaacaacagcattatccccgaggacacattcttcccaagccccgagagcagctgcgacgtgaagctggtggaaaagagcttcgagacagacaccaacctgaacttccagatcctgtacgagatcctgctgggcaaggccaccctgtacgccgtgctggtgtctgccctggtgctgatggctatggtcaagcggaaggacagccgggga

SEQ ID NO: 5445 - DNA, 2268 bp, synthetic construct
  source 1..2268: mol_type = other DNA
atggccttaccagtgaccgccttgctcctgccgctggccttgctgctccacgccgccaggccggaagtgcagctggttgaatctggcggaggactggttcagcctggcggatctctgagactgtcttgtgccgccagcggcttcagcttcagcgacttttggatgagctgggtccgacaggcccctggcaaaggacttgaatgggtcgccacaatcagccaggccggcagcgagaaggactacgtggactctgtgaagggcagattcaccatcagccgggacaacgccaagaagtccctgtacctccagatgaacagcctgagagccgaggacaccgccgtgtactattgtgcctctggcgtgtacagcttcgactacagaggccagggcaccctggtcacagtctcttctggtaccggcggaggcggatctggcggcggaggtagcggtggcggaggatctgaattcgacatccaactgactcagagccccagctttctgagcgcctctgtgggcgacagagtgaccatcacatgtagtctcagcctgggcatcagcacatggcgggattggtttccgccgaggcttggcaggggccttgagccgctgacctacgccgccagcacactgcaaagcggagtgcctagcagattttccggcagcggctctggcaccgagttcaccctgacaatatccagcctccagcctgaggacttcgccacctactactgccagcagctcaacagctaccctctgacctttggcggaggcaccaaggtggaaatcaagagactcgaggacctgaagaacgtgttcccacctgaggtggccgtgttcgagcctagcgaggccgagatcagccacacccagaaagccaccctcgtgtgcctggctaccggcttctaccccgaccatgtggaactgtcttggtgggtcaacggcaaagaggtgcacagcggcgtgtgtaccgacccccagccactgaaagaacagcccgccctgaacgacagccggtactgcctgagcagcagactgagagtgtccgccaccttctggcagaacccccggaaccacttcagatgccaggtgcagttctacggcctgagcgagaacgacgagtggacccaggacagagccaagcccgtgacccagatcgtgtctgccgaagcctggggcagagccgattgcggctttaccagcgagagctaccagcagggcgtgctgagcgccaccaacctgagcgtgatcggcttcagaatcctgctgctgaaagtggccggctttaacctgctgatgaccctgcggctgtggtccagcagggccaagcgatctggatctggagcaacaaacttctcactactcaaacaagcaggtgacgtggaggagaatcccgggcctactagtatggactggatttggcgcatccttttccttgtcggcgctgctaccggcgcgcattccttcgaagaagttcaactggttgagtctggtggcggcctggttaagcctggcggatctctgagactgagctgtgccgccagcggcttcacctttagcacatacggcatgagctgggtccgacaggcccctggaaaaggacttgagtgggtcgcctacatcaacaacggctccggctacatctactacgccgacagcgtgaagggcagattcaccatcagccgggacaacgccaagaacagcctgtacctccagatgaactccctgagagccgaggacaccgccgtgtactattgtgccagaggacagtggtggagcggcggagactttgattattggggccagggcaccctggtcaccgtttcttctacgcgtatccagaaccctgatcctgccgtgtaccagctgcgggatagcaagagcagcgacaagagcgtgtgtctgttcaccgacttcgacagccagaccaacgtgtcccagagcaaggactccgacgtgtacatcaccgataagtgcgtgctggacatgcggagcatggacttcaagagcaactccgccgtggcctggtccaacaagtccgatttcgcctgcgccaacgccttcaacaacagcattatccccgaggacacattcttcccaagccccgagagcagctgcgacgtgaagctggtggaaaagagcttcgagacagacaccaacctgaacttccagatcctgtacgagatcctgctgggcaaggccaccctgtacgccgtgctggtgtctgccctggtgctgatggctatggtcaagcggaaggacagccgggga

SEQ ID NO: 5446 - DNA, 2271 bp, synthetic construct
  source 1..2271: mol_type = other DNA
atggccttaccagtgaccgccttgctcctgccgctggccttgctgctccacgccgccaggccggaagtgcagctggttgaatctggcggaggactggttcagcctggcggatctctgagactgtcttgtgccgccagcggcttcagcttcagcgacttttggatgagctgggtccgacaggcccctggcaaaggacttgaatgggtcgccacaatcagccaggccggcagcgagaaggactacgtggactctgtgaagggcagattcaccatcagccgggacaacgccaagaagtccctgtacctccagatgaacagcctgagagccgaggacaccgccgtgtactattgtgcctctggcgtgtacagcttcgactacagaggccagggcaccctggtcacagtctcttctggtaccggcggaggcggatctggcggcggaggtagcggtggcggaggatctgaattcgagatcgtgctgacacagtctcccgccacactgtcactgtctccaggcgaaagagccacactgagctgtagcgccagcagcagcgtgtcctacatgtactggtatcagcagaagcccggacaggcccctagactgctgatctacagaaccagcaacctggcctctggcatccccgccagattttctggctctggcagcggcaccgatttcaccctgaccataagcagcctggaacctgaggacttcgccgtgtactactgccagcagtaccacagctaccccaccacctttggacagggcaccaaggtggaaatcaagcggacagttctcgaggacctgaagaacgtgttcccacctgaggtggccgtgttcgagcctagcgaggccgagatcagccacacccagaaagccaccctcgtgtgcctggctaccggcttctaccccgaccatgtggaactgtcttggtgggtcaacggcaaagaggtgcacagcggcgtgtgtaccgacccccagccactgaaagaacagcccgccctgaacgacagccggtactgcctgagcagcagactgagagtgtccgccaccttctggcagaacccccggaaccacttcagatgccaggtgcagttctacggcctgagcgagaacgacgagtggacccaggacagagccaagcccgtgacccagatcgtgtctgccgaagcctggggcagagccgattgcggctttaccagcgagagctaccagcagggcgtgctgagcgccaccaacctgagcgtgatcggcttcagaatcctgctgctgaaagtggccggctttaacctgctgatgaccctgcggctgtggtccagcagggccaagcgatctggatctggagcaacaaacttctcactactcaaacaagcaggtgacgtggaggagaatcccgggcctactagtatggactggatttggcgcatccttttccttgtcggcgctgctaccggcgcgcattccttcgaagaagtgcagctggttgaatcaggtggcggcctggttcaacctggcggatctctgagactgtcttgtgccgccagcggcttcagcttcaacacctacgccatgaactgggtccgacaggctcctggcaaaggactggaatgggtgtcccacatcagaagcaagagcaacaacttcgccacctactacgccgacagcgtgaaggacagattcaccatcagccgggacaacgccaagaacagcctgtacctccagatgaactccctgagagccgaggacaccgccgtgtattattgcgccagacaaggcggcgacttccctatggattattggggccagggcaccctggtcaccgtttcttctacgcgtatccagaaccctgatcctgccgtgtaccagctgcgggatagcaagagcagcgacaagagcgtgtgtctgttcaccgacttcgacagccagaccaacgtgtcccagagcaaggactccgacgtgtacatcaccgataagtgcgtgctggacatgcggagcatggacttcaagagcaactccgccgtggcctggtccaacaagtccgatttcgcctgcgccaacgccttcaacaacagcattatccccgaggacacattcttcccaagccccgagagcagctgcgacgtgaagctggtggaaaagagcttcgagacagacaccaacctgaacttccagatcctgtacgagatcctgctgggcaaggccaccctgtacgccgtgctggtgtctgccctggtgctgatggctatggtcaagcggaaggacagccgggga

SEQ ID NO: 5447 - DNA, 2259 bp, synthetic construct
  source 1..2259: mol_type = other DNA
atggccttaccagtgaccgccttgctcctgccgctggccttgctgctccacgccgccaggccggaagtgcagctggttgaatctggcggaggactggttcagcctggcggatctctgagactgtcttgtgccgccagcggcttcagcttcagcgacttttggatgagctgggtccgacaggcccctggcaaaggacttgaatgggtcgccacaatcagccaggccggcagcgagaaggactacgtggactctgtgaagggcagattcaccatcagccgggacaacgccaagaagtccctgtacctccagatgaacagcctgagagccgaggacaccgccgtgtactattgtgcctctggcgtgtacagcttcgactacagaggccagggcaccctggtcacagtctcttctggtaccggcggaggcggatctggcggcggaggtagcggtggcggaggatctgaattcgacgtggtcatgacacagagcccttctagcctgtctgccagcgtgggcgacagagtgaccatcacctgtaaagccagcgaggacatctacatccggctggcctggtatcagcagaagcctggaaaggcccctaagctgctgatctacgccgccacctctctggaaacaggcgtgccaagcagattttccggcagcggctctggcaccgatttcaccctgacaatatccagcctccagcctgaggacttcgccacctactactgccagcagtattggaccacaccttggacctttggcggaggcaccaaggtggaaatcaaactcgaggacctgaagaacgtgttcccacctgaggtggccgtgttcgagcctagcgaggccgagatcagccacacccagaaagccaccctcgtgtgcctggctaccggcttctaccccgaccatgtggaactgtcttggtgggtcaacggcaaagaggtgcacagcggcgtgtgtaccgacccccagccactgaaagaacagcccgccctgaacgacagccggtactgcctgagcagcagactgagagtgtccgccaccttctggcagaacccccggaaccacttcagatgccaggtgcagttctacggcctgagcgagaacgacgagtggacccaggacagagccaagcccgtgacccagatcgtgtctgccgaagcctggggcagagccgattgcggctttaccagcgagagctaccagcagggcgtgctgagcgccaccaacctgagcgtgatcggcttcagaatcctgctgctgaaagtggccggctttaacctgctgatgaccctgcggctgtggtccagcagggccaagcgatctggatctggagcaacaaacttctcactactcaaacaagcaggtgacgtggaggagaatcccgggcctactagtatggactggatttggcgcatccttttccttgtcggcgctgctaccggcgcgcattccttcgaacaggtgcagctccaagagtctggccctggactggtcaagcctagccagacactgagcctgacctgtaccgtgtccggctacagcatcaccatcgactacacctggaactggatcagacagcctcctggcaaaggactggaatggatcggctacatcacctacagcggcagcaccgactacaaccccagcctgaaaagccgggtgctgatctccgtggacaccagcaagaatcaggtgtccctgaagctgagcagcgtgacagccgctgataccgccgtgtactactgtgccagactgggcagaagatacgccctggattattggggccagggcaccaccgtgacagtgtcatctacgcgtatccagaaccctgatcctgccgtgtaccagctgcgggatagcaagagcagcgacaagagcgtgtgtctgttcaccgacttcgacagccagaccaacgtgtcccagagcaaggactccgacgtgtacatcaccgataagtgcgtgctggacatgcggagcatggacttcaagagcaactccgccgtggcctggtccaacaagtccgatttcgcctgcgccaacgccttcaacaacagcattatccccgaggacacattcttcccaagccccgagagcagctgcgacgtgaagctggtggaaaagagcttcgagacagacaccaacctgaacttccagatcctgtacgagatcctgctgggcaaggccaccctgtacgccgtgctggtgtctgccctggtgctgatggctatggtcaagcggaaggacagccgggga

SEQ ID NO: 5448 - DNA, 2274 bp, synthetic construct
  source 1..2274: mol_type = other DNA
atggccttaccagtgaccgccttgctcctgccgctggccttgctgctccacgccgccaggccggaagtgcagctggttgaatctggcggaggactggttcagcctggcggatctctgagactgtcttgtgccgccagcggcttcagcttcagcgacttttggatgagctgggtccgacaggcccctggcaaaggacttgaatgggtcgccacaatcagccaggccggcagcgagaaggactacgtggactctgtgaagggcagattcaccatcagccgggacaacgccaagaagtccctgtacctccagatgaacagcctgagagccgaggacaccgccgtgtactattgtgcctctggcgtgtacagcttcgactacagaggccagggcaccctggtcacagtctcttctggtaccggcggaggcggatctggcggcggaggtagcggtggcggaggatctgaattcgacatccagatgacccagaccacaagcagcctgtctgccagcctgggcgacagagtgaccatctcttgtagagccagccaggacatcagcaactacctgaactggtatcagcagaaacccgacggcaccgtgaagctgctgatctactacaccagcatcctgcacagcggcgtgcccagcagattttctggctctggcagcggcaccgactacagcctgaccatcagcaatctggaacaagaggacttcgctacctacttctgccagcaaggcaacaccctgccttggacatttggcggaggcaccaagctggaaatcaaagctctcgaggacctgaagaacgtgttcccacctgaggtggccgtgttcgagcctagcgaggccgagatcagccacacccagaaagccaccctcgtgtgcctggctaccggcttctaccccgaccatgtggaactgtcttggtgggtcaacggcaaagaggtgcacagcggcgtgtgtaccgacccccagccactgaaagaacagcccgccctgaacgacagccggtactgcctgagcagcagactgagagtgtccgccaccttctggcagaacccccggaaccacttcagatgccaggtgcagttctacggcctgagcgagaacgacgagtggacccaggacagagccaagcccgtgacccagatcgtgtctgccgaagcctggggcagagccgattgcggctttaccagcgagagctaccagcagggcgtgctgagcgccaccaacctgagcgtgatcggcttcagaatcctgctgctgaaagtggccggctttaacctgctgatgaccctgcggctgtggtccagcagggccaagcgatctggatctggagcaacaaacttctcactactcaaacaagcaggtgacgtggaggagaatcccgggcctactagtatggactggatttggcgcatccttttccttgtcggcgctgctaccggcgcgcattccttcgaagaagtgcaactggttgaatctggcggcggactggttaagcctggcggatctctgaagctgagctgtgccgcctctggcttcgccttcagcatctacgatatgagctgggtccgacagacccctgagaagagactggaatgggtcgcctacatctctagcggcggagggacctactatcccgacacagtgaagggcagattcaccatctccagagacaacgccaagaacaccctgtacctccagatgagcagcctgaagtccgaggacaccgccatgtactactgcgccagacacagcggctatggcacacattggggagtgctgtttgcctactggggccagggaacactggtcacagtttctgctacgcgtatccagaaccctgatcctgccgtgtaccagctgcgggatagcaagagcagcgacaagagcgtgtgtctgttcaccgacttcgacagccagaccaacgtgtcccagagcaaggactccgacgtgtacatcaccgataagtgcgtgctggacatgcggagcatggacttcaagagcaactccgccgtggcctggtccaacaagtccgatttcgcctgcgccaacgccttcaacaacagcattatccccgaggacacattcttcccaagccccgagagcagctgcgacgtgaagctggtggaaaagagcttcgagacagacaccaacctgaacttccagatcctgtacgagatcctgctgggcaaggccaccctgtacgccgtgctggtgtctgccctggtgctgatggctatggtcaagcggaaggacagccgggga

SEQ ID NO: 5449 - DNA, 2304 bp, synthetic construct
  source 1..2304: mol_type = other DNA
atggccttaccagtgaccgccttgctcctgccgctggccttgctgctccacgccgccaggccggaagtgcagctggttgaatctggcggaggactggttcagcctggcggatctctgagactgtcttgtgccgccagcggcttcagcttcagcgacttttggatgagctgggtccgacaggcccctggcaaaggacttgaatgggtcgccacaatcagccaggccggcagcgagaaggactacgtggactctgtgaagggcagattcaccatcagccgggacaacgccaagaagtccctgtacctccagatgaacagcctgagagccgaggacaccgccgtgtactattgtgcctctggcgtgtacagcttcgactacagaggccagggcaccctggtcacagtctcttctggtaccggcggaggcggatctggcggcggaggtagcggtggcggaggatctgaattcgacatcgtgatgacacagagccctgatagcctggccgtgtctctgggagagagagccaccatcaactgcaagagcagccagagcctgctgtacagaagcaaccagaagaactacctggcctggtatcagcagaagcccggccagcctcctaagctgctgatctactgggccagcaccagagaaagcggcgtgcccgatagattttctggctctggcagcggcaccgacttcaccctgacaatttctagcctgcaagccgaggacgtggccgtgtactactgccagcagtattacaactaccccagaaccttcggccagggcaccaaggtggaaatcaagagaacagttctcgaggacctgaagaacgtgttcccacctgaggtggccgtgttcgagcctagcgaggccgagatcagccacacccagaaagccaccctcgtgtgcctggctaccggcttctaccccgaccatgtggaactgtcttggtgggtcaacggcaaagaggtgcacagcggcgtgtgtaccgacccccagccactgaaagaacagcccgccctgaacgacagccggtactgcctgagcagcagactgagagtgtccgccaccttctggcagaacccccggaaccacttcagatgccaggtgcagttctacggcctgagcgagaacgacgagtggacccaggacagagccaagcccgtgacccagatcgtgtctgccgaagcctggggcagagccgattgcggctttaccagcgagagctaccagcagggcgtgctgagcgccaccaacctgagcgtgatcggcttcagaatcctgctgctgaaagtggccggctttaacctgctgatgaccctgcggctgtggtccagcagggccaagcgatctggatctggagcaacaaacttctcactactcaaacaagcaggtgacgtggaggagaatcccgggcctactagtatggactggatttggcgcatccttttccttgtcggcgctgctaccggcgcgcattccttcgaagaagttcagctgcttgaatcaggcggcggactggttcaacctggcggatctctgagactgagctgtgccgccagcggctacagcatcacaagcgactatgcctggaactgggtccgacaggcccctggcaaaggactggaatgggtgtcctacatcagcaacagcggcagcaccagctacaaccccagcctgaagtcccggttcaccatcagcagagacaacagcaagaacaccctgtacctccagatgaacagcctgagagctgaggacaccgccgtgtattattgcgccaaagagcggaactacgactacgacgattactactacgctatggactactggggccagggaaccctggtcacagtctcttctacgcgtatccagaaccctgatcctgccgtgtaccagctgcgggatagcaagagcagcgacaagagcgtgtgtctgttcaccgacttcgacagccagaccaacgtgtcccagagcaaggactccgacgtgtacatcaccgataagtgcgtgctggacatgcggagcatggacttcaagagcaactccgccgtggcctggtccaacaagtccgatttcgcctgcgccaacgccttcaacaacagcattatccccgaggacacattcttcccaagccccgagagcagctgcgacgtgaagctggtggaaaagagcttcgagacagacaccaacctgaacttccagatcctgtacgagatcctgctgggcaaggccaccctgtacgccgtgctggtgtctgccctggtgctgatggctatggtcaagcggaaggacagccgggga

SEQ ID NO: 5450 - DNA, 2283 bp, synthetic construct
  source 1..2283: mol_type = other DNA
atggccttaccagtgaccgccttgctcctgccgctggccttgctgctccacgccgccaggccggaagtgcagctggttgaatctggcggaggactggttcagcctggcggatctctgagactgtcttgtgccgccagcggcttcagcttcagcgacttttggatgagctgggtccgacaggcccctggcaaaggacttgaatgggtcgccacaatcagccaggccggcagcgagaaggactacgtggactctgtgaagggcagattcaccatcagccgggacaacgccaagaagtccctgtacctccagatgaacagcctgagagccgaggacaccgccgtgtactattgtgcctctggcgtgtacagcttcgactacagaggccagggcaccctggtcacagtctcttctggtaccggcggaggcggatctggcggcggaggtagcggtggcggaggatctgaattcgacgtggtcatgacacagagccctctgagcctgcctgtgacacttggacagcctgccagcatcagctgtagaagcagccagagcctgctgcacagcagcggcaatacctacctggaatggtatcagcagaggcccggacagagccccagacctctgatctacaagatcagcacccggttcagcggcgtgcccgatagattttctggctctggcagcggcaccgacttcaccctgaagattagcagagtggaagccgaggacgtgggcgtgtactactgcttccaaggcagccacgtgccatacacctttggcggcggaacaaaggtggaaatcaagagactcgaggacctgaagaacgtgttcccacctgaggtggccgtgttcgagcctagcgaggccgagatcagccacacccagaaagccaccctcgtgtgcctggctaccggcttctaccccgaccatgtggaactgtcttggtgggtcaacggcaaagaggtgcacagcggcgtgtgtaccgacccccagccactgaaagaacagcccgccctgaacgacagccggtactgcctgagcagcagactgagagtgtccgccaccttctggcagaacccccggaaccacttcagatgccaggtgcagttctacggcctgagcgagaacgacgagtggacccaggacagagccaagcccgtgacccagatcgtgtctgccgaagcctggggcagagccgattgcggctttaccagcgagagctaccagcagggcgtgctgagcgccaccaacctgagcgtgatcggcttcagaatcctgctgctgaaagtggccggctttaacctgctgatgaccctgcggctgtggtccagcagggccaagcgatctggatctggagcaacaaacttctcactactcaaacaagcaggtgacgtggaggagaatcccgggcctactagtatggactggatttggcgcatccttttccttgtcggcgctgctaccggcgcgcattccttcgaacaagttcagctggttcagagcggagccgaagtgaagaaacctggggcctctgtgaaggtgtcctgcaaagcctctggcctgaccatcgaggactactacatgcactgggtccgacaggcccctggacaaggacttgaatggatgggctggatcgaccccgagaacggcgatacagagtacggccctaagttccagggcagagtgaccatgaccagagacaccagcatcaacaccgcctacatggaactgagccggctgagatccgatgacaccgccgtgtactattgcgccgtgcacaatgcccactacggcacttggtttgcctattggggccagggcacactggtcaccgttagctctacgcgtatccagaaccctgatcctgccgtgtaccagctgcgggatagcaagagcagcgacaagagcgtgtgtctgttcaccgacttcgacagccagaccaacgtgtcccagagcaaggactccgacgtgtacatcaccgataagtgcgtgctggacatgcggagcatggacttcaagagcaactccgccgtggcctggtccaacaagtccgatttcgcctgcgccaacgccttcaacaacagcattatccccgaggacacattcttcccaagccccgagagcagctgcgacgtgaagctggtggaaaagagcttcgagacagacaccaacctgaacttccagatcctgtacgagatcctgctgggcaaggccaccctgtacgccgtgctggtgtctgccctggtgctgatggctatggtcaagcggaaggacagccgggga

SEQ ID NO: 5451 - DNA, 2259 bp, synthetic construct
  source 1..2259: mol_type = other DNA
atggccttaccagtgaccgccttgctcctgccgctggccttgctgctccacgccgccaggccggaagtgcagctggttgaatctggcggaggactggttcagcctggcggatctctgagactgtcttgtgccgccagcggcttcagcttcagcgacttttggatgagctgggtccgacaggcccctggcaaaggacttgaatgggtcgccacaatcagccaggccggcagcgagaaggactacgtggactctgtgaagggcagattcaccatcagccgggacaacgccaagaagtccctgtacctccagatgaacagcctgagagccgaggacaccgccgtgtactattgtgcctctggcgtgtacagcttcgactacagaggccagggcaccctggtcacagtctcttctggtaccggcggaggcggatctggcggcggaggtagcggtggcggaggatctgaattcgacatccagatgacacagagccctagcagcctgtctgccagcgtgggagacagagtgaccatcacctgtagagccagcgagaacatctacagcaacctggcctggtatcagcagaagcctggcaaggcccctaagctgctgatctacgccgccaccaatctggctgatggcgtgccaagcagattttccggctctggcagcggcaccgatttcaccctgacaatatccagcctccagcctgaggacttcgccacctactactgccagcacttttggggcacccctacattcggccagggcaccaaggtggaaatcaagagaacagttctcgaggacctgaagaacgtgttcccacctgaggtggccgtgttcgagcctagcgaggccgagatcagccacacccagaaagccaccctcgtgtgcctggctaccggcttctaccccgaccatgtggaactgtcttggtgggtcaacggcaaagaggtgcacagcggcgtgtgtaccgacccccagccactgaaagaacagcccgccctgaacgacagccggtactgcctgagcagcagactgagagtgtccgccaccttctggcagaacccccggaaccacttcagatgccaggtgcagttctacggcctgagcgagaacgacgagtggacccaggacagagccaagcccgtgacccagatcgtgtctgccgaagcctggggcagagccgattgcggctttaccagcgagagctaccagcagggcgtgctgagcgccaccaacctgagcgtgatcggcttcagaatcctgctgctgaaagtggccggctttaacctgctgatgaccctgcggctgtggtccagcagggccaagcgatctggatctggagcaacaaacttctcactactcaaacaagcaggtgacgtggaggagaatcccgggcctactagtatggactggatttggcgcatccttttccttgtcggcgctgctaccggcgcgcattccttcgaagaagtgcagctggttgaatcaggtggcggcctggttcaacctggcggatctctgagactgagctgtgccgcctctggcttcagcctgacaaattacggcgtgcactgggtccgacaggcccctggaaaaggactggaatgggtgtccgtgatttggagcggcggcagcaccgattacaacgccgccttcatcagccggttcaccatcagcgccgacaccagcaagaataccgcctacctccagatgaactccctgagagccgaggacaccgccgtgtactattgcgccagagaactgatccacgctatggacaactggggccagggaaccctggtcacagtctcttctacgcgtatccagaaccctgatcctgccgtgtaccagctgcgggatagcaagagcagcgacaagagcgtgtgtctgttcaccgacttcgacagccagaccaacgtgtcccagagcaaggactccgacgtgtacatcaccgataagtgcgtgctggacatgcggagcatggacttcaagagcaactccgccgtggcctggtccaacaagtccgatttcgcctgcgccaacgccttcaacaacagcattatccccgaggacacattcttcccaagccccgagagcagctgcgacgtgaagctggtggaaaagagcttcgagacagacaccaacctgaacttccagatcctgtacgagatcctgctgggcaaggccaccctgtacgccgtgctggtgtctgccctggtgctgatggctatggtcaagcggaaggacagccgggga

SEQ ID NO: 5452 - DNA, 2280 bp, synthetic construct
  source 1..2280: mol_type = other DNA
atggccttaccagtgaccgccttgctcctgccgctggccttgctgctccacgccgccaggccggaagtgcagctggttgaatctggcggaggactggttcagcctggcggatctctgagactgtcttgtgccgccagcggcttcagcttcagcgacttttggatgagctgggtccgacaggcccctggcaaaggacttgaatgggtcgccacaatcagccaggccggcagcgagaaggactacgtggactctgtgaagggcagattcaccatcagccgggacaacgccaagaagtccctgtacctccagatgaacagcctgagagccgaggacaccgccgtgtactattgtgcctctggcgtgtacagcttcgactacagaggccagggcaccctggtcacagtctcttctggtaccggcggaggcggatctggcggcggaggtagcggtggcggaggatctgaattcgacttcgtgatgacacagagccctctgagcctgcctgtgacacctggcgaacctgccagcatcagctgtagaagcagccagagcatcgtgcacagcaacggcaacacctacctggaatggtatctccagaagcctggacagagcccacagctgctgatctacaaggtgtccaacagattcagcggcgtgcccgacagattttctggcagcggctctggcaccgacttcaccctgaagattagcagagtggaagccgaggacgtgggcgtgtactactgcttccaaggctctcacgtgcccctgacctttggacagggcaccaagctggaaatcaagagactcgaggacctgaagaacgtgttcccacctgaggtggccgtgttcgagcctagcgaggccgagatcagccacacccagaaagccaccctcgtgtgcctggctaccggcttctaccccgaccatgtggaactgtcttggtgggtcaacggcaaagaggtgcacagcggcgtgtgtaccgacccccagccactgaaagaacagcccgccctgaacgacagccggtactgcctgagcagcagactgagagtgtccgccaccttctggcagaacccccggaaccacttcagatgccaggtgcagttctacggcctgagcgagaacgacgagtggacccaggacagagccaagcccgtgacccagatcgtgtctgccgaagcctggggcagagccgattgcggctttaccagcgagagctaccagcagggcgtgctgagcgccaccaacctgagcgtgatcggcttcagaatcctgctgctgaaagtggccggctttaacctgctgatgaccctgcggctgtggtccagcagggccaagcgatctggatctggagcaacaaacttctcactactcaaacaagcaggtgacgtggaggagaatcccgggcctactagtatggactggatttggcgcatccttttccttgtcggcgctgctaccggcgcgcattccttcgaagaagtgcagctggttgaaagcggagccgaagtgaagaaacctggggcctctgtgaaggtgtcctgcaaggccagcggctacacctttaccagctactggattcactgggtccgacaggcccctggacaaggacttgagtggatgggcgagaacgacccctccaacggcaggaccaactacaacgagaagttcaagaaccgcgtgaccctgaccgtggacaccagcatctctaccgcctacatggaactgagccggctgagatccgatgacaccgccgtgtactattgcgccagaggacccaactacttttacagcatggactactggggccagggcacaatggtcaccgttagctctacgcgtatccagaaccctgatcctgccgtgtaccagctgcgggatagcaagagcagcgacaagagcgtgtgtctgttcaccgacttcgacagccagaccaacgtgtcccagagcaaggactccgacgtgtacatcaccgataagtgcgtgctggacatgcggagcatggacttcaagagcaactccgccgtggcctggtccaacaagtccgatttcgcctgcgccaacgccttcaacaacagcattatccccgaggacacattcttcccaagccccgagagcagctgcgacgtgaagctggtggaaaagagcttcgagacagacaccaacctgaacttccagatcctgtacgagatcctgctgggcaaggccaccctgtacgccgtgctggtgtctgccctggtgctgatggctatggtcaagcggaaggacagccgggga

SEQ ID NO: 5453 - DNA, 2259 bp, synthetic construct
  source 1..2259: mol_type = other DNA
atggccttaccagtgaccgccttgctcctgccgctggccttgctgctccacgccgccaggccggaagtgcagctggttgaatctggcggaggactggttcagcctggcggatctctgagactgtcttgtgccgccagcggcttcagcttcagcgacttttggatgagctgggtccgacaggcccctggcaaaggacttgaatgggtcgccacaatcagccaggccggcagcgagaaggactacgtggactctgtgaagggcagattcaccatcagccgggacaacgccaagaagtccctgtacctccagatgaacagcctgagagccgaggacaccgccgtgtactattgtgcctctggcgtgtacagcttcgactacagaggccagggcaccctggtcacagtctcttctggtaccggcggaggcggatctggcggcggaggtagcggtggcggaggatctgaattcgacatccagctgactcagagccctagctttctgagcgccagcgtgggcgacagagtgaccatcacatgtagcgccagatccagcatcagcttcatgtactggtatcagcagaagcccggcaaggcccctaagctgctgatctacgacaccagcaatctggcctctggcgtgcccagcagattttctggaagcggcagcggcaccgagttcaccctgacaatctctagcctggaagccgaggatgccgccacctactattgccagcagtggtccagctatcccctgacatttggacagggcaccaagctggaaatcaaactcgaggacctgaagaacgtgttcccacctgaggtggccgtgttcgagcctagcgaggccgagatcagccacacccagaaagccaccctcgtgtgcctggctaccggcttctaccccgaccatgtggaactgtcttggtgggtcaacggcaaagaggtgcacagcggcgtgtgtaccgacccccagccactgaaagaacagcccgccctgaacgacagccggtactgcctgagcagcagactgagagtgtccgccaccttctggcagaacccccggaaccacttcagatgccaggtgcagttctacggcctgagcgagaacgacgagtggacccaggacagagccaagcccgtgacccagatcgtgtctgccgaagcctggggcagagccgattgcggctttaccagcgagagctaccagcagggcgtgctgagcgccaccaacctgagcgtgatcggcttcagaatcctgctgctgaaagtggccggctttaacctgctgatgaccctgcggctgtggtccagcagggccaagcgatctggatctggagcaacaaacttctcactactcaaacaagcaggtgacgtggaggagaatcccgggcctactagtatggactggatttggcgcatccttttccttgtcggcgctgctaccggcgcgcattccttcgaacaggttcagctggttcagtctggggccgaagtgaagaaacctggggcctctgtgaaggtgtcctgcaaggcttccggctacacctttaccggctcttggatgaactgggtccgacaggctcctggacagggactcgaatggatcggcagaatctatcctggcgacggcgagacaaactacaacggcaagttcaaggaccgcgtgacaatcaccgccgacaagagcacaagcaccgcctacatggaactgagcagcctgcggagcgaagataccgccgtgtactactgcgcccggatctacggcaacaacgtgtacttcgatgtgtggggccagggcacaaccgtgacagtctcttctacgcgtatccagaaccctgatcctgccgtgtaccagctgcgggatagcaagagcagcgacaagagcgtgtgtctgttcaccgacttcgacagccagaccaacgtgtcccagagcaaggactccgacgtgtacatcaccgataagtgcgtgctggacatgcggagcatggacttcaagagcaactccgccgtggcctggtccaacaagtccgatttcgcctgcgccaacgccttcaacaacagcattatccccgaggacacattcttcccaagccccgagagcagctgcgacgtgaagctggtggaaaagagcttcgagacagacaccaacctgaacttccagatcctgtacgagatcctgctgggcaaggccaccctgtacgccgtgctggtgtctgccctggtgctgatggctatggtcaagcggaaggacagccgggga

SEQ ID NO: 5454 - DNA, 2283 bp, synthetic construct
  source 1..2283: mol_type = other DNA
atggccttaccagtgaccgccttgctcctgccgctggccttgctgctccacgccgccaggccggaagtgcagctggttgaatctggcggaggactggttcagcctggcggatctctgagactgtcttgtgccgccagcggcttcagcttcagcgacttttggatgagctgggtccgacaggcccctggcaaaggacttgaatgggtcgccacaatcagccaggccggcagcgagaaggactacgtggactctgtgaagggcagattcaccatcagccgggacaacgccaagaagtccctgtacctccagatgaacagcctgagagccgaggacaccgccgtgtactattgtgcctctggcgtgtacagcttcgactacagaggccagggcaccctggtcacagtctcttctggtaccggcggaggcggatctggcggcggaggtagcggtggcggaggatctgaattccagctggtgctgacacagtctccaagcgcctctgccagcctgggatctagcgtgaagctgacctgtacactgagcagcggccacaagaccgacaccatcgactggtatcagcagcagcctggcaaggcccctagatacctgatgaagctggaaggcagcggcagctacaacaaaggctctggcgtgcccgatagattcagcggcagttcttctggcgctgattggtatctgaccatcagcagcctccagagcgaggacgaggccgattactactgcggcacagactaccccggcaactacctgtttggcggcggaacacagctgacagtgcttggcctcgaggacctgaagaacgtgttcccacctgaggtggccgtgttcgagcctagcgaggccgagatcagccacacccagaaagccaccctcgtgtgcctggctaccggcttctaccccgaccatgtggaactgtcttggtgggtcaacggcaaagaggtgcacagcggcgtgtgtaccgacccccagccactgaaagaacagcccgccctgaacgacagccggtactgcctgagcagcagactgagagtgtccgccaccttctggcagaacccccggaaccacttcagatgccaggtgcagttctacggcctgagcgagaacgacgagtggacccaggacagagccaagcccgtgacccagatcgtgtctgccgaagcctggggcagagccgattgcggctttaccagcgagagctaccagcagggcgtgctgagcgccaccaacctgagcgtgatcggcttcagaatcctgctgctgaaagtggccggctttaacctgctgatgaccctgcggctgtggtccagcagggccaagcgatctggatctggagcaacaaacttctcactactcaaacaagcaggtgacgtggaggagaatcccgggcctactagtatggactggatttggcgcatccttttccttgtcggcgctgctaccggcgcgcattccttcgaacaagaacagctggttgaaagcggcggaggactggttcaacctggcggttctctgagactgagctgtgccgccagcggcttcaccttcagcgactactacatgagctggatcagacaggccccaggcaaaggactggaatgggtcgccacaatctaccccagcagcggcaagacctactacgccgattctgccaagggcagactgaccatctccagcgacaacgccaaggacagcctgtacctccagatgaacagcctgagagccgaggacaccgccgtgtactactgcaccagagatagctacgccgacgacgccgctctgtttgacatttggggccagggcaccaccgtgaccgtttcttctacgcgtatccagaaccctgatcctgccgtgtaccagctgcgggatagcaagagcagcgacaagagcgtgtgtctgttcaccgacttcgacagccagaccaacgtgtcccagagcaaggactccgacgtgtacatcaccgataagtgcgtgctggacatgcggagcatggacttcaagagcaactccgccgtggcctggtccaacaagtccgatttcgcctgcgccaacgccttcaacaacagcattatccccgaggacacattcttcccaagccccgagagcagctgcgacgtgaagctggtggaaaagagcttcgagacagacaccaacctgaacttccagatcctgtacgagatcctgctgggcaaggccaccctgtacgccgtgctggtgtctgccctggtgctgatggctatggtcaagcggaaggacagccgggga

SEQ ID NO: 5455 - DNA, 2259 bp, synthetic construct; identical to SEQ ID NO: 5451
  source 1..2259: mol_type = other DNA

SEQ ID NO: 5456 - DNA, 2280 bp, synthetic construct; identical to SEQ ID NO: 5452
  source 1..2280: mol_type = other DNA

SEQ ID NO: 5457 - DNA, 2259 bp, synthetic construct; identical to SEQ ID NO: 5453
  source 1..2259: mol_type = other DNA

SEQ ID NO: 5458 - DNA, 2283 bp, synthetic construct; identical to SEQ ID NO: 5454
  source 1..2283: mol_type = other DNA

SEQ ID NO: 5459 - DNA, 2280 bp, synthetic construct
  source 1..2280: mol_type = other DNA
atggccttaccagtgaccgccttgctcctgccgctggccttgctgctccacgccgccaggccggaagtgcagctggttgaatctggcggaggactggttcagcctggcggatctctgagactgtcttgtgccgccagcggcttcagcttcagcgacttttggatgagctgggtccgacaggcccctggcaaaggacttgaatgggtcgccacaatcagccaggccggcagcgagaaggactacgtggactctgtgaagggcagattcaccatcagccgggacaacgccaagaagtccctgtacctccagatgaacagcctgagagccgaggacaccgccgtgtactattgtgcctctggcgtgtacagcttcgactacagaggccagggcaccctggtcacagtctcttctggtaccggcggaggcggatctggcggcggaggtagcggtggcggaggatctgaattcgatatccagctcactcaaagcccctctagtctctctgcctcagtgggggatcgggtcagttttacttgtcaagcttcacaggatatcaacaacttccttaattggtatcagcagaagccaggaaaagcacccaagctgctcatctatgatgcctcaaatttggagacgggtgttcccagtcgattctctgggtcagggtccgggaccgactttacgtttacgatctcctctctgcagcccgaagacatcgccacatactattgtcaacagtacggcaacttgcctttcacatttgggggcgggactaaggttgaaatcaagaggctcgaggacctgaagaacgtgttcccacctgaggtggccgtgttcgagcctagcgaggccgagatcagccacacccagaaagccaccctcgtgtgcctggctaccggcttctaccccgaccatgtggaactgtcttggtgggtcaacggcaaagaggtgcacagcggcgtgtgtaccgacccccagccactgaaagaacagcccgccctgaacgacagccggtactgcctgagcagcagactgagagtgtccgccaccttctggcagaacccccggaaccacttcagatgccaggtgcagttctacggcctgagcgagaacgacgagtggacccaggacagagccaagcccgtgacccagatcgtgtctgccgaagcctggggcagagccgattgcggctttaccagcgagagctaccagcagggcgtgctgagcgccaccaacctgagcgtgatcggcttcagaatcctgctgctgaaagtggccggctttaacctgctgatgaccctgcggctgtggtccagcagggccaagcgatctggatctggagcaacaaacttctcactactcaaacaagcaggtgacgtggaggagaatcccgggcctactagtatggactggatttggcgcatccttttccttgtcggcgctgctaccggcgcgcattccttcgaacaggtacagctgcaggaatctgggcccggacttgtcaagccaagtcagacactttctcttacatgtaccgtgagcggcggaagtataagcagtggaggcttttactggtcttggatacggcagcacccaggcaaaggcttggagtggattggatacattcatcattcaggatctacacactataatccatcccttaagtcccgggtcaccattagcattgatacgtctaagaatctgttcagtctcaggctgtcctccgtcactgctgccgacacagccgtgtactactgcgcctccttggtttactgcggaggcgactgttatagcggctttgattattgggggcaggggaccctcgtaaccgtgagctctacgcgtatccagaaccctgatcctgccgtgtaccagctgcgggatagcaagagcagcgacaagagcgtgtgtctgttcaccgacttcgacagccagaccaacgtgtcccagagcaaggactccgacgtgtacatcaccgataagtgcgtgctggacatgcggagcatggacttcaagagcaactccgccgtggcctggtccaacaagtccgatttcgcctgcgccaacgccttcaacaacagcattatccccgaggacacattcttcccaagccccgagagcagctgcgacgtgaagctggtggaaaagagcttcgagacagacaccaacctgaacttccagatcctgtacgagatcctgctgggcaaggccaccctgtacgccgtgctggtgtctgccctggtgctgatggctatggtcaagcggaaggacagccgggga

SEQ ID NO: 5460 - DNA, 2268 bp, synthetic construct
  source 1..2268: mol_type = other DNA
atggccttaccagtgaccgccttgctcctgccgctggccttgctgctccacgccgccaggccggaagtgcagctggttgaatctggcggaggactggttcagcctggcggatctctgagactgtcttgtgccgccagcggcttcagcttcagcgacttttggatgagctgggtccgacaggcccctggcaaaggacttgaatgggtcgccacaatcagccaggccggcagcgagaaggactacgtggactctgtgaagggcagattcaccatcagccgggacaacgccaagaagtccctgtacctccagatgaacagcctgagagccgaggacaccgccgtgtactattgtgcctctggcgtgtacagcttcgactacagaggccagggcaccctggtcacagtctcttctggtaccggcggaggcggatctggcggcggaggtagcggtggcggaggatctgaattcgacattcagatgacacagagccctagcagcctgagcgcctctgtgggagacagagtgaccatcacatgcaagagcagccagagcgtgctgtactccagcaatcagaagaactacctggcctggttccagcagaagcctggcaaggctcctaagctgctgatctactgggccagcaccagagaaagcggcgtgccaagcagattttctggcagcggctctggcaccgacttcaccctgacaatatccagcctccagcctgaggacttcgccacctacttttgccaccagtacctgagcagctacacattcggacagggcaccaaggtggaaatcaagcggctcgaggacctgaagaacgtgttcccacctgaggtggccgtgttcgagcctagcgaggccgagatcagccacacccagaaagccaccctcgtgtgcctggctaccggcttctaccccgaccatgtggaactgtcttggtgggtcaacggcaaagaggtgcacagcggcgtgtgtaccgacccccagccactgaaagaacagcccgccctgaacgacagccggtactgcctgagcagcagactgagagtgtccgccaccttctggcagaacccccggaaccacttcagatgccaggtgcagttctacggcctgagcgagaacgacgagtggacccaggacagagccaagcccgtgacccagatcgtgtctgccgaagcctggggcagagccgattgcggctttaccagcgagagctaccagcagggcgtgctgagcgccaccaacctgagcgtgatcggcttcagaatcctgctgctgaaagtggccggctttaacctgctgatgaccctgcggctgtggtccagcagggccaagcgatctggatctggagcaacaaacttctcactactcaaacaagcaggtgacgtggaggagaatcccgggcctactagtatggactggatttggcgcatccttttccttgtcggcgctgctaccggcgcgcattccttcgaagaggtgcagctggttgaatctggcggaggactggttcagcctggcggatctctgagactgtcttgtgccgccagcggctacaccttcaccacctattggatgcactgggtccgacaggcccctggcaaaggacttgagtgggtcggatatatcaggcccagcaccggctacacagagtacaaccagaagttcaaggaccgcttcaccatcagcgccgacaccagcaagaataccgcctacctccagatgaacagcctgagagccgaggacaccgccgtgtactactgtgccagatccagatggctgctggactattggggccagggcacactggttacagtttctacgcgtatccagaaccctgatcctgccgtgtaccagctgcgggatagcaagagcagcgacaagagcgtgtgtctgttcaccgacttcgacagccagaccaacgtgtcccagagcaaggactccgacgtgtacatcaccgataagtgcgtgctggacatgcggagcatggacttcaagagcaactccgccgtggcctggtccaacaagtccgatttcgcctgcgccaacgccttcaacaacagcattatccccgaggacacattcttcccaagccccgagagcagctgcgacgtgaagctggtggaaaagagcttcgagacagacaccaacctgaacttccagatcctgtacgagatcctgctgggcaaggccaccctgtacgccgtgctggtgtctgccctggtgctgatggctatggtcaagcggaaggacagccgggga

SEQ ID NO: 5461 - DNA, 2259 bp, synthetic construct
  source 1..2259: mol_type = other DNA
atggccttaccagtgaccgccttgctcctgccgctggccttgctgctccacgccgccaggccggaagtgcagctggttgaatctggcggaggactggttcagcctggcggatctctgagactgtcttgtgccgccagcggcttcagcttcagcgacttttggatgagctgggtccgacaggcccctggcaaaggacttgaatgggtcgccacaatcagccaggccggcagcgagaaggactacgtggactctgtgaagggcagattcaccatcagccgggacaacgccaagaagtccctgtacctccagatgaacagcctgagagccgaggacaccgccgtgtactattgtgcctctggcgtgtacagcttcgactacagaggccagggcaccctggtcacagtctcttctggtaccggcggaggcggatctggcggcggaggtagcggtggcggaggatctgaattcgacatccagatgacacagagccctagcagcctgtctgccagcgtgggagacagagtgaccatcacctgtagagccagccaggacatcagcaactacctgaactggtatcagcagaagcccggcaaggcccctaagctgctgatctactacaccagcagactgcacagcggcgtgcccagcagattttctggctctggcagcggcaccgacttcaccctgacaatatctagcctccagcctgaggacttcgccacctactattgccagcagggcaacaccctgccttacacatttggacagggcaccaaggtggaaatcaagagactcgaggacctgaagaacgtgttcccacctgaggtggccgtgttcgagcctagcgaggccgagatcagccacacccagaaagccaccctcgtgtgcctggctaccggcttctaccccgaccatgtggaactgtcttggtgggtcaacggcaaagaggtgcacagcggcgtgtgtaccgacccccagccactgaaagaacagcccgccctgaacgacagccggtactgcctgagcagcagactgagagtgtccgccaccttctggcagaacccccggaaccacttcagatgccaggtgcagttctacggcctgagcgagaacgacgagtggacccaggacagagccaagcccgtgacccagatcgtgtctgccgaagcctggggcagagccgattgcggctttaccagcgagagctaccagcagggcgtgctgagcgccaccaacctgagcgtgatcggcttcagaatcctgctgctgaaagtggccggctttaacctgctgatgaccctgcggctgtggtccagcagggccaagcgatctggatctggagcaacaaacttctcactactcaaacaagcaggtgacgtggaggagaatcccgggcctactagtatggactggatttggcgcatccttttccttgtcggcgctgctaccggcgcgcattccttcgaagaagtgcagctggttgaatcaggtggcggcctggttcaacctggcggatctctgagactgagctgtgccgccagcggcttcaccttcagcgactactttatgagctgggtccgacaggcccctggcaaaggacttgaatgggtcgccaccatcagcaatggcggcacctacacttactaccccgacagcgtgaagggcagattcaccatctccagagacaacagcaagaacaccctgtacctccagatgaactccctgagagccgaggacaccgccgtgtactactgcgccagattcgacggctacatcttcgactattggggccagggcaccctggtcacagtctcttctacgcgtatccagaaccctgatcctgccgtgtaccagctgcgggatagcaagagcagcgacaagagcgtgtgtctgttcaccgacttcgacagccagaccaacgtgtcccagagcaaggactccgacgtgtacatcaccgataagtgcgtgctggacatgcggagcatggacttcaagagcaactccgccgtggcctggtccaacaagtccgatttcgcctgcgccaacgccttcaacaacagcattatccccgaggacacattcttcccaagccccgagagcagctgcgacgtgaagctggtggaaaagagcttcgagacagacaccaacctgaacttccagatcctgtacgagatcctgctgggcaaggccaccctgtacgccgtgctggtgtctgccctggtgctgatggctatggtcaagcggaaggacagccgggga

SEQ ID NO: 5462 - DNA, 2274 bp, synthetic construct
  source 1..2274: mol_type = other DNA
atggccttaccagtgaccgccttgctcctgccgctggccttgctgctccacgccgccaggccggaagtgcagctggttgaatctggcggaggactggttcagcctggcggatctctgagactgtcttgtgccgccagcggcttcagcttcagcgacttttggatgagctgggtccgacaggcccctggcaaaggacttgaatgggtcgccacaatcagccaggccggcagcgagaaggactacgtggactctgtgaagggcagattcaccatcagccgggacaacgccaagaagtccctgtacctccagatgaacagcctgagagccgaggacaccgccgtgtactattgtgcctctggcgtgtacagcttcgactacagaggccagggcaccctggtcacagtctcttctggtaccggcggaggcggatctggcggcggaggtagcggtggcggaggatctgaattcgacatccagatgacacagactacatcctccctgtctgcctctctgggagacagagtcaccatcagttgcagggcaagtcaggacattagtaagtacctgaactggtatcagcagaaaccagatggaactgttaaactcctgatctaccatacatcaagattacactcaggagtcccatcaaggttcagtggcagtgggtctggaacagattattctctcaccattagcaacctggagcaagaagatattgccacttacttttgccaacagggtaatacgcttccgtacacgttcggaggggggaccaagctggagatcacactcgagatccagaaccctgatcctgccgtgtaccagctgcgggatagcaagagcagcgacaagagcgtgtgtctgttcaccgacttcgacagccagaccaacgtgtcccagagcaaggactccgacgtgtacatcaccgataagtgcgtgctggacatgcggagcatggacttcaagagcaactccgccgtggcctggtccaacaagtccgatttcgcctgcgccaacgccttcaacaacagcattatccccgaggacacattcttcccaagccccgagagcagctgcgacgtgaagctggtggaaaagagcttcgagacagacaccaacctgaacttccagatcctgtacgagatcctgctgggcaaggccaccctgtacgccgtgctggtgtctgccctggtgctgatggctatggtcaagcggaaggacagccggggacgcgccaagagaagcggatctggcgtgaagcagaccctgaatttcgacctgctgaagctggctggcgacgtggaatccaacccaggccctactagtatggactggatttggcgcatccttttccttgtcggcgctgctaccggcgcgcattccttcgaagtgaaactgcaggagtcaggacctggcctggtggcgccctcacagagcctgtccgtcacatgcactgtctcaggggtctcattacccgactatggtgtaagctggattcgccagcctccacgaaagggtctggagtggctgggagtaatatggggtagtgaaaccacatactataattcagctctcaaatccagactgaccatcatcaaggacaactccaagagccaagttttcttaaaaatgaacagtctgcaaactgatgacacagccatttactactgtgccaaacattattactacggtggtagctatgctatggactactggggccaaggaacctcagtcaccgtctcctcaacgcgtgaggacctgaagaacgtgttcccacctgaggtggccgtgttcgagcctagcgaggccgagatcagccacacccagaaagccaccctcgtgtgcctggctaccggcttctaccccgaccatgtggaactgtcttggtgggtcaacggcaaagaggtgcacagcggcgtgtgtaccgacccccagccactgaaagaacagcccgccctgaacgacagccggtactgcctgagcagcagactgagagtgtccgccaccttctggcagaacccccggaaccacttcagatgccaggtgcagttctacggcctgagcgagaacgacgagtggacccaggacagagccaagcccgtgacccagatcgtgtctgccgaagcctggggcagagccgattgcggctttaccagcgagagctaccagcagggcgtgctgagcgccaccaacctgagcgtgatcggcttcagaatcctgctgctgaaagtggccggctttaacctgctgatgaccctgcggctgtggtccagc

SEQ ID NO: 5463 - DNA, 2277 bp, synthetic construct
  source 1..2277: mol_type = other DNA
atggccttaccagtgaccgccttgctcctgccgctggccttgctgctccacgccgccaggccggaagtgcagctggttgaatctggcggaggactggttcagcctggcggatctctgagactgtcttgtgccgccagcggcttcagcttcagcgacttttggatgagctgggtccgacaggcccctggcaaaggacttgaatgggtcgccacaatcagccaggccggcagcgagaaggactacgtggactctgtgaagggcagattcaccatcagccgggacaacgccaagaagtccctgtacctccagatgaacagcctgagagccgaggacaccgccgtgtactattgtgcctctggcgtgtacagcttcgactacagaggccagggcaccctggtcacagtctcttctggtaccggcggaggcggatctggcggcggaggtagcggtggcggaggatctgaattcgagatcgtgatgacccagagccctgccaccctgtctctgagccctggcgaaagagccaccctgagctgtagagccagccaggacatcagcaagtacctgaactggtatcagcagaagcccggccaggcccccagactgctgatctaccacaccagcagactgcacagcggcatccccgccagattttctggctctggcagcggcaccgactacaccctgacaatcagcagcctccagcccgaggacttcgccgtgtacttctgtcagcaaggcaacaccctgccctacaccttcggccagggcaccaagctggaaatcaagctcgagatccagaaccctgatcctgccgtgtaccagctgcgggatagcaagagcagcgacaagagcgtgtgtctgttcaccgacttcgacagccagaccaacgtgtcccagagcaaggactccgacgtgtacatcaccgataagtgcgtgctggacatgcggagcatggacttcaagagcaactccgccgtggcctggtccaacaagtccgatttcgcctgcgccaacgccttcaacaacagcattatccccgaggacacattcttcccaagccccgagagcagctgcgacgtgaagctggtggaaaagagcttcgagacagacaccaacctgaacttccagatcctgtacgagatcctgctgggcaaggccaccctgtacgccgtgctggtgtctgccctggtgctgatggctatggtcaagcggaaggacagccggggacgcgccaagagaagcggatctggcgtgaagcagaccctgaatttcgacctgctgaagctggctggcgacgtggaatccaacccaggccctactagtatggactggatttggcgcatccttttccttgtcggcgctgctaccggcgcgcattccttcgaacaggtgcaactccaggaatctggccctggcctcgtgaagcccagcgagacactgagcctgacctgtaccgtgtccggcgtgtccctgcctgactatggcgtgtcctggatcagacagccccctggcaagggcctggaatggatcggagtgatttggggcagcgaaaccacctactacaacagctccctgaagtccagagtgaccatctccaaggacaactccaagaaccaggtgtccctgaagctgagcagcgtgacagccgccgacaccgccgtgtattactgcgccaagcactactactacggcggcagctacgctatggactactggggccagggaaccctcgtgaccgtgtctagtacgcgtgaggacctgaagaacgtgttcccacctgaggtggccgtgttcgagcctagcgaggccgagatcagccacacccagaaagccaccctcgtgtgcctggctaccggcttctaccccgaccatgtggaactgtcttggtgggtcaacggcaaagaggtgcacagcggcgtgtgtaccgacccccagccactgaaagaacagcccgccctgaacgacagccggtactgcctgagcagcagactgagagtgtccgccaccttctggcagaacccccggaaccacttcagatgccaggtgcagttctacggcctgagcgagaacgacgagtggacccaggacagagccaagcccgtgacccagatcgtgtctgccgaagcctggggcagagccgattgcggctttaccagcgagagctaccagcagggcgtgctgagcgccaccaacctgagcgtgatcggcttcagaatcctgctgctgaaagtggccggctttaacctgctgatgaccctgcggctgtggtccagc

SEQ ID NO: 5464 - DNA, 2280 bp, synthetic construct
  source 1..2280: mol_type = other DNA
atggccttaccagtgaccgccttgctcctgccgctggccttgctgctccacgccgccaggccggaagtgcagctggttgaatctggcggaggactggttcagcctggcggatctctgagactgtcttgtgccgccagcggcttcagcttcagcgacttttggatgagctgggtccgacaggcccctggcaaaggacttgaatgggtcgccacaatcagccaggccggcagcgagaaggactacgtggactctgtgaagggcagattcaccatcagccgggacaacgccaagaagtccctgtacctccagatgaacagcctgagagccgaggacaccgccgtgtactattgtgcctctggcgtgtacagcttcgactacagaggccagggcaccctggtcacagtctcttctggtaccggcggaggcggatctggcggcggaggtagcggtggcggaggatctgaattcgacgagatcgtgctgacacagagccccgccaccctgtcactgtctccaggcgaaagagccaccctgagctgtagcgccagcagcagcgtgtcctacatgcactggtatcagcagaagcccggccaggcccccagactgctgatctacgataccagcaagctggcctccggcatccccgccagattttctggcagcggctccggcaccgacttcaccctgacaatcagcagcctggaacccgaggacgtggccgtgtactactgttttcaaggcagcgtgtaccccttcaccttcggccagggcaccaagctggaaatcaagagactcgagatccagaaccctgatcctgccgtgtaccagctgcgggatagcaagagcagcgacaagagcgtgtgtctgttcaccgacttcgacagccagaccaacgtgtcccagagcaaggactccgacgtgtacatcaccgataagtgcgtgctggacatgcggagcatggacttcaagagcaactccgccgtggcctggtccaacaagtccgatttcgcctgcgccaacgccttcaacaacagcattatccccgaggacacattcttcccaagccccgagagcagctgcgacgtgaagctggtggaaaagagcttcgagacagacaccaacctgaacttccagatcctgtacgagatcctgctgggcaaggccaccctgtacgccgtgctggtgtctgccctggtgctgatggctatggtcaagcggaaggacagccggggacgcgccaagagaagcggatctggcgtgaagcagaccctgaatttcgacctgctgaagctggctggcgacgtggaatccaacccaggccctactagtatggactggatttggcgcatccttttccttgtcggcgctgctaccggcgcgcattccttcgaacaggtgcagctccaggaatctggccctggcctcgtgaagcctagccagaccctgagcctgacctgtaccgtgtctggcggcagcatcagcacaagcggcatgggcgtgggctggatcagacagcaccctggcaagggcctggaatggatcggccacatttggtgggacgacgacaagcggtacaaccccgccctgaagtccagagtgaccatcagcgtggacaccagcaagaaccagttcagcctgaagctgagcagcgtgacagccgccgataccgccgtgtattattgcgcccggatggaactgtggtcctactacttcgactactggggccagggaaccctcgtgaccgtgtctagtacgcgtgaggacctgaagaacgtgttcccacctgaggtggccgtgttcgagcctagcgaggccgagatcagccacacccagaaagccaccctcgtgtgcctggctaccggcttctaccccgaccatgtggaactgtcttggtgggtcaacggcaaagaggtgcacagcggcgtgtgtaccgacccccagccactgaaagaacagcccgccctgaacgacagccggtactgcctgagcagcagactgagagtgtccgccaccttctggcagaacccccggaaccacttcagatgccaggtgcagttctacggcctgagcgagaacgacgagtggacccaggacagagccaagcccgtgacccagatcgtgtctgccgaagcctggggcagagccgattgcggctttaccagcgagagctaccagcagggcgtgctgagcgccaccaacctgagcgtgatcggcttcagaatcctgctgctgaaagtggccggctttaacctgctgatgaccctgcggctgtggtccagc

SEQ ID NO: 5465 - DNA, 2274 bp, synthetic construct
  source 1..2274: mol_type = other DNA
atggccttaccagtgaccgccttgctcctgccgctggccttgctgctccacgccgccaggccggaagtgcagctggttgaatctggcggaggactggttcagcctggcggatctctgagactgtcttgtgccgccagcggcttcagcttcagcgacttttggatgagctgggtccgacaggcccctggcaaaggacttgaatgggtcgccacaatcagccaggccggcagcgagaaggactacgtggactctgtgaagggcagattcaccatcagccgggacaacgccaagaagtccctgtacctccagatgaacagcctgagagccgaggacaccgccgtgtactattgtgcctctggcgtgtacagcttcgactacagaggccagggcaccctggtcacagtctcttctggtaccggcggaggcggatctggcggcggaggtagcggtggcggaggatctgaattcgactacatccacgtgacacagagccctagcagcctgtccgtgtccatcggcgatagagtgaccatcaactgccagacctctcaaggcgtgggcagcgacctgcactggtatcagcacaaacctggcagagcccctaagctgctgatccaccatgccagctctgtggaagatggcgtgcccagcagattttccggcaccggatttcacaccagcttcaacctgacaatcaacgacctccaggccgacgacatcggcacctactactgtcaagtgctccagagcttcggcagaggcagcagactggatacaaaactcgagatccagaaccctgatcctgccgtgtaccagctgcgggatagcaagagcagcgacaagagcgtgtgtctgttcaccgacttcgacagccagaccaacgtgtcccagagcaaggactccgacgtgtacatcaccgataagtgcgtgctggacatgcggagcatggacttcaagagcaactccgccgtggcctggtccaacaagtccgatttcgcctgcgccaacgccttcaacaacagcattatccccgaggacacattcttcccaagccccgagagcagctgcgacgtgaagctggtggaaaagagcttcgagacagacaccaacctgaacttccagatcctgtacgagatcctgctgggcaaggccaccctgtacgccgtgctggtgtctgccctggtgctgatggctatggtcaagcggaaggacagccggggacgcgccaagagaagcggatctggcgtgaagcagaccctgaatttcgacctgctgaagctggctggcgacgtggaatccaacccaggccctactagtatggactggatttggcgcatccttttccttgtcggcgctgctaccggcgcgcattccttcgaaagggcacacctggtgcagtctggcaccgccatgaagaaacctggcgcttccgtcagagtgtcctgtcagacaagcggctacaccttcacagcccacatcctgttctggttcagacaggccccaggcagaggactggaatgggtcggatggatcaagccccagtacggggccgtgaatttcggcggaggcttcagagacagagtgaccctgaccagggacgtgtaccgggaaatcgcctacatggacatccggggcctgaagcctgatgacaccgccgtgtactactgcgccagggatagaagctacggcgacagctcttgggctctcgatgcttggggacagggcacaacagtggtggtgtctgctacgcgtgaggacctgaagaacgtgttcccacctgaggtggccgtgttcgagcctagcgaggccgagatcagccacacccagaaagccaccctcgtgtgcctggctaccggcttctaccccgaccatgtggaactgtcttggtgggtcaacggcaaagaggtgcacagcggcgtgtgtaccgacccccagccactgaaagaacagcccgccctgaacgacagccggtactgcctgagcagcagactgagagtgtccgccaccttctggcagaacccccggaaccacttcagatgccaggtgcagttctacggcctgagcgagaacgacgagtggacccaggacagagccaagcccgtgacccagatcgtgtctgccgaagcctggggcagagccgattgcggctttaccagcgagagctaccagcagggcgtgctgagcgccaccaacctgagcgtgatcggcttcagaatcctgctgctgaaagtggccggctttaacctgctgatgaccctgcggctgtggtccagc

SEQ ID NO: 5466 - DNA, 2304 bp, synthetic construct
  source 1..2304: mol_type = other DNA
atggccttaccagtgaccgccttgctcctgccgctggccttgctgctccacgccgccaggccggaagtgcagctggttgaatctggcggaggactggttcagcctggcggatctctgagactgtcttgtgccgccagcggcttcagcttcagcgacttttggatgagctgggtccgacaggcccctggcaaaggacttgaatgggtcgccacaatcagccaggccggcagcgagaaggactacgtggactctgtgaagggcagattcaccatcagccgggacaacgccaagaagtccctgtacctccagatgaacagcctgagagccgaggacaccgccgtgtactattgtgcctctggcgtgtacagcttcgactacagaggccagggcaccctggtcacagtctcttctggtaccggcggaggcggatctggcggcggaggtagcggtggcggaggatctgaattcgacgtgcagatgatccagacccccgatagcctggccgtgtccctgggacagagagccaccatctcttgcagagccagcgagagcgtggacaactacggcatcagcttcatgcactggtatcagcagaagcccggccagagccccaagctgctgatctacagagcctccaacctggaaagcggcatccccgccagattttccggcagcggcagcagaaccgacttcaccctgaccatcaaccccgtggaaaccgacgacgtggcaacctactactgccagcagaacaacaaggacccccccacctttggcggaggcaccaagctggaaatcaagctcgagatccagaaccctgatcctgccgtgtaccagctgcgggatagcaagagcagcgacaagagcgtgtgtctgttcaccgacttcgacagccagaccaacgtgtcccagagcaaggactccgacgtgtacatcaccgataagtgcgtgctggacatgcggagcatggacttcaagagcaactccgccgtggcctggtccaacaagtccgatttcgcctgcgccaacgccttcaacaacagcattatccccgaggacacattcttcccaagccccgagagcagctgcgacgtgaagctggtggaaaagagcttcgagacagacaccaacctgaacttccagatcctgtacgagatcctgctgggcaaggccaccctgtacgccgtgctggtgtctgccctggtgctgatggctatggtcaagcggaaggacagccggggacgcgccaagagaagcggatctggcgtgaagcagaccctgaatttcgacctgctgaagctggctggcgacgtggaatccaacccaggccctactagtatggactggatttggcgcatccttttccttgtcggcgctgctaccggcgcgcattccttcgaagggggaggcggctctcaggtgcaactccagcagtctggcgctgagcttgtgaagcctggggccagcgtgaagattagctgcaaggccagcggctacgccttcagcagctactggatgaactgggtcaagcagcggcctggcaagggcctggaatggatcggccaaatctaccccggcgacggcgacaccacctacaacggcaagttcaagggcaaggccaccctgacagccgacaagagcagcagcaccgtgtacatgcaactgaacagcctgaccagcgaggacagcgccgtgtacttctgcgtgcggtactactacggcagctccggctacttcgactattggggccagggcaccacactgaccgtgtcctctacgcgtgaggacctgaagaacgtgttcccacctgaggtggccgtgttcgagcctagcgaggccgagatcagccacacccagaaagccaccctcgtgtgcctggctaccggcttctaccccgaccatgtggaactgtcttggtgggtcaacggcaaagaggtgcacagcggcgtgtgtaccgacccccagccactgaaagaacagcccgccctgaacgacagccggtactgcctgagcagcagactgagagtgtccgccaccttctggcagaacccccggaaccacttcagatgccaggtgcagttctacggcctgagcgagaacgacgagtggacccaggacagagccaagcccgtgacccagatcgtgtctgccgaagcctggggcagagccgattgcggctttaccagcgagagctaccagcagggcgtgctgagcgccaccaacctgagcgtgatcggcttcagaatcctgctgctgaaagtggccggctttaacctgctgatgaccctgcggctgtggtccagc

SEQ ID NO: 5467 - DNA, 2277 bp, synthetic construct
  source 1..2277: mol_type = other DNA
atggccttaccagtgaccgccttgctcctgccgctggccttgctgctccacgccgccaggccggaagtgcagctggttgaatctggcggaggactggttcagcctggcggatctctgagactgtcttgtgccgccagcggcttcagcttcagcgacttttggatgagctgggtccgacaggcccctggcaaaggacttgaatgggtcgccacaatcagccaggccggcagcgagaaggactacgtggactctgtgaagggcagattcaccatcagccgggacaacgccaagaagtccctgtacctccagatgaacagcctgagagccgaggacaccgccgtgtactattgtgcctctggcgtgtacagcttcgactacagaggccagggcaccctggtcacagtctcttctggtaccggcggaggcggatctggcggcggaggtagcggtggcggaggatctgaattcgacgtgcagatgatccagacccccagcagcctgtctgccagcctgggcgatagagtgaccatcagctgtcgggccagccaggacatcggcaactacctgaactggtatcagcagaaacccgacggcaccgtgaagctgctgatctactacaccagcagactgcacagcggcgtgcccagcagattttctggcagcggctctggcaccgagtacagcctgaccatctccaacctggaacaggaagatattgctacctacttctgtcagcaaggcagcgccctgccccctacatttggcggcggaacaaagctggaaatcaacctcgagatccagaaccctgatcctgccgtgtaccagctgcgggatagcaagagcagcgacaagagcgtgtgtctgttcaccgacttcgacagccagaccaacgtgtcccagagcaaggactccgacgtgtacatcaccgataagtgcgtgctggacatgcggagcatggacttcaagagcaactccgccgtggcctggtccaacaagtccgatttcgcctgcgccaacgccttcaacaacagcattatccccgaggacacattcttcccaagccccgagagcagctgcgacgtgaagctggtggaaaagagcttcgagacagacaccaacctgaacttccagatcctgtacgagatcctgctgggcaaggccaccctgtacgccgtgctggtgtctgccctggtgctgatggctatggtcaagcggaaggacagccggggacgcgccaagagaagcggatctggcgtgaagcagaccctgaatttcgacctgctgaagctggctggcgacgtggaatccaacccaggccctactagtatggactggatttggcgcatccttttccttgtcggcgctgctaccggcgcgcattccttcgaagctctccagctccagcagtctggcgcagaactcgtgcggcctggcgcttctgtgaccctgagctgtaaagccagcggctacaccttcaccgactacgagatgcactgggtcaagcagacccctgtgcacggcctggaatggatcggagccatcgaccctgagacaggcggcaccgcctacaaccagaagttcgagggcaaggccatcctgaccgccgacaagagcagcagcacagcctacatggaactgcggagcctgacctccgaggacagccccgtgtactactgtgccagacggcggtactacggcagcagctccttcgactattggggccagggcaccaccctgaccgtgtctagtacgcgtgaggacctgaagaacgtgttcccacctgaggtggccgtgttcgagcctagcgaggccgagatcagccacacccagaaagccaccctcgtgtgcctggctaccggcttctaccccgaccatgtggaactgtcttggtgggtcaacggcaaagaggtgcacagcggcgtgtgtaccgacccccagccactgaaagaacagcccgccctgaacgacagccggtactgcctgagcagcagactgagagtgtccgccaccttctggcagaacccccggaaccacttcagatgccaggtgcagttctacggcctgagcgagaacgacgagtggacccaggacagagccaagcccgtgacccagatcgtgtctgccgaagcctggggcagagccgattgcggctttaccagcgagagctaccagcagggcgtgctgagcgccaccaacctgagcgtgatcggcttcagaatcctgctgctgaaagtggccggctttaacctgctgatgaccctgcggctgtggtccagc

SEQ ID NO: 5468 - DNA, 2289 bp, synthetic construct
  source 1..2289: mol_type = other DNA
atggccttaccagtgaccgccttgctcctgccgctggccttgctgctccacgccgccaggccggaagtgcagctggttgaatctggcggaggactggttcagcctggcggatctctgagactgtcttgtgccgccagcggcttcagcttcagcgacttttggatgagctgggtccgacaggcccctggcaaaggacttgaatgggtcgccacaatcagccaggccggcagcgagaaggactacgtggactctgtgaagggcagattcaccatcagccgggacaacgccaagaagtccctgtacctccagatgaacagcctgagagccgaggacaccgccgtgtactattgtgcctctggcgtgtacagcttcgactacagaggccagggcaccctggtcacagtctcttctggtaccggcggaggcggatctggcggcggaggtagcggtggcggaggatctgaattcgacatcgtcctgacccagtccccagccagcctggcggtgtccctgggtcaacgagctaccatttcctgcagagcctctaagtccgtatccacttccggctatagttacctgcattggtaccaacagaaaccagggcagccacccaagctgctcatctatctggcctcaaacctggagtccggcgtgcccgccagattctccggaagtgggagcggcaccgactttacattgaacatccacccagtcgaagaggaagatgctgccacttattactgtcagcactccagggagctgccatttacatttggctctggcacaaaactggagatcaaactcgagatccagaaccctgatcctgccgtgtaccagctgcgggatagcaagagcagcgacaagagcgtgtgtctgttcaccgacttcgacagccagaccaacgtgtcccagagcaaggactccgacgtgtacatcaccgataagtgcgtgctggacatgcggagcatggacttcaagagcaactccgccgtggcctggtccaacaagtccgatttcgcctgcgccaacgccttcaacaacagcattatccccgaggacacattcttcccaagccccgagagcagctgcgacgtgaagctggtggaaaagagcttcgagacagacaccaacctgaacttccagatcctgtacgagatcctgctgggcaaggccaccctgtacgccgtgctggtgtctgccctggtgctgatggctatggtcaagcggaaggacagccggggacgcgccaagagaagcggatctggcgtgaagcagaccctgaatttcgacctgctgaagctggctggcgacgtggaatccaacccaggccctactagtatggactggatttggcgcatccttttccttgtcggcgctgctaccggcgcgcattccttcgaacaggttcagctggtcgagtccgggggaggtctggtacagccgggtggcagcctcaagctgtcatgtgccgcatctggttttgactttagcaggtattggatgagctgggtccgccaggccccgggcaagggacttgagtggattggagaaataaaccctacttccagcacaatcaacttcacaccttctttgaaagataaggtttttatctctcgggataacgctaaaaacacactgtacttgcagatgtctaaggtgcgaagcgaagacaccgccctctattattgcgcccggggtaattactaccgctatggggatgcgatggactattgggggcaaggtacctccgtcacggtctcaacgcgtgaggacctgaagaacgtgttcccacctgaggtggccgtgttcgagcctagcgaggccgagatcagccacacccagaaagccaccctcgtgtgcctggctaccggcttctaccccgaccatgtggaactgtcttggtgggtcaacggcaaagaggtgcacagcggcgtgtgtaccgacccccagccactgaaagaacagcccgccctgaacgacagccggtactgcctgagcagcagactgagagtgtccgccaccttctggcagaacccccggaaccacttcagatgccaggtgcagttctacggcctgagcgagaacgacgagtggacccaggacagagccaagcccgtgacccagatcgtgtctgccgaagcctggggcagagccgattgcggctttaccagcgagagctaccagcagggcgtgctgagcgccaccaacctgagcgtgatcggcttcagaatcctgctgctgaaagtggccggctttaacctgctgatgaccctgcggctgtggtccagc

SEQ ID NO: 5469 - DNA, 2283 bp, synthetic construct
  source 1..2283: mol_type = other DNA
atggccttaccagtgaccgccttgctcctgccgctggccttgctgctccacgccgccaggccggaagtgcagctggttgaatctggcggaggactggttcagcctggcggatctctgagactgtcttgtgccgccagcggcttcagcttcagcgacttttggatgagctgggtccgacaggcccctggcaaaggacttgaatgggtcgccacaatcagccaggccggcagcgagaaggactacgtggactctgtgaagggcagattcaccatcagccgggacaacgccaagaagtccctgtacctccagatgaacagcctgagagccgaggacaccgccgtgtactattgtgcctctggcgtgtacagcttcgactacagaggccagggcaccctggtcacagtctcttctggtaccggcggaggcggatctggcggcggaggtagcggtggcggaggatctgaattcgacatccagatgacccagagccctagctcactgagcgccagcgtgggcgacagggtgaccattacctgctccgccagccaggacatcagcaactacctgaactggtaccagcagaagcccggcaaggcccccaagctgctgatctactacacctccaacctgcactccggcgtgcccagcaggttcagcggaagcggcagcggcaccgatttcaccctgaccatctccagcctgcagcccgaggacttcgccacctactactgccagcagtacaggaagctcccctggactttcggccagggcaccaaactggagatcaagcgtctcgagatccagaaccctgatcctgccgtgtaccagctgcgggatagcaagagcagcgacaagagcgtgtgtctgttcaccgacttcgacagccagaccaacgtgtcccagagcaaggactccgacgtgtacatcaccgataagtgcgtgctggacatgcggagcatggacttcaagagcaactccgccgtggcctggtccaacaagtccgatttcgcctgcgccaacgccttcaacaacagcattatccccgaggacacattcttcccaagccccgagagcagctgcgacgtgaagctggtggaaaagagcttcgagacagacaccaacctgaacttccagatcctgtacgagatcctgctgggcaaggccaccctgtacgccgtgctggtgtctgccctggtgctgatggctatggtcaagcggaaggacagccggggacgcgccaagagaagcggatctggcgtgaagcagaccctgaatttcgacctgctgaagctggctggcgacgtggaatccaacccaggccctactagtatggactggatttggcgcatccttttccttgtcggcgctgctaccggcgcgcattccttcgaacaggtgcagctggtccagagcggcgccgaagtgaagaagcccggcagctccgtgaaagtgagctgcaaggccagcggcggcaccttcagcaactactggatgcactgggtgaggcaggcccccggacagggcctggagtggatgggcgccacctacaggggccacagcgacacctactacaaccagaagttcaagggccgggtgaccatcaccgccgacaagagcaccagcaccgcctacatggaactgagcagcctcaggagcgaggacaccgctgtgtattactgcgccaggggcgccatctacgacggctacgacgtgctggacaactggggccagggcacactggtgaccgtgtccagcacgcgtgaggacctgaagaacgtgttcccacctgaggtggccgtgttcgagcctagcgaggccgagatcagccacacccagaaagccaccctcgtgtgcctggctaccggcttctaccccgaccatgtggaactgtcttggtgggtcaacggcaaagaggtgcacagcggcgtgtgtaccgacccccagccactgaaagaacagcccgccctgaacgacagccggtactgcctgagcagcagactgagagtgtccgccaccttctggcagaacccccggaaccacttcagatgccaggtgcagttctacggcctgagcgagaacgacgagtggacccaggacagagccaagcccgtgacccagatcgtgtctgccgaagcctggggcagagccgattgcggctttaccagcgagagctaccagcagggcgtgctgagcgccaccaacctgagcgtgatcggcttcagaatcctgctgctgaaagtggccggctttaacctgctgatgaccctgcggctgtggtccagc

SEQ ID NO: 5470 - DNA, 2283 bp, synthetic construct
  source 1..2283: mol_type = other DNA
atggccttaccagtgaccgccttgctcctgccgctggccttgctgctccacgccgccaggccggaagtgcagctggttgaatctggcggaggactggttcagcctggcggatctctgagactgtcttgtgccgccagcggcttcagcttcagcgacttttggatgagctgggtccgacaggcccctggcaaaggacttgaatgggtcgccacaatcagccaggccggcagcgagaaggactacgtggactctgtgaagggcagattcaccatcagccgggacaacgccaagaagtccctgtacctccagatgaacagcctgagagccgaggacaccgccgtgtactattgtgcctctggcgtgtacagcttcgactacagaggccagggcaccctggtcacagtctcttctggtaccggcggaggcggatctggcggcggaggtagcggtggcggaggatctgaattcgacatcgtgctgacacagagccctgccaccctgtctctgagccctggcgatagagccaccatcagctgtagagccagcgagagcgtgaccatcctgggcagccacctgatctactggtatcagcagaagcccggccagccccccagactgctgattcagctggcctccaatgtgcagaccggcgtgccagccagattttccggcagcggcagcagaaccgacttcaccctgaccatcagcagcgtggaacccgaggacttcgccgtgtactactgcctccagagccggaccatccccagaacattcggccagggcaccaagctggaaatcaagagactcgagatccagaaccctgatcctgccgtgtaccagctgcgggatagcaagagcagcgacaagagcgtgtgtctgttcaccgacttcgacagccagaccaacgtgtcccagagcaaggactccgacgtgtacatcaccgataagtgcgtgctggacatgcggagcatggacttcaagagcaactccgccgtggcctggtccaacaagtccgatttcgcctgcgccaacgccttcaacaacagcattatccccgaggacacattcttcccaagccccgagagcagctgcgacgtgaagctggtggaaaagagcttcgagacagacaccaacctgaacttccagatcctgtacgagatcctgctgggcaaggccaccctgtacgccgtgctggtgtctgccctggtgctgatggctatggtcaagcggaaggacagccggggacgcgccaagagaagcggatctggcgtgaagcagaccctgaatttcgacctgctgaagctggctggcgacgtggaatccaacccaggccctactagtatggactggatttggcgcatccttttccttgtcggcgctgctaccggcgcgcattccttcgaacaggtgcagctggtgcagtctggccccgaagtgaagaaacccggcgagtccgtgaagatcagctgcaaggccagcggctacaccttccggcactacagcatgaactgggtcaagcaggccccaggccagggcctgaagtggatgggcagaatcaacaccgagagcggcgtgcccatctacgccgacgacttcaagggccggttcagcttcaccgtggacaccagcgccagcaccgcctacctggaaatctccagcctgaccagcgaggataccgccgtgtatttctgctccaacgactacctgtacagcctggatttctggggccagggaaccaccctgacagtgtcctctacgcgtgaggacctgaagaacgtgttcccacctgaggtggccgtgttcgagcctagcgaggccgagatcagccacacccagaaagccaccctcgtgtgcctggctaccggcttctaccccgaccatgtggaactgtcttggtgggtcaacggcaaagaggtgcacagcggcgtgtgtaccgacccccagccactgaaagaacagcccgccctgaacgacagccggtactgcctgagcagcagactgagagtgtccgccaccttctggcagaacccccggaaccacttcagatgccaggtgcagttctacggcctgagcgagaacgacgagtggacccaggacagagccaagcccgtgacccagatcgtgtctgccgaagcctggggcagagccgattgcggctttaccagcgagagctaccagcagggcgtgctgagcgccaccaacctgagcgtgatcggcttcagaatcctgctgctgaaagtggccggctttaacctgctgatgaccctgcggctgtggtccagc

SEQ ID NO: 5471 - DNA, 2286 bp, synthetic construct
  source 1..2286: mol_type = other DNA
atggccttaccagtgaccgccttgctcctgccgctggccttgctgctccacgccgccaggccggaagtgcagctggttgaatctggcggaggactggttcagcctggcggatctctgagactgtcttgtgccgccagcggcttcagcttcagcgacttttggatgagctgggtccgacaggcccctggcaaaggacttgaatgggtcgccacaatcagccaggccggcagcgagaaggactacgtggactctgtgaagggcagattcaccatcagccgggacaacgccaagaagtccctgtacctccagatgaacagcctgagagccgaggacaccgccgtgtactattgtgcctctggcgtgtacagcttcgactacagaggccagggcaccctggtcacagtctcttctggtaccggcggaggcggatctggcggcggaggtagcggtggcggaggatctgaattccagtctgtgctgacacagcctcctagtgtgtctggcgctcctggacagagagtgaccatcagctgtacaggcagcagcagcaatatcggagccggctttgacgtgcactggtatcagcagctgcctggcacagcccctaaactgctgatctacggcaacagcaacagacccagcggcgtgcccgatagattttccggctctaagagcggcacaagcgccagcctggctattactggactccaggccgaggacgaggccgactactactgtcagagctacgacagcagcctgagcggctacgttttcggcaccggcaccaaagtgacagtgcttggtctcgagatccagaaccctgatcctgccgtgtaccagctgcgggatagcaagagcagcgacaagagcgtgtgtctgttcaccgacttcgacagccagaccaacgtgtcccagagcaaggactccgacgtgtacatcaccgataagtgcgtgctggacatgcggagcatggacttcaagagcaactccgccgtggcctggtccaacaagtccgatttcgcctgcgccaacgccttcaacaacagcattatccccgaggacacattcttcccaagccccgagagcagctgcgacgtgaagctggtggaaaagagcttcgagacagacaccaacctgaacttccagatcctgtacgagatcctgctgggcaaggccaccctgtacgccgtgctggtgtctgccctggtgctgatggctatggtcaagcggaaggacagccggggacgcgccaagagaagcggatctggcgtgaagcagaccctgaatttcgacctgctgaagctggctggcgacgtggaatccaacccaggccctactagtatggactggatttggcgcatccttttccttgtcggcgctgctaccggcgcgcattccttcgaacaagttcagctggttcagagcggagccgaagtgaagaaacctggggcctctgtgaaggtgtcctgcaaggcttccggctacacctttaccgattactacatgcactgggtccgacaggctcccggccaaagacttgaatggatgggctggatcaaccccaacagcggcggcacaaattacgcccagaagttccaggaccggatcaccgtgaccagagacaccagctccaacaccggctacatggaactgacccggctgagatccgatgacaccgccgtgtactactgcgctagaagcccttactccggcgtgctggataagtggggacagggcacactggtcaccgtgtcatctacgcgtgaggacctgaagaacgtgttcccacctgaggtggccgtgttcgagcctagcgaggccgagatcagccacacccagaaagccaccctcgtgtgcctggctaccggcttctaccccgaccatgtggaactgtcttggtgggtcaacggcaaagaggtgcacagcggcgtgtgtaccgacccccagccactgaaagaacagcccgccctgaacgacagccggtactgcctgagcagcagactgagagtgtccgccaccttctggcagaacccccggaaccacttcagatgccaggtgcagttctacggcctgagcgagaacgacgagtggacccaggacagagccaagcccgtgacccagatcgtgtctgccgaagcctggggcagagccgattgcggctttaccagcgagagctaccagcagggcgtgctgagcgccaccaacctgagcgtgatcggcttcagaatcctgctgctgaaagtggccggctttaacctgctgatgaccctgcggctgtggtccagc

SEQ ID NO: 5472 - DNA, 2277 bp, synthetic construct
  source 1..2277: mol_type = other DNA
atggccttaccagtgaccgccttgctcctgccgctggccttgctgctccacgccgccaggccggaagtgcagctggttgaatctggcggaggactggttcagcctggcggatctctgagactgtcttgtgccgccagcggcttcagcttcagcgacttttggatgagctgggtccgacaggcccctggcaaaggacttgaatgggtcgccacaatcagccaggccggcagcgagaaggactacgtggactctgtgaagggcagattcaccatcagccgggacaacgccaagaagtccctgtacctccagatgaacagcctgagagccgaggacaccgccgtgtactattgtgcctctggcgtgtacagcttcgactacagaggccagggcaccctggtcacagtctcttctggtaccggcggaggcggatctggcggcggaggtagcggtggcggaggatctgaattccaggctgttctgacacagcctccatctgcctctggcacacctggacagagagtgaccatctcctgtagcggcagcagcagcaacatcggcagctacaccgtgtcctggtatcagcagctccctggaacagcccctaagttcctgatctacagcaacaaccagcggcctagcggcgtgcccgatagattttctggcagcaagagcggcacaagcgccagcctggctatttctggactccagtctgaggacgaggccgactactattgtgccgcctgggacgatagcctgaacggctatgtgtttggcaccggcaccaaagtgacagtgcttggtctcgagatccagaaccctgatcctgccgtgtaccagctgcgggatagcaagagcagcgacaagagcgtgtgtctgttcaccgacttcgacagccagaccaacgtgtcccagagcaaggactccgacgtgtacatcaccgataagtgcgtgctggacatgcggagcatggacttcaagagcaactccgccgtggcctggtccaacaagtccgatttcgcctgcgccaacgccttcaacaacagcattatccccgaggacacattcttcccaagccccgagagcagctgcgacgtgaagctggtggaaaagagcttcgagacagacaccaacctgaacttccagatcctgtacgagatcctgctgggcaaggccaccctgtacgccgtgctggtgtctgccctggtgctgatggctatggtcaagcggaaggacagccggggacgcgccaagagaagcggatctggcgtgaagcagaccctgaatttcgacctgctgaagctggctggcgacgtggaatccaacccaggccctactagtatggactggatttggcgcatccttttccttgtcggcgctgctaccggcgcgcattccttcgaagttcaactggttcagagcggagccgaagtgaagaagcctggcgagagcctgaagattagctgcaaaggcagcggctacgacttcaccacctactggatcggctgggtccgacagatgcctggcaaaggactggaatggatgggcatcatctaccccggcgacagcgacaccagatacagccctagcgttagaggccgcgtgaccatcagcgccgacaagtctatcaacaccgcctacctccagtggtccagcctggaagcctctgacaccgccatgtactactgcgccagaatgtggaccttcagccaggatggatggggccagggaacactggtcacagtgtcatctacgcgtgaggacctgaagaacgtgttcccacctgaggtggccgtgttcgagcctagcgaggccgagatcagccacacccagaaagccaccctcgtgtgcctggctaccggcttctaccccgaccatgtggaactgtcttggtgggtcaacggcaaagaggtgcacagcggcgtgtgtaccgacccccagccactgaaagaacagcccgccctgaacgacagccggtactgcctgagcagcagactgagagtgtccgccaccttctggcagaacccccggaaccacttcagatgccaggtgcagttctacggcctgagcgagaacgacgagtggacccaggacagagccaagcccgtgacccagatcgtgtctgccgaagcctggggcagagccgattgcggctttaccagcgagagctaccagcagggcgtgctgagcgccaccaacctgagcgtgatcggcttcagaatcctgctgctgaaagtggccggctttaacctgctgatgaccctgcggctgtggtccagc

SEQ ID NO: 5473 - DNA, 2286 bp, synthetic construct
  source 1..2286: mol_type = other DNA
atggccttaccagtgaccgccttgctcctgccgctggccttgctgctccacgccgccaggccggaagtgcagctggttgaatctggcggaggactggttcagcctggcggatctctgagactgtcttgtgccgccagcggcttcagcttcagcgacttttggatgagctgggtccgacaggcccctggcaaaggacttgaatgggtcgccacaatcagccaggccggcagcgagaaggactacgtggactctgtgaagggcagattcaccatcagccgggacaacgccaagaagtccctgtacctccagatgaacagcctgagagccgaggacaccgccgtgtactattgtgcctctggcgtgtacagcttcgactacagaggccagggcaccctggtcacagtctcttctggtaccggcggaggcggatctggcggcggaggtagcggtggcggaggatctgaattcgacatcgtgatgacccagagccccgatagcctggccgtgtctctgggagagagagccaccatcaactgcaagagcagccagagcatcctgtacagcagcaaccagaagaactacctggcctggtatcagcagaagcccggccagagccctaagctgctgatctactgggccagcaccagagaaagcggcgtgcccgatagattcagcggcagcggctctggcaccgacttcaccctgaccatcagttctcttcaggccgaggacgtggccgtgtactactgccaccagtacatcagctcctacaccttcggccagggcaccaagctggaaatcaagctcgagatccagaaccctgatcctgccgtgtaccagctgcgggatagcaagagcagcgacaagagcgtgtgtctgttcaccgacttcgacagccagaccaacgtgtcccagagcaaggactccgacgtgtacatcaccgataagtgcgtgctggacatgcggagcatggacttcaagagcaactccgccgtggcctggtccaacaagtccgatttcgcctgcgccaacgccttcaacaacagcattatccccgaggacacattcttcccaagccccgagagcagctgcgacgtgaagctggtggaaaagagcttcgagacagacaccaacctgaacttccagatcctgtacgagatcctgctgggcaaggccaccctgtacgccgtgctggtgtctgccctggtgctgatggctatggtcaagcggaaggacagccggggacgcgccaagagaagcggatctggcgtgaagcagaccctgaatttcgacctgctgaagctggctggcgacgtggaatccaacccaggccctactagtatggactggatttggcgcatccttttccttgtcggcgctgctaccggcgcgcattccttcgaacaggtgcagctggtgcagtctggcgctgaagtgaagaaacctggggccagcgtgaaggtgtcctgcaaggccagcggctacacctttgccagccagtggatgcactggatgagacaggcccctggacagggcctggaatggatcggctggatcaaccccggcaacgtgaacaccaagtacaacgagaagttcaagggcagagccaccctgacagtggacaccagcaccaacaccgcctacatggaactgagcagcctgcggagcgaggacaccgccgtgtattattgcgccagaagcacctggtacagacccctggattattggggccagggaacccttgtgaccgtgtcctctacgcgtgaggacctgaagaacgtgttcccacctgaggtggccgtgttcgagcctagcgaggccgagatcagccacacccagaaagccaccctcgtgtgcctggctaccggcttctaccccgaccatgtggaactgtcttggtgggtcaacggcaaagaggtgcacagcggcgtgtgtaccgacccccagccactgaaagaacagcccgccctgaacgacagccggtactgcctgagcagcagactgagagtgtccgccaccttctggcagaacccccggaaccacttcagatgccaggtgcagttctacggcctgagcgagaacgacgagtggacccaggacagagccaagcccgtgacccagatcgtgtctgccgaagcctggggcagagccgattgcggctttaccagcgagagctaccagcagggcgtgctgagcgccaccaacctgagcgtgatcggcttcagaatcctgctgctgaaagtggccggctttaacctgctgatgaccctgcggctgtggtccagc

SEQ ID NO: 5474 - DNA, 2286 bp, synthetic construct
  source 1..2286: mol_type = other DNA
atggccttaccagtgaccgccttgctcctgccgctggccttgctgctccacgccgccaggccggaagtgcagctggttgaatctggcggaggactggttcagcctggcggatctctgagactgtcttgtgccgccagcggcttcagcttcagcgacttttggatgagctgggtccgacaggcccctggcaaaggacttgaatgggtcgccacaatcagccaggccggcagcgagaaggactacgtggactctgtgaagggcagattcaccatcagccgggacaacgccaagaagtccctgtacctccagatgaacagcctgagagccgaggacaccgccgtgtactattgtgcctctggcgtgtacagcttcgactacagaggccagggcaccctggtcacagtctcttctggtaccggcggaggcggatctggcggcggaggtagcggtggcggaggatctgaattcgaccacatcgtgctgacccagagccctagcagcctgtctgccagcctgggcgacagagtgaccatcagctgtagagccagccaggacatcagcacctacctgaactggtatcagcagaaacccgacggcaccgtgaagctgctgatcttctacaccagcagactgcacgccggggtgcccagcagattttctggcagcggctctggcacccaccacagcctgaccatctccaacctggaacaggaagatattgctacctacttctgtcagcaaggcaacagcctgcccttcaccttcggcagcggcaccaagctggaaatcaagagactcgagatccagaaccctgatcctgccgtgtaccagctgcgggatagcaagagcagcgacaagagcgtgtgtctgttcaccgacttcgacagccagaccaacgtgtcccagagcaaggactccgacgtgtacatcaccgataagtgcgtgctggacatgcggagcatggacttcaagagcaactccgccgtggcctggtccaacaagtccgatttcgcctgcgccaacgccttcaacaacagcattatccccgaggacacattcttcccaagccccgagagcagctgcgacgtgaagctggtggaaaagagcttcgagacagacaccaacctgaacttccagatcctgtacgagatcctgctgggcaaggccaccctgtacgccgtgctggtgtctgccctggtgctgatggctatggtcaagcggaaggacagccggggacgcgccaagagaagcggatctggcgtgaagcagaccctgaatttcgacctgctgaagctggctggcgacgtggaatccaacccaggccctactagtatggactggatttggcgcatccttttccttgtcggcgctgctaccggcgcgcattccttcgaacaggtgcagctgaaagagagcggccctgagctggaaaagcctggggccagcgtgaagattagctgcaaggccagcggctacagcttcaccgcctacagcatgaactgggtcaagcagaacaacggcatgagcctggaatggatcggcagcatcgacccctactacggcgacaccaaatacgcccagaagttcaagggcaaggccaccctgaccgtggataaggccagcagcaccgcctacctccagctgaagtctctgaccagcgaggacagcgccgtgtactactgcgccagacggatgattaccaccggcgactggtacttcgacgtgtggggagccggaaccaccgtgacagtgtctagcacgcgtgaggacctgaagaacgtgttcccacctgaggtggccgtgttcgagcctagcgaggccgagatcagccacacccagaaagccaccctcgtgtgcctggctaccggcttctaccccgaccatgtggaactgtcttggtgggtcaacggcaaagaggtgcacagcggcgtgtgtaccgacccccagccactgaaagaacagcccgccctgaacgacagccggtactgcctgagcagcagactgagagtgtccgccaccttctggcagaacccccggaaccacttcagatgccaggtgcagttctacggcctgagcgagaacgacgagtggacccaggacagagccaagcccgtgacccagatcgtgtctgccgaagcctggggcagagccgattgcggctttaccagcgagagctaccagcagggcgtgctgagcgccaccaacctgagcgtgatcggcttcagaatcctgctgctgaaagtggccggctttaacctgctgatgaccctgcggctgtggtccagc

SEQ ID NO: 5475 - DNA, 2286 bp, synthetic construct; identical to SEQ ID NO: 5474
  source 1..2286: mol_type = other DNA

SEQ ID NO: 5476 - DNA, 2286 bp, synthetic construct
  source 1..2286: mol_type = other DNA
atggccttaccagtgaccgccttgctcctgccgctggccttgctgctccacgccgccaggccggaagtgcagctggttgaatctggcggaggactggttcagcctggcggatctctgagactgtcttgtgccgccagcggcttcagcttcagcgacttttggatgagctgggtccgacaggcccctggcaaaggacttgaatgggtcgccacaatcagccaggccggcagcgagaaggactacgtggactctgtgaagggcagattcaccatcagccgggacaacgccaagaagtccctgtacctccagatgaacagcctgagagccgaggacaccgccgtgtactattgtgcctctggcgtgtacagcttcgactacagaggccagggcaccctggtcacagtctcttctggtaccggcggaggcggatctggcggcggaggtagcggtggcggaggatctgaattcgacgagatcgtgctgacacagagccctgccaccctgtctctgagccctggcgaaagagccaccctgagctgtagagccagccagagcgtgtccagctacctggcctggtatcagcagaagcccggccaggctccccggctgctgatctacgatgccagcaatagagccaccggcatccccgccagattttccggctctggcagcggcaccgacttcaccctgaccatcagctccctggaacccgaggacttcgccgtgtactactgccagcagcggagcaactggcccatcacattcggccagggcacccggctggaaatcaaactcgagatccagaaccctgatcctgccgtgtaccagctgcgggatagcaagagcagcgacaagagcgtgtgtctgttcaccgacttcgacagccagaccaacgtgtcccagagcaaggactccgacgtgtacatcaccgataagtgcgtgctggacatgcggagcatggacttcaagagcaactccgccgtggcctggtccaacaagtccgatttcgcctgcgccaacgccttcaacaacagcattatccccgaggacacattcttcccaagccccgagagcagctgcgacgtgaagctggtggaaaagagcttcgagacagacaccaacctgaacttccagatcctgtacgagatcctgctgggcaaggccaccctgtacgccgtgctggtgtctgccctggtgctgatggctatggtcaagcggaaggacagccggggacgcgccaagagaagcggatctggcgtgaagcagaccctgaatttcgacctgctgaagctggctggcgacgtggaatccaacccaggccctactagtatggactggatttggcgcatccttttccttgtcggcgctgctaccggcgcgcattccttcgaagaagtgcagctggtggaatcaggcggcggactggtgcagcctggcagaagcctgagactgagctgtgccgccagcggcttcaccttcaacgactacgccatgcactgggtgcgccaggcccctggaaaaggactggaatgggtgtccacaatcagctggaacagcggcagcatcggctacgccgatagcgtgaagggccggttcaccatcagccgggacaacgccaagaagtccctgtacctccagatgaacagcctgcgggccgaggacacagccctgtactattgcgccaaggacatccagtacggcaactactactacggcatggacgtgtggggccagggaaccaccgtgaccgtgtcatctacgcgtgaggacctgaagaacgtgttcccacctgaggtggccgtgttcgagcctagcgaggccgagatcagccacacccagaaagccaccctcgtgtgcctggctaccggcttctaccccgaccatgtggaactgtcttggtgggtcaacggcaaagaggtgcacagcggcgtgtgtaccgacccccagccactgaaagaacagcccgccctgaacgacagccggtactgcctgagcagcagactgagagtgtccgccaccttctggcagaacccccggaaccacttcagatgccaggtgcagttctacggcctgagcgagaacgacgagtggacccaggacagagccaagcccgtgacccagatcgtgtctgccgaagcctggggcagagccgattgcggctttaccagcgagagctaccagcagggcgtgctgagcgccaccaacctgagcgtgatcggcttcagaatcctgctgctgaaagtggccggctttaacctgctgatgaccctgcggctgtggtccagc

SEQ ID NO: 5477 - DNA, 2292 bp, synthetic construct
  source 1..2292: mol_type = other DNA
atggccttaccagtgaccgccttgctcctgccgctggccttgctgctccacgccgccaggccggaagtgcagctggttgaatctggcggaggactggttcagcctggcggatctctgagactgtcttgtgccgccagcggcttcagcttcagcgacttttggatgagctgggtccgacaggcccctggcaaaggacttgaatgggtcgccacaatcagccaggccggcagcgagaaggactacgtggactctgtgaagggcagattcaccatcagccgggacaacgccaagaagtccctgtacctccagatgaacagcctgagagccgaggacaccgccgtgtactattgtgcctctggcgtgtacagcttcgactacagaggccagggcaccctggtcacagtctcttctggtaccggcggaggcggatctggcggcggaggtagcggtggcggaggatctgaattcgacatcgtgatgacccagacccccctgagcctgcctgtgacacctggcgagcctgccagcatctcctgcagaagcagcaagagcctgctgcacagcaacggcatcacctacctgtactggtatctgcagaaacccggccagagcccccaactgctgatctaccagatgagcaacctggtgtccggcgtgcccgacagattttctggcagcggctccggcaccgacttcaccctgaagatcagccgggtggaagccgaggacgtgggcgtgtactactgcgcccagaacctggaactgccctacacctttggcggcggaacaaaggtggaaatcaagcggctcgagatccagaaccctgatcctgccgtgtaccagctgcgggatagcaagagcagcgacaagagcgtgtgtctgttcaccgacttcgacagccagaccaacgtgtcccagagcaaggactccgacgtgtacatcaccgataagtgcgtgctggacatgcggagcatggacttcaagagcaactccgccgtggcctggtccaacaagtccgatttcgcctgcgccaacgccttcaacaacagcattatccccgaggacacattcttcccaagccccgagagcagctgcgacgtgaagctggtggaaaagagcttcgagacagacaccaacctgaacttccagatcctgtacgagatcctgctgggcaaggccaccctgtacgccgtgctggtgtctgccctggtgctgatggctatggtcaagcggaaggacagccggggacgcgccaagagaagcggatctggcgtgaagcagaccctgaatttcgacctgctgaagctggctggcgacgtggaatccaacccaggccctactagtatggactggatttggcgcatccttttccttgtcggcgctgctaccggcgcgcattccttcgaacaggtgcaactggtgcagagcggagccgaagtgaaaaagcccggcagcagcgtgaaggtgtcctgcaaggccagcggctacgccttcagctactcctggatcaactgggtgcgccaggcccctggacagggcctggaatggatgggcagaatcttccccggcgacggcgacaccgactacaacggcaagttcaagggcagagtgaccatcaccgccgacaagagcaccagcaccgcctacatggaactgagcagcctgcggagcgaggataccgccgtgtactattgtgccagaaacgtgttcgacggctactggctggtgtactggggccagggaacacttgtgaccgtgtccagcacgcgtgaggacctgaagaacgtgttcccacctgaggtggccgtgttcgagcctagcgaggccgagatcagccacacccagaaagccaccctcgtgtgcctggctaccggcttctaccccgaccatgtggaactgtcttggtgggtcaacggcaaagaggtgcacagcggcgtgtgtaccgacccccagccactgaaagaacagcccgccctgaacgacagccggtactgcctgagcagcagactgagagtgtccgccaccttctggcagaacccccggaaccacttcagatgccaggtgcagttctacggcctgagcgagaacgacgagtggacccaggacagagccaagcccgtgacccagatcgtgtctgccgaagcctggggcagagccgattgcggctttaccagcgagagctaccagcagggcgtgctgagcgccaccaacctgagcgtgatcggcttcagaatcctgctgctgaaagtggccggctttaacctgctgatgaccctgcggctgtggtccagc

SEQ ID NO: 5478 - DNA, 2295 bp, synthetic construct
  source 1..2295: mol_type = other DNA
atggccttaccagtgaccgccttgctcctgccgctggccttgctgctccacgccgccaggccggaagtgcagctggttgaatctggcggaggactggttcagcctggcggatctctgagactgtcttgtgccgccagcggcttcagcttcagcgacttttggatgagctgggtccgacaggcccctggcaaaggacttgaatgggtcgccacaatcagccaggccggcagcgagaaggactacgtggactctgtgaagggcagattcaccatcagccgggacaacgccaagaagtccctgtacctccagatgaacagcctgagagccgaggacaccgccgtgtactattgtgcctctggcgtgtacagcttcgactacagaggccagggcaccctggtcacagtctcttctggtaccggcggaggcggatctggcggcggaggtagcggtggcggaggatctgaattcgacatccagatgacccagagccccagcagcctgtctgccagcgtgggcgacagagtgaccatcacctgtcggagcagccagagcatcgtgcactccgtgggcaacaccttcctggaatggtatcagcagaagcccggcaaggcccccaagctgctgatctacaaggtgtccaacagattcagcggcgtgcccagcaggtttagcggctctggcagcggcaccgacttcaccctgaccatctctagcctccagcccgaggacttcgccacctactactgttttcaaggcagccagttcccctacaccttcggccagggaacaaaggtggaaatcaagcggctcgagatccagaaccctgatcctgccgtgtaccagctgcgggatagcaagagcagcgacaagagcgtgtgtctgttcaccgacttcgacagccagaccaacgtgtcccagagcaaggactccgacgtgtacatcaccgataagtgcgtgctggacatgcggagcatggacttcaagagcaactccgccgtggcctggtccaacaagtccgatttcgcctgcgccaacgccttcaacaacagcattatccccgaggacacattcttcccaagccccgagagcagctgcgacgtgaagctggtggaaaagagcttcgagacagacaccaacctgaacttccagatcctgtacgagatcctgctgggcaaggccaccctgtacgccgtgctggtgtctgccctggtgctgatggctatggtcaagcggaaggacagccggggacgcgccaagagaagcggatctggcgtgaagcagaccctgaatttcgacctgctgaagctggctggcgacgtggaatccaacccaggccctactagtatggactggatttggcgcatccttttccttgtcggcgctgctaccggcgcgcattccttcgaagaagtgcaactggtggaaagcggaggcggcctggtgcagcctggcggatctctgagactgagctgtgccgccagcggctacgagttcagccggtcctggatgaactgggtgcgccaggcccctggcaagggactggaatgggtgggaagaatctaccccggcgacggcgacaccaactacagcggcaagttcaagggccggttcaccatcagcgccgacaccagcaagaacaccgcctacctccagatgaacagcctgcgggccgaggataccgccgtgtactactgtgccagagatggcagctcctgggactggtacttcgacgtgtggggacagggaacccttgtgaccgtgtccagcacgcgtgaggacctgaagaacgtgttcccacctgaggtggccgtgttcgagcctagcgaggccgagatcagccacacccagaaagccaccctcgtgtgcctggctaccggcttctaccccgaccatgtggaactgtcttggtgggtcaacggcaaagaggtgcacagcggcgtgtgtaccgacccccagccactgaaagaacagcccgccctgaacgacagccggtactgcctgagcagcagactgagagtgtccgccaccttctggcagaacccccggaaccacttcagatgccaggtgcagttctacggcctgagcgagaacgacgagtggacccaggacagagccaagcccgtgacccagatcgtgtctgccgaagcctggggcagagccgattgcggctttaccagcgagagctaccagcagggcgtgctgagcgccaccaacctgagcgtgatcggcttcagaatcctgctgctgaaagtggccggctttaacctgctgatgaccctgcggctgtggtccagc

SEQ ID NO: 5479 - DNA, 2289 bp, synthetic construct
  source 1..2289: mol_type = other DNA
atggccttaccagtgaccgccttgctcctgccgctggccttgctgctccacgccgccaggccggaagtgcagctggttgaatctggcggaggactggttcagcctggcggatctctgagactgtcttgtgccgccagcggcttcagcttcagcgacttttggatgagctgggtccgacaggcccctggcaaaggacttgaatgggtcgccacaatcagccaggccggcagcgagaaggactacgtggactctgtgaagggcagattcaccatcagccgggacaacgccaagaagtccctgtacctccagatgaacagcctgagagccgaggacaccgccgtgtactattgtgcctctggcgtgtacagcttcgactacagaggccagggcaccctggtcacagtctcttctggtaccggcggaggcggatctggcggcggaggtagcggtggcggaggatctgaattcgacatccagatgacccagagccccagcagcctgtctgccagcgtgggcgacagagtgaccatcacctgtagagccagccagaccatctggtcctacctgaactggtatcagcagaggcccggcaaggcccccaacctgctgatctatgccgccagctctctccagagcggcgtgcccagcagattttccggcagaggcagcggcaccgacttcaccctgaccatcagttccttgcaggccgaggacttcgccacctactactgccagcagagctacagcatcccccagattttcggccagggcaccaagctggaaatcaagctcgagatccagaaccctgatcctgccgtgtaccagctgcgggatagcaagagcagcgacaagagcgtgtgtctgttcaccgacttcgacagccagaccaacgtgtcccagagcaaggactccgacgtgtacatcaccgataagtgcgtgctggacatgcggagcatggacttcaagagcaactccgccgtggcctggtccaacaagtccgatttcgcctgcgccaacgccttcaacaacagcattatccccgaggacacattcttcccaagccccgagagcagctgcgacgtgaagctggtggaaaagagcttcgagacagacaccaacctgaacttccagatcctgtacgagatcctgctgggcaaggccaccctgtacgccgtgctggtgtctgccctggtgctgatggctatggtcaagcggaaggacagccggggacgcgccaagagaagcggatctggcgtgaagcagaccctgaatttcgacctgctgaagctggctggcgacgtggaatccaacccaggccctactagtatggactggatttggcgcatccttttccttgtcggcgctgctaccggcgcgcattccttcgaacaggtgcagctccagcagtctggacccggcctcgtgaagcctagccagacactgagcctgacctgcgccatcagcggcgatagcgtgtccagcaatagcgccgcctggaactggatcagacagtccccctctcggggcctggaatggctgggccggacctactaccgcagcaagtggtacaacgactacgccgtgtccgtgaagtcccggatcaccatcaaccccgacaccagcaagaaccagttctccttgcaactgaacagcgtgacccccgaggacaccgccgtgtactactgcgccagagaagtgaccggcgacctggaagatgccttcgacatctggggccagggaacaatggtcacagtgtccagcacgcgtgaggacctgaagaacgtgttcccacctgaggtggccgtgttcgagcctagcgaggccgagatcagccacacccagaaagccaccctcgtgtgcctggctaccggcttctaccccgaccatgtggaactgtcttggtgggtcaacggcaaagaggtgcacagcggcgtgtgtaccgacccccagccactgaaagaacagcccgccctgaacgacagccggtactgcctgagcagcagactgagagtgtccgccaccttctggcagaacccccggaaccacttcagatgccaggtgcagttctacggcctgagcgagaacgacgagtggacccaggacagagccaagcccgtgacccagatcgtgtctgccgaagcctggggcagagccgattgcggctttaccagcgagagctaccagcagggcgtgctgagcgccaccaacctgagcgtgatcggcttcagaatcctgctgctgaaagtggccggctttaacctgctgatgaccctgcggctgtggtccagc

SEQ ID NO: 5480 - DNA, 2268 bp, synthetic construct
  source 1..2268: mol_type = other DNA
atggccttaccagtgaccgccttgctcctgccgctggccttgctgctccacgccgccaggccggaagtgcagctggttgaatctggcggaggactggttcagcctggcggatctctgagactgtcttgtgccgccagcggcttcagcttcagcgacttttggatgagctgggtccgacaggcccctggcaaaggacttgaatgggtcgccacaatcagccaggccggcagcgagaaggactacgtggactctgtgaagggcagattcaccatcagccgggacaacgccaagaagtccctgtacctccagatgaacagcctgagagccgaggacaccgccgtgtactattgtgcctctggcgtgtacagcttcgactacagaggccagggcaccctggtcacagtctcttctggtaccggcggaggcggatctggcggcggaggtagcggtggcggaggatctgaattcgacatccagatgacccagagccccgccaccatcgagaacacaagcctgtctgccagcgtgggcgacagagtgaccatcacctgtagagccagccagggcatcagctcttggctgacctggtatcagcagaagcccgagaaggcccccaagagcctgatctacgccgccagctctctgcagtctggcgtgcccagcagattttccggcagcggctctggcaccgacttcaccctgacaatcagcagcctgcagcccgaggacttcgccacctactactgccagcagtacgacagctaccccatcaccttcggccagggcacccggctggaaatcaagctcgagatccagaaccctgatcctgccgtgtaccagctgcgggatagcaagagcagcgacaagagcgtgtgtctgttcaccgacttcgacagccagaccaacgtgtcccagagcaaggactccgacgtgtacatcaccgataagtgcgtgctggacatgcggagcatggacttcaagagcaactccgccgtggcctggtccaacaagtccgatttcgcctgcgccaacgccttcaacaacagcattatccccgaggacacattcttcccaagccccgagagcagctgcgacgtgaagctggtggaaaagagcttcgagacagacaccaacctgaacttccagatcctgtacgagatcctgctgggcaaggccaccctgtacgccgtgctggtgtctgccctggtgctgatggctatggtcaagcggaaggacagccggggacgcgccaagagaagcggatctggcgtgaagcagaccctgaatttcgacctgctgaagctggctggcgacgtggaatccaacccaggccctactagtatggactggatttggcgcatccttttccttgtcggcgctgctaccggcgcgcattccttcgaacaggtgcaactgcagcagtggggagccggactgctgaagcctagcgagacactgagcctgacctgcgccgtgtacggcggcagcttcagcgcctactattggagctggatcagacagccccctggcaagggcctggaatggatcggcgacatcaatcacggcggaggcaccaactacaaccccagcctgaagtcccgcgtgaccatctccgtggacaccagcaagaaccagttctccctgaagctgaacagcgtgacagccgccgacacagccgtgtactactgtgccagcctgaccgcctattggggccagggatctcttgtgaccgtgtccagcacgcgtgaggacctgaagaacgtgttcccacctgaggtggccgtgttcgagcctagcgaggccgagatcagccacacccagaaagccaccctcgtgtgcctggctaccggcttctaccccgaccatgtggaactgtcttggtgggtcaacggcaaagaggtgcacagcggcgtgtgtaccgacccccagccactgaaagaacagcccgccctgaacgacagccggtactgcctgagcagcagactgagagtgtccgccaccttctggcagaacccccggaaccacttcagatgccaggtgcagttctacggcctgagcgagaacgacgagtggacccaggacagagccaagcccgtgacccagatcgtgtctgccgaagcctggggcagagccgattgcggctttaccagcgagagctaccagcagggcgtgctgagcgccaccaacctgagcgtgatcggcttcagaatcctgctgctgaaagtggccggctttaacctgctgatgaccctgcggctgtggtccagc

SEQ ID NO: 5481 - DNA, 2283 bp, synthetic construct
  source 1..2283: mol_type = other DNA
atggccttaccagtgaccgccttgctcctgccgctggccttgctgctccacgccgccaggccggaagtgcagctggttgaatctggcggaggactggttcagcctggcggatctctgagactgtcttgtgccgccagcggcttcagcttcagcgacttttggatgagctgggtccgacaggcccctggcaaaggacttgaatgggtcgccacaatcagccaggccggcagcgagaaggactacgtggactctgtgaagggcagattcaccatcagccgggacaacgccaagaagtccctgtacctccagatgaacagcctgagagccgaggacaccgccgtgtactattgtgcctctggcgtgtacagcttcgactacagaggccagggcaccctggtcacagtctcttctggtaccggcggaggcggatctggcggcggaggtagcggtggcggaggatctgaattcgacgagatcgtgctgacccagagccctgatagcctggccgtgtctctgggcgagagagccaccatcaactgcaaggccagccagagcgtggacttcgacggcgacagctacctgaactggtatcagcagaagcccggccagccccccaaggtgctgatctatgccgccagcacactgcagagcggcgtgcccagcagattttctggcagcggctccggcaccgacttcaccctgaccatcaacagcctggaagccgaggacgccgccacctactactgccagcagagcaacgaggacccctggacctttggcggcggaacaaaggtggaaatcaagctcgagatccagaaccctgatcctgccgtgtaccagctgcgggatagcaagagcagcgacaagagcgtgtgtctgttcaccgacttcgacagccagaccaacgtgtcccagagcaaggactccgacgtgtacatcaccgataagtgcgtgctggacatgcggagcatggacttcaagagcaactccgccgtggcctggtccaacaagtccgatttcgcctgcgccaacgccttcaacaacagcattatccccgaggacacattcttcccaagccccgagagcagctgcgacgtgaagctggtggaaaagagcttcgagacagacaccaacctgaacttccagatcctgtacgagatcctgctgggcaaggccaccctgtacgccgtgctggtgtctgccctggtgctgatggctatggtcaagcggaaggacagccggggacgcgccaagagaagcggatctggcgtgaagcagaccctgaatttcgacctgctgaagctggctggcgacgtggaatccaacccaggccctactagtatggactggatttggcgcatccttttccttgtcggcgctgctaccggcgcgcattccttcgaacaggtgcaactggtgcagtccggcgctgaagtgaagaaacctggggccagcgtgaaggtgtcctgcaaggtgtccggctacacctttaccgactactacattacctgggtgcgccaggcccctggacaggccctggaatggatgggctggatctaccccggcagcggcaacaccaagtacagccagaagttccagggcagattcgtgttcagcgtggacaccagcgccagcaccgcctacctgcaactgtctagcctgaaggccgaagataccgccgtgtactactgcgccaactacggcaactattggttcgcctattggggccagggaacccttgtgaccgtgtcctctacgcgtgaggacctgaagaacgtgttcccacctgaggtggccgtgttcgagcctagcgaggccgagatcagccacacccagaaagccaccctcgtgtgcctggctaccggcttctaccccgaccatgtggaactgtcttggtgggtcaacggcaaagaggtgcacagcggcgtgtgtaccgacccccagccactgaaagaacagcccgccctgaacgacagccggtactgcctgagcagcagactgagagtgtccgccaccttctggcagaacccccggaaccacttcagatgccaggtgcagttctacggcctgagcgagaacgacgagtggacccaggacagagccaagcccgtgacccagatcgtgtctgccgaagcctggggcagagccgattgcggctttaccagcgagagctaccagcagggcgtgctgagcgccaccaacctgagcgtgatcggcttcagaatcctgctgctgaaagtggccggctttaacctgctgatgaccctgcggctgtggtccagc

SEQ ID NO: 5482 - DNA, 2274 bp, synthetic construct
  source 1..2274: mol_type = other DNA
atggccttaccagtgaccgccttgctcctgccgctggccttgctgctccacgccgccaggccggaagtgcagctggttgaatctggcggaggactggttcagcctggcggatctctgagactgtcttgtgccgccagcggcttcagcttcagcgacttttggatgagctgggtccgacaggcccctggcaaaggacttgaatgggtcgccacaatcagccaggccggcagcgagaaggactacgtggactctgtgaagggcagattcaccatcagccgggacaacgccaagaagtccctgtacctccagatgaacagcctgagagccgaggacaccgccgtgtactattgtgcctctggcgtgtacagcttcgactacagaggccagggcaccctggtcacagtctcttctggtaccggcggaggcggatctggcggcggaggtagcggtggcggaggatctgaattcgacatccagatgacccagagccccagcagcctgtctgccagcgtgggcgacagagtgaccatcacctgtagagccagccagggcatcagctcttggctggcctggtatcagcagaagcccgagaaggcccccaagagcctgatctacgccgcctctagtctccagagcggcgtgcccagcagattttctggcagcggctccggcaccgacttcaccctgacaatcagctccctccagcccgaggacttcgccacctactactgccagcagtacaacagctaccctcccacctttggcggaggcaccaaggtggaaatcaagctcgagatccagaaccctgatcctgccgtgtaccagctgcgggatagcaagagcagcgacaagagcgtgtgtctgttcaccgacttcgacagccagaccaacgtgtcccagagcaaggactccgacgtgtacatcaccgataagtgcgtgctggacatgcggagcatggacttcaagagcaactccgccgtggcctggtccaacaagtccgatttcgcctgcgccaacgccttcaacaacagcattatccccgaggacacattcttcccaagccccgagagcagctgcgacgtgaagctggtggaaaagagcttcgagacagacaccaacctgaacttccagatcctgtacgagatcctgctgggcaaggccaccctgtacgccgtgctggtgtctgccctggtgctgatggctatggtcaagcggaaggacagccggggacgcgccaagagaagcggatctggcgtgaagcagaccctgaatttcgacctgctgaagctggctggcgacgtggaatccaacccaggccctactagtatggactggatttggcgcatccttttccttgtcggcgctgctaccggcgcgcattccttcgaagaagtgcaactggtgcagtctggcggagggctggtgcatcctgggggaagcctgagactgagctgtgccggctctggcttcgccttcagcagcagcaccatgcactggatcagacaggcccctggcaagggcctggaatggatcagcctgatcggaagcggagggggcatctactacggcgacagcgtgaagggccggttcaccatcagccgggacaacgccaagaacagcctgtacctccagatgaactccctgcgggccgaggacatggccgtgtactattgtgtgcggggctacttcgactgggtggactacttcgattactggggccagggcaccctcgtgaccgtgtcatctacgcgtgaggacctgaagaacgtgttcccacctgaggtggccgtgttcgagcctagcgaggccgagatcagccacacccagaaagccaccctcgtgtgcctggctaccggcttctaccccgaccatgtggaactgtcttggtgggtcaacggcaaagaggtgcacagcggcgtgtgtaccgacccccagccactgaaagaacagcccgccctgaacgacagccggtactgcctgagcagcagactgagagtgtccgccaccttctggcagaacccccggaaccacttcagatgccaggtgcagttctacggcctgagcgagaacgacgagtggacccaggacagagccaagcccgtgacccagatcgtgtctgccgaagcctggggcagagccgattgcggctttaccagcgagagctaccagcagggcgtgctgagcgccaccaacctgagcgtgatcggcttcagaatcctgctgctgaaagtggccggctttaacctgctgatgaccctgcggctgtggtccagc

SEQ ID NO: 5483 - DNA, 2304 bp, synthetic construct
  source 1..2304: mol_type = other DNA
atggccttaccagtgaccgccttgctcctgccgctggccttgctgctccacgccgccaggccggaagtgcagctggttgaatctggcggaggactggttcagcctggcggatctctgagactgtcttgtgccgccagcggcttcagcttcagcgacttttggatgagctgggtccgacaggcccctggcaaaggacttgaatgggtcgccacaatcagccaggccggcagcgagaaggactacgtggactctgtgaagggcagattcaccatcagccgggacaacgccaagaagtccctgtacctccagatgaacagcctgagagccgaggacaccgccgtgtactattgtgcctctggcgtgtacagcttcgactacagaggccagggcaccctggtcacagtctcttctggtaccggcggaggcggatctggcggcggaggtagcggtggcggaggatctgaattcgacgacatcgtgatgacacagtcaccagatagcctcaccgtctccctgggggagcggaccaccattaattgtaaatccagccaaagcgtgctggactcaagcaagaacaagaatagcctcgcctggtatcagcagaagcccggtcagcctccaaagctgctgctttcttgggcctccaccagagagtccgggattcctgataggtttagtggttcaggctccggcacagattttactctgaccattgattctctccagccagaggattctgcaacttattactgccagcaaagcgcccactttcctataacttttggccagggaacccgacttgaaatcaagctcgagatccagaaccctgatcctgccgtgtaccagctgcgggatagcaagagcagcgacaagagcgtgtgtctgttcaccgacttcgacagccagaccaacgtgtcccagagcaaggactccgacgtgtacatcaccgataagtgcgtgctggacatgcggagcatggacttcaagagcaactccgccgtggcctggtccaacaagtccgatttcgcctgcgccaacgccttcaacaacagcattatccccgaggacacattcttcccaagccccgagagcagctgcgacgtgaagctggtggaaaagagcttcgagacagacaccaacctgaacttccagatcctgtacgagatcctgctgggcaaggccaccctgtacgccgtgctggtgtctgccctggtgctgatggctatggtcaagcggaaggacagccggggacgcgccaagagaagcggatctggcgtgaagcagaccctgaatttcgacctgctgaagctggctggcgacgtggaatccaacccaggccctactagtatggactggatttggcgcatccttttccttgtcggcgctgctaccggcgcgcattccttcgaacaggtgcagctggtgcagagcggtgccgaagtgaagaaaccaggtgcatccgttaaagtttcatgtaaggctagtggatataccttcaccaattacggaatgaactgggtgaaacaggcccctggccagggactgaagtggatggggtggattaacacctacaccggggagccgacttatgcagacgactttaaggggcgggtcacgatgacctccgacacctccaccagtaccgcctacctggagctgcacaaccttaggtcagacgataccgccgtgtattactgtgcccgatggtcttggtccgacggatactatgtctacttcgactattggggccaggggaccacagttaccgtgtcctctacgcgtgaggacctgaagaacgtgttcccacctgaggtggccgtgttcgagcctagcgaggccgagatcagccacacccagaaagccaccctcgtgtgcctggctaccggcttctaccccgaccatgtggaactgtcttggtgggtcaacggcaaagaggtgcacagcggcgtgtgtaccgacccccagccactgaaagaacagcccgccctgaacgacagccggtactgcctgagcagcagactgagagtgtccgccaccttctggcagaacccccggaaccacttcagatgccaggtgcagttctacggcctgagcgagaacgacgagtggacccaggacagagccaagcccgtgacccagatcgtgtctgccgaagcctggggcagagccgattgcggctttaccagcgagagctaccagcagggcgtgctgagcgccaccaacctgagcgtgatcggcttcagaatcctgctgctgaaagtggccggctttaacctgctgatgaccctgcggctgtggtccagc

SEQ ID NO: 5484 - DNA, 2292 bp, synthetic construct
  source 1..2292: mol_type = other DNA
atggccttaccagtgaccgccttgctcctgccgctggccttgctgctccacgccgccaggccggaagtgcagctggttgaatctggcggaggactggttcagcctggcggatctctgagactgtcttgtgccgccagcggcttcagcttcagcgacttttggatgagctgggtccgacaggcccctggcaaaggacttgaatgggtcgccacaatcagccaggccggcagcgagaaggactacgtggactctgtgaagggcagattcaccatcagccgggacaacgccaagaagtccctgtacctccagatgaacagcctgagagccgaggacaccgccgtgtactattgtgcctctggcgtgtacagcttcgactacagaggccagggcaccctggtcacagtctcttctggtaccggcggaggcggatctggcggcggaggtagcggtggcggaggatctgaattcgacgagatcgtgctgacacagagccctggaagcctggccgtgtctcctggcgagcgcgtgacaatgagctgcaagagcagccagagcgtgttcttcagcagctcccagaagaactacctggcctggtatcagcagatccccggccagagccccagactgctgatctactgggccagcaccagagaaagcggcgtgcccgatagattcaccggcagcggctctggcaccgacttcaccctgacaatcagcagcgtgcagcccgaggacctggctatctactactgccaccagtacctgagcagccggaccttcggccagggcaccaagctggaaatcaagagactcgagatccagaaccctgatcctgccgtgtaccagctgcgggatagcaagagcagcgacaagagcgtgtgtctgttcaccgacttcgacagccagaccaacgtgtcccagagcaaggactccgacgtgtacatcaccgataagtgcgtgctggacatgcggagcatggacttcaagagcaactccgccgtggcctggtccaacaagtccgatttcgcctgcgccaacgccttcaacaacagcattatccccgaggacacattcttcccaagccccgagagcagctgcgacgtgaagctggtggaaaagagcttcgagacagacaccaacctgaacttccagatcctgtacgagatcctgctgggcaaggccaccctgtacgccgtgctggtgtctgccctggtgctgatggctatggtcaagcggaaggacagccggggacgcgccaagagaagcggatctggcgtgaagcagaccctgaatttcgacctgctgaagctggctggcgacgtggaatccaacccaggccctactagtatggactggatttggcgcatccttttccttgtcggcgctgctaccggcgcgcattccttcgaacaggtgcaactgcagcagcctggcgctgaggtcgtgaagccaggcgcttccgtgaagatgtcctgcaaggccagcggctacaccttcaccagctactacatccactggatcaagcagacccctggacagggcctggaatgggtgggagtgatctaccccggcaacgacgacatcagctacaaccagaagttccagggcaaggccaccctgaccgccgacaagtctagcaccaccgcctacatgcaactgtccagcctgaccagcgaggacagcgccgtgtactactgcgccagagaagtgcggctgcggtacttcgatgtgtggggccagggaaccaccgtgaccgtgtcatctacgcgtgaggacctgaagaacgtgttcccacctgaggtggccgtgttcgagcctagcgaggccgagatcagccacacccagaaagccaccctcgtgtgcctggctaccggcttctaccccgaccatgtggaactgtcttggtgggtcaacggcaaagaggtgcacagcggcgtgtgtaccgacccccagccactgaaagaacagcccgccctgaacgacagccggtactgcctgagcagcagactgagagtgtccgccaccttctggcagaacccccggaaccacttcagatgccaggtgcagttctacggcctgagcgagaacgacgagtggacccaggacagagccaagcccgtgacccagatcgtgtctgccgaagcctggggcagagccgattgcggctttaccagcgagagctaccagcagggcgtgctgagcgccaccaacctgagcgtgatcggcttcagaatcctgctgctgaaagtggccggctttaacctgctgatgaccctgcggctgtggtccagc

SEQ ID NO: 5485 - DNA, 2304 bp, synthetic construct
  source 1..2304: mol_type = other DNA
atggccttaccagtgaccgccttgctcctgccgctggccttgctgctccacgccgccaggccggaagtgcagctggttgaatctggcggaggactggttcagcctggcggatctctgagactgtcttgtgccgccagcggcttcagcttcagcgacttttggatgagctgggtccgacaggcccctggcaaaggacttgaatgggtcgccacaatcagccaggccggcagcgagaaggactacgtggactctgtgaagggcagattcaccatcagccgggacaacgccaagaagtccctgtacctccagatgaacagcctgagagccgaggacaccgccgtgtactattgtgcctctggcgtgtacagcttcgactacagaggccagggcaccctggtcacagtctcttctggtaccggcggaggcggatctggcggcggaggtagcggtggcggaggatctgaattcgatgtgctgctgacccagagccctctgagcctgcctgtgacactgggacagcctgccagcatctcctgtcggagcagccagaccatcgtgcacagcaacggcaacacctacctggaatggttccagcagcggccaggccagagccccagactgctgatctaccaggtgtccaacagattcagcggcgtgcccgacagattctccggcagcggctctggcaccgacttcaccctgaagatcagccgggtggaagccgaggacgtgggcgtgtactactgttttcaaggcagccacgtgccccggacctttggcggaggaacaaaggtggaaatcaagagagccctcgagatccagaaccctgatcctgccgtgtaccagctgcgggatagcaagagcagcgacaagagcgtgtgtctgttcaccgacttcgacagccagaccaacgtgtcccagagcaaggactccgacgtgtacatcaccgataagtgcgtgctggacatgcggagcatggacttcaagagcaactccgccgtggcctggtccaacaagtccgatttcgcctgcgccaacgccttcaacaacagcattatccccgaggacacattcttcccaagccccgagagcagctgcgacgtgaagctggtggaaaagagcttcgagacagacaccaacctgaacttccagatcctgtacgagatcctgctgggcaaggccaccctgtacgccgtgctggtgtctgccctggtgctgatggctatggtcaagcggaaggacagccggggacgcgccaagagaagcggatctggcgtgaagcagaccctgaatttcgacctgctgaagctggctggcgacgtggaatccaacccaggccctactagtatggactggatttggcgcatccttttccttgtcggcgctgctaccggcgcgcattccttcgaacagatccaactggtgcagagcggcagcgagctgaagaaacctggggccagcgtgaaggtgtcctgcaaggccagcggctacacctttaccaactacggcatgaactgggtgcgccaggcccctggacagggcctgaaatggatgggctggatcaacaccaacaccggcgagcctaagtacgccgaagagttcaagggcagattcgccctgagcctggacaccagcgtgtccacagcctacctccagatcaacagcctgaaggccgaggataccgccgtgtacttctgcgccagaggctacggcaactacgccagaggggcttggctggcctattggggccagggaacactcgtgaccgtgtcctctacgcgtgaggacctgaagaacgtgttcccacctgaggtggccgtgttcgagcctagcgaggccgagatcagccacacccagaaagccaccctcgtgtgcctggctaccggcttctaccccgaccatgtggaactgtcttggtgggtcaacggcaaagaggtgcacagcggcgtgtgtaccgacccccagccactgaaagaacagcccgccctgaacgacagccggtactgcctgagcagcagactgagagtgtccgccaccttctggcagaacccccggaaccacttcagatgccaggtgcagttctacggcctgagcgagaacgacgagtggacccaggacagagccaagcccgtgacccagatcgtgtctgccgaagcctggggcagagccgattgcggctttaccagcgagagctaccagcagggcgtgctgagcgccaccaacctgagcgtgatcggcttcagaatcctgctgctgaaagtggccggctttaacctgctgatgaccctgcggctgtggtccagc

SEQ ID NO: 5486 - DNA, 2259 bp, synthetic construct
  source 1..2259: mol_type = other DNA
atggccttaccagtgaccgccttgctcctgccgctggccttgctgctccacgccgccaggccggaagtgcagctggttgaatctggcggaggactggttcagcctggcggatctctgagactgtcttgtgccgccagcggcttcagcttcagcgacttttggatgagctgggtccgacaggcccctggcaaaggacttgaatgggtcgccacaatcagccaggccggcagcgagaaggactacgtggactctgtgaagggcagattcaccatcagccgggacaacgccaagaagtccctgtacctccagatgaacagcctgagagccgaggacaccgccgtgtactattgtgcctctggcgtgtacagcttcgactacagaggccagggcaccctggtcacagtctcttctggtaccggcggaggcggatctggcggcggaggtagcggtggcggaggatctgaattcgacgagatcgtgctgacacagagccctgccacactctctctgagccctggcgaaagagccaccctgagctgtagcgccagcagcagcatcaactacatctactggctccagcagaagcccggccaggcccccagaatcctgatctacctgaccagcaacctggcctccggcgtgccagccagattttctggcagcggctccggcaccgacttcaccctgacaatcagcagcctggaacccgaggacttcgccgtgtactactgcctccagtggtccagcaaccccctgacctttggcggaggcaccaaggtggaaatcaagctcgagatccagaaccctgatcctgccgtgtaccagctgcgggatagcaagagcagcgacaagagcgtgtgtctgttcaccgacttcgacagccagaccaacgtgtcccagagcaaggactccgacgtgtacatcaccgataagtgcgtgctggacatgcggagcatggacttcaagagcaactccgccgtggcctggtccaacaagtccgatttcgcctgcgccaacgccttcaacaacagcattatccccgaggacacattcttcccaagccccgagagcagctgcgacgtgaagctggtggaaaagagcttcgagacagacaccaacctgaacttccagatcctgtacgagatcctgctgggcaaggccaccctgtacgccgtgctggtgtctgccctggtgctgatggctatggtcaagcggaaggacagccggggacgcgccaagagaagcggatctggcgtgaagcagaccctgaatttcgacctgctgaagctggctggcgacgtggaatccaacccaggccctactagtatggactggatttggcgcatccttttccttgtcggcgctgctaccggcgcgcattccttcgaagaagtgcaactggtggaaagcgggggaggacttgtgaagcctggcggctctctgagactgagctgtgccgcctctggcttcaccttcagcagctacgacatgagctgggtgcgccaggctcctggcaagggactggaatgggtgtccaccatcagcagcggcggcagctacacctactacctggacagcatcaagggccggttcaccatctccagagacaacgccaagaacagcctgtacctccagatgaactccctgcgggccgaggacacagccgtgtattattgcgccagacagggcctggattactggggcagaggcacccttgtgaccgtgtcctctacgcgtgaggacctgaagaacgtgttcccacctgaggtggccgtgttcgagcctagcgaggccgagatcagccacacccagaaagccaccctcgtgtgcctggctaccggcttctaccccgaccatgtggaactgtcttggtgggtcaacggcaaagaggtgcacagcggcgtgtgtaccgacccccagccactgaaagaacagcccgccctgaacgacagccggtactgcctgagcagcagactgagagtgtccgccaccttctggcagaacccccggaaccacttcagatgccaggtgcagttctacggcctgagcgagaacgacgagtggacccaggacagagccaagcccgtgacccagatcgtgtctgccgaagcctggggcagagccgattgcggctttaccagcgagagctaccagcagggcgtgctgagcgccaccaacctgagcgtgatcggcttcagaatcctgctgctgaaagtggccggctttaacctgctgatgaccctgcggctgtggtccagc

SEQ ID NO: 5487 - DNA, 2286 bp, synthetic construct
  source 1..2286: mol_type = other DNA
atggccttaccagtgaccgccttgctcctgccgctggccttgctgctccacgccgccaggccggaagtgcagctggttgaatctggcggaggactggttcagcctggcggatctctgagactgtcttgtgccgccagcggcttcagcttcagcgacttttggatgagctgggtccgacaggcccctggcaaaggacttgaatgggtcgccacaatcagccaggccggcagcgagaaggactacgtggactctgtgaagggcagattcaccatcagccgggacaacgccaagaagtccctgtacctccagatgaacagcctgagagccgaggacaccgccgtgtactattgtgcctctggcgtgtacagcttcgactacagaggccagggcaccctggtcacagtctcttctggtaccggcggaggcggatctggcggcggaggtagcggtggcggaggatctgaattcgacatcgtgatgacccagagccccgatagcctggccgtgtctctgggagagagagccaccatcaactgccgggccagcaagagcgtgtccaccagcggctacagcttcatgcactggtatcagcagaagcccggccagccccccaagctgctgatctacctggcctccaacctggaaagcggcgtgcccgatagattcagcggcagcggctctggcaccgacttcaccctgaccatcagttctcttcaggccgaggacgtggccgtgtactactgccagcacagcagagaggtgccctggacattcggccagggcacaaaggtggaaatcaagcggctcgagatccagaaccctgatcctgccgtgtaccagctgcgggatagcaagagcagcgacaagagcgtgtgtctgttcaccgacttcgacagccagaccaacgtgtcccagagcaaggactccgacgtgtacatcaccgataagtgcgtgctggacatgcggagcatggacttcaagagcaactccgccgtggcctggtccaacaagtccgatttcgcctgcgccaacgccttcaacaacagcattatccccgaggacacattcttcccaagccccgagagcagctgcgacgtgaagctggtggaaaagagcttcgagacagacaccaacctgaacttccagatcctgtacgagatcctgctgggcaaggccaccctgtacgccgtgctggtgtctgccctggtgctgatggctatggtcaagcggaaggacagccggggacgcgccaagagaagcggatctggcgtgaagcagaccctgaatttcgacctgctgaagctggctggcgacgtggaatccaacccaggccctactagtatggactggatttggcgcatccttttccttgtcggcgctgctaccggcgcgcattccttcgaacaggtgcagctggtgcagtctggggccgaagtgaagaaacctggggccagcgtgaaggtgtcctgcaaggccagcggatacacctttaccaactacggcatgaactgggtgcgccaggcccctggacagggcctggaatggatgggctggatcaacacctacaccggcgagcccacatacgccgacgccttcaagggcagattcgccttcagcctggacaccagcacctccaccgcctacctccagatcaacagcctgcggagcgacgacaccgccgtgtattattgcgccagagattacggcgactacgggatggactattggggccagggaaccaccgtgaccgtgtcctctacgcgtgaggacctgaagaacgtgttcccacctgaggtggccgtgttcgagcctagcgaggccgagatcagccacacccagaaagccaccctcgtgtgcctggctaccggcttctaccccgaccatgtggaactgtcttggtgggtcaacggcaaagaggtgcacagcggcgtgtgtaccgacccccagccactgaaagaacagcccgccctgaacgacagccggtactgcctgagcagcagactgagagtgtccgccaccttctggcagaacccccggaaccacttcagatgccaggtgcagttctacggcctgagcgagaacgacgagtggacccaggacagagccaagcccgtgacccagatcgtgtctgccgaagcctggggcagagccgattgcggctttaccagcgagagctaccagcagggcgtgctgagcgccaccaacctgagcgtgatcggcttcagaatcctgctgctgaaagtggccggctttaacctgctgatgaccctgcggctgtggtccagc

SEQ ID NO: 5488 - DNA, 2274 bp, synthetic construct
  source 1..2274: mol_type = other DNA
atggccttaccagtgaccgccttgctcctgccgctggccttgctgctccacgccgccaggccggaagtgcagctggttgaatctggcggaggactggttcagcctggcggatctctgagactgtcttgtgccgccagcggcttcagcttcagcgacttttggatgagctgggtccgacaggcccctggcaaaggacttgaatgggtcgccacaatcagccaggccggcagcgagaaggactacgtggactctgtgaagggcagattcaccatcagccgggacaacgccaagaagtccctgtacctccagatgaacagcctgagagccgaggacaccgccgtgtactattgtgcctctggcgtgtacagcttcgactacagaggccagggcaccctggtcacagtctcttctggtaccggcggaggcggatctggcggcggaggtagcggtggcggaggatctgaattcgacatcgtgatgacccagacccccctgaccctgagcgtgacaatcggacagcctgccagcatctcctgcaagagcagccagagcctgctggacagcgacggcaagacctacctgaactggctgctgcagaggccaggccagagccccgagagactgatctacctggtgtccaagctggactccggcgtgcccgatagattcacaggcagcggctccggcaccgacttcaccctgaagatcagccgggtggaagccgaggacctgggcgtgtactgttgttggcagggcacccacttcccttacaccttcggcggagggaccaaggtggaaatcaagggcctcgagatccagaaccctgatcctgccgtgtaccagctgcgggatagcaagagcagcgacaagagcgtgtgtctgttcaccgacttcgacagccagaccaacgtgtcccagagcaaggactccgacgtgtacatcaccgataagtgcgtgctggacatgcggagcatggacttcaagagcaactccgccgtggcctggtccaacaagtccgatttcgcctgcgccaacgccttcaacaacagcattatccccgaggacacattcttcccaagccccgagagcagctgcgacgtgaagctggtggaaaagagcttcgagacagacaccaacctgaacttccagatcctgtacgagatcctgctgggcaaggccaccctgtacgccgtgctggtgtctgccctggtgctgatggctatggtcaagcggaaggacagccggggacgcgccaagagaagcggatctggcgtgaagcagaccctgaatttcgacctgctgaagctggctggcgacgtggaatccaacccaggccctactagtatggactggatttggcgcatccttttccttgtcggcgctgctaccggcgcgcattccttcgaacaggtgcaactgcagcagcctggcgctgaacttgtgcggccaggcgcctctgtgaagctgagctgtaaagccagcggctacaccttcaccagctactggatgaactgggtcaagcagcgcccaggccagggcctggaatggatcggaatgatcgaccccagcgacagcgagacacactacaaccacatcttcaaggacaaggccaccctgaccgtggacaagtccagcagcacagcctacctgcaactgtccagcctgaccagcgaggacagcgccgtgtactactgcgcccggaacctgtatctgtggggccagggaacaagcgtgaccgtgtctagcacgcgtgaggacctgaagaacgtgttcccacctgaggtggccgtgttcgagcctagcgaggccgagatcagccacacccagaaagccaccctcgtgtgcctggctaccggcttctaccccgaccatgtggaactgtcttggtgggtcaacggcaaagaggtgcacagcggcgtgtgtaccgacccccagccactgaaagaacagcccgccctgaacgacagccggtactgcctgagcagcagactgagagtgtccgccaccttctggcagaacccccggaaccacttcagatgccaggtgcagttctacggcctgagcgagaacgacgagtggacccaggacagagccaagcccgtgacccagatcgtgtctgccgaagcctggggcagagccgattgcggctttaccagcgagagctaccagcagggcgtgctgagcgccaccaacctgagcgtgatcggcttcagaatcctgctgctgaaagtggccggctttaacctgctgatgaccctgcggctgtggtccagc

SEQ ID NO: 5489 - DNA, 2298 bp, synthetic construct
  source 1..2298: mol_type = other DNA
atggccttaccagtgaccgccttgctcctgccgctggccttgctgctccacgccgccaggccggaagtgcagctggttgaatctggcggaggactggttcagcctggcggatctctgagactgtcttgtgccgccagcggcttcagcttcagcgacttttggatgagctgggtccgacaggcccctggcaaaggacttgaatgggtcgccacaatcagccaggccggcagcgagaaggactacgtggactctgtgaagggcagattcaccatcagccgggacaacgccaagaagtccctgtacctccagatgaacagcctgagagccgaggacaccgccgtgtactattgtgcctctggcgtgtacagcttcgactacagaggccagggcaccctggtcacagtctcttctggtaccggcggaggcggatctggcggcggaggtagcggtggcggaggatctgaattcgacatcgtgatgacccagagccccgatagcctggccgtgtctctgggagagagagccaccatcaactgcgagagcagccagagcctgctgaacagcggcaaccagaagaactacctgacctggtatcagcagaagcccggccagccccccaagcccctgatctattgggccagcaccagagaaagcggcgtgcccgatagattcagcggcagcggaagcggcaccgacttcaccctgaccatcagttctcttcaggccgaggacgtggccgtgtactactgccagaacgactacagctacccctacaccttcggccagggcaccaagctggaaatcaagagactcgagatccagaaccctgatcctgccgtgtaccagctgcgggatagcaagagcagcgacaagagcgtgtgtctgttcaccgacttcgacagccagaccaacgtgtcccagagcaaggactccgacgtgtacatcaccgataagtgcgtgctggacatgcggagcatggacttcaagagcaactccgccgtggcctggtccaacaagtccgatttcgcctgcgccaacgccttcaacaacagcattatccccgaggacacattcttcccaagccccgagagcagctgcgacgtgaagctggtggaaaagagcttcgagacagacaccaacctgaacttccagatcctgtacgagatcctgctgggcaaggccaccctgtacgccgtgctggtgtctgccctggtgctgatggctatggtcaagcggaaggacagccggggacgcgccaagagaagcggatctggcgtgaagcagaccctgaatttcgacctgctgaagctggctggcgacgtggaatccaacccaggccctactagtatggactggatttggcgcatccttttccttgtcggcgctgctaccggcgcgcattccttcgaagaagtgcagctggtgcagtctggggccgaagtgaagaagcctggcgagagcctgaagatcagctgcaagggcagcggctacagcttcaccgactactacatgaagtgggccagacagatgcccggcaagggcctggaatggatgggcgacatcatccccagcaacggggccaccttctacaaccagaaattcaagggccaagtgaccatctccgccgacaagagcatcagcaccacctacctccagtggtccagcctgaaggccagcgacaccgccatgtactattgcgccagaagccatctgctgcgggccagttggttcgcctattggggccagggaacaatggtcacagtgtccagcacgcgtgaggacctgaagaacgtgttcccacctgaggtggccgtgttcgagcctagcgaggccgagatcagccacacccagaaagccaccctcgtgtgcctggctaccggcttctaccccgaccatgtggaactgtcttggtgggtcaacggcaaagaggtgcacagcggcgtgtgtaccgacccccagccactgaaagaacagcccgccctgaacgacagccggtactgcctgagcagcagactgagagtgtccgccaccttctggcagaacccccggaaccacttcagatgccaggtgcagttctacggcctgagcgagaacgacgagtggacccaggacagagccaagcccgtgacccagatcgtgtctgccgaagcctggggcagagccgattgcggctttaccagcgagagctaccagcagggcgtgctgagcgccaccaacctgagcgtgatcggcttcagaatcctgctgctgaaagtggccggctttaacctgctgatgaccctgcggctgtggtccagc

SEQ ID NO: 5490 - DNA, 2283 bp, synthetic construct
  source 1..2283: mol_type = other DNA
atggccttaccagtgaccgccttgctcctgccgctggccttgctgctccacgccgccaggccggaagtgcagctggttgaatctggcggaggactggttcagcctggcggatctctgagactgtcttgtgccgccagcggcttcagcttcagcgacttttggatgagctgggtccgacaggcccctggcaaaggacttgaatgggtcgccacaatcagccaggccggcagcgagaaggactacgtggactctgtgaagggcagattcaccatcagccgggacaacgccaagaagtccctgtacctccagatgaacagcctgagagccgaggacaccgccgtgtactattgtgcctctggcgtgtacagcttcgactacagaggccagggcaccctggtcacagtctcttctggtaccggcggaggcggatctggcggcggaggtagcggtggcggaggatctgaattcgacatccagatgacccagtctaccagttccctgagtgcatccctcggagacagggtgacgatcagttgcagcgcaagccaagggatcaataactatctgaactggtatcagcagaaaccggacggaacagtcgaactcctgatttattacaccagcacccttcagagtggcgtcccttcccggttcagtggctccggaagcgggaccgattactccctgaccatttctaatctggagccagaggacataggaacgtattattgccagcagtatagtaaactgccacgaacttttggaggggggacgaaactggagatcaaactcgagatccagaaccctgatcctgccgtgtaccagctgcgggatagcaagagcagcgacaagagcgtgtgtctgttcaccgacttcgacagccagaccaacgtgtcccagagcaaggactccgacgtgtacatcaccgataagtgcgtgctggacatgcggagcatggacttcaagagcaactccgccgtggcctggtccaacaagtccgatttcgcctgcgccaacgccttcaacaacagcattatccccgaggacacattcttcccaagccccgagagcagctgcgacgtgaagctggtggaaaagagcttcgagacagacaccaacctgaacttccagatcctgtacgagatcctgctgggcaaggccaccctgtacgccgtgctggtgtctgccctggtgctgatggctatggtcaagcggaaggacagccggggacgcgccaagagaagcggatctggcgtgaagcagaccctgaatttcgacctgctgaagctggctggcgacgtggaatccaacccaggccctactagtatggactggatttggcgcatccttttccttgtcggcgctgctaccggcgcgcattccttcgaacaggtgcaactccagcagtccggaagcgagcttatgatgccaggggcatcagtgaagatcagctgcaaggctactggctacaccttctctaattactggatagagtgggttaaacaaaggccagggcacggcctggaatggatcggcgagatcctgcctgggacaggccgaaccatttataacgagaagttcaaaggcaaggctactttcaccgcagatataagctctaatacagtgcaaatgcagctctcttccctgacaagtgaggatagtgccgtgtattattgcgcacgaagagattactatggaaatttttattacgctatggattattggggtcaaggaacaagtgtgaccgttagcagcacgcgtgaggacctgaagaacgtgttcccacctgaggtggccgtgttcgagcctagcgaggccgagatcagccacacccagaaagccaccctcgtgtgcctggctaccggcttctaccccgaccatgtggaactgtcttggtgggtcaacggcaaagaggtgcacagcggcgtgtgtaccgacccccagccactgaaagaacagcccgccctgaacgacagccggtactgcctgagcagcagactgagagtgtccgccaccttctggcagaacccccggaaccacttcagatgccaggtgcagttctacggcctgagcgagaacgacgagtggacccaggacagagccaagcccgtgacccagatcgtgtctgccgaagcctggggcagagccgattgcggctttaccagcgagagctaccagcagggcgtgctgagcgccaccaacctgagcgtgatcggcttcagaatcctgctgctgaaagtggccggctttaacctgctgatgaccctgcggctgtggtccagc

SEQ ID NO: 5491 - DNA, 2268 bp, synthetic construct
  source 1..2268: mol_type = other DNA
atggccttaccagtgaccgccttgctcctgccgctggccttgctgctccacgccgccaggccggaagtgcagctggttgaatctggcggaggactggttcagcctggcggatctctgagactgtcttgtgccgccagcggcttcagcttcagcgacttttggatgagctgggtccgacaggcccctggcaaaggacttgaatgggtcgccacaatcagccaggccggcagcgagaaggactacgtggactctgtgaagggcagattcaccatcagccgggacaacgccaagaagtccctgtacctccagatgaacagcctgagagccgaggacaccgccgtgtactattgtgcctctggcgtgtacagcttcgactacagaggccagggcaccctggtcacagtctcttctggtaccggcggaggcggatctggcggcggaggtagcggtggcggaggatctgaattcgacatccagatgacccagagccctgccagcctgtccgtgtctgtgggcgagacagtgaccatcacctgtcgggccagcgagaacatctacagcaacctggcctggtatcagcagaagcagggcaagagcccccaactgctggtgtacgccgccaccaatctggccgatggcgtgcccagcagattttccggctctggcagcggcacccagtacagcctgaagatcaacagcctccagagcgaggacttcggcagctactactgccagcacttctggggcacctggacctttggaggaggcaccaccctggaaatcaagctcgagatccagaaccctgatcctgccgtgtaccagctgcgggatagcaagagcagcgacaagagcgtgtgtctgttcaccgacttcgacagccagaccaacgtgtcccagagcaaggactccgacgtgtacatcaccgataagtgcgtgctggacatgcggagcatggacttcaagagcaactccgccgtggcctggtccaacaagtccgatttcgcctgcgccaacgccttcaacaacagcattatccccgaggacacattcttcccaagccccgagagcagctgcgacgtgaagctggtggaaaagagcttcgagacagacaccaacctgaacttccagatcctgtacgagatcctgctgggcaaggccaccctgtacgccgtgctggtgtctgccctggtgctgatggctatggtcaagcggaaggacagccggggacgcgccaagagaagcggatctggcgtgaagcagaccctgaatttcgacctgctgaagctggctggcgacgtggaatccaacccaggccctactagtatggactggatttggcgcatccttttccttgtcggcgctgctaccggcgcgcattccttcgaagaagtgcaactccagcagagcggccctgagcttgtgaagcctggcgcttccgtgaagatgagctgcaaggccagcggctacaccttcaccgactactacatgaagtggatgaagcagagccacggcaagtccctggaatggatcggcgacatcaaccccaacaacggcggcaccacctacaaccagaagttcaagggcaaggccaccctgaccgtggacaagagcagcagcaccgcctacatgcaactgaacagcctgaccagcgaggacagcgccgtgtactactgcgccagagactacggctacggctatttcgactactggggccagggcacaaccctgacagtgtcctctacgcgtgaggacctgaagaacgtgttcccacctgaggtggccgtgttcgagcctagcgaggccgagatcagccacacccagaaagccaccctcgtgtgcctggctaccggcttctaccccgaccatgtggaactgtcttggtgggtcaacggcaaagaggtgcacagcggcgtgtgtaccgacccccagccactgaaagaacagcccgccctgaacgacagccggtactgcctgagcagcagactgagagtgtccgccaccttctggcagaacccccggaaccacttcagatgccaggtgcagttctacggcctgagcgagaacgacgagtggacccaggacagagccaagcccgtgacccagatcgtgtctgccgaagcctggggcagagccgattgcggctttaccagcgagagctaccagcagggcgtgctgagcgccaccaacctgagcgtgatcggcttcagaatcctgctgctgaaagtggccggctttaacctgctgatgaccctgcggctgtggtccagc

SEQ ID NO: 5492 - DNA, 2277 bp, synthetic construct
  source 1..2277: mol_type = other DNA
atggccttaccagtgaccgccttgctcctgccgctggccttgctgctccacgccgccaggccggaagtgcagctggttgaatctggcggaggactggttcagcctggcggatctctgagactgtcttgtgccgccagcggcttcagcttcagcgacttttggatgagctgggtccgacaggcccctggcaaaggacttgaatgggtcgccacaatcagccaggccggcagcgagaaggactacgtggactctgtgaagggcagattcaccatcagccgggacaacgccaagaagtccctgtacctccagatgaacagcctgagagccgaggacaccgccgtgtactattgtgcctctggcgtgtacagcttcgactacagaggccagggcaccctggtcacagtctcttctggtaccggcggaggcggatctggcggcggaggtagcggtggcggaggatctgaattcgagatcgtgctgacacagagccctggcaccctgagcctgtctccaggcgaaagagccacactgagctgtcgggcctctcagagcgtgggaggctacctggcttggtatcagcagaagccaggccaggcccccagactgctgatctacgacgccagcaatcgggccacaggcatccccgccagattttctggcagcggctccggcaccgacttcaccctgacaatcagcagcctggaacccgaggacttcgccgtgtactactgccagcagcggaacaactggccccccatgtacacattcggccagggcaccaagctggaaatcaagagactcgagatccagaaccctgatcctgccgtgtaccagctgcgggatagcaagagcagcgacaagagcgtgtgtctgttcaccgacttcgacagccagaccaacgtgtcccagagcaaggactccgacgtgtacatcaccgataagtgcgtgctggacatgcggagcatggacttcaagagcaactccgccgtggcctggtccaacaagtccgatttcgcctgcgccaacgccttcaacaacagcattatccccgaggacacattcttcccaagccccgagagcagctgcgacgtgaagctggtggaaaagagcttcgagacagacaccaacctgaacttccagatcctgtacgagatcctgctgggcaaggccaccctgtacgccgtgctggtgtctgccctggtgctgatggctatggtcaagcggaaggacagccggggacgcgccaagagaagcggatctggcgtgaagcagaccctgaatttcgacctgctgaagctggctggcgacgtggaatccaacccaggccctactagtatggactggatttggcgcatccttttccttgtcggcgctgctaccggcgcgcattccttcgaacaggtgcaactggtgcagagcggagccgaagtgaagaaacccggcagcagcgtgaaggtgtcctgcaaggcttccggcggcaccttcagcagctacgccatttcttgggtgcgccaggctcctggacagggcctggaatggatgggcggcatcatccctatcctgggcaccgccaactacgcccagaaattccagggcagagtgaccatcaccgccgacgagagcaccagcaccgcctacatggaactgagcagcctgcggagcgaggacacagccgtgtattattgcgccagatggggcggaggggccttcgacatttggggccagggaacaatggtcaccgtgtccagcacgcgtgaggacctgaagaacgtgttcccacctgaggtggccgtgttcgagcctagcgaggccgagatcagccacacccagaaagccaccctcgtgtgcctggctaccggcttctaccccgaccatgtggaactgtcttggtgggtcaacggcaaagaggtgcacagcggcgtgtgtaccgacccccagccactgaaagaacagcccgccctgaacgacagccggtactgcctgagcagcagactgagagtgtccgccaccttctggcagaacccccggaaccacttcagatgccaggtgcagttctacggcctgagcgagaacgacgagtggacccaggacagagccaagcccgtgacccagatcgtgtctgccgaagcctggggcagagccgattgcggctttaccagcgagagctaccagcagggcgtgctgagcgccaccaacctgagcgtgatcggcttcagaatcctgctgctgaaagtggccggctttaacctgctgatgaccctgcggctgtggtccagc

SEQ ID NO: 5493 - DNA, 2262 bp, synthetic construct
  source 1..2262: mol_type = other DNA
atggccttaccagtgaccgccttgctcctgccgctggccttgctgctccacgccgccaggccggaagtgcagctggttgaatctggcggaggactggttcagcctggcggatctctgagactgtcttgtgccgccagcggcttcagcttcagcgacttttggatgagctgggtccgacaggcccctggcaaaggacttgaatgggtcgccacaatcagccaggccggcagcgagaaggactacgtggactctgtgaagggcagattcaccatcagccgggacaacgccaagaagtccctgtacctccagatgaacagcctgagagccgaggacaccgccgtgtactattgtgcctctggcgtgtacagcttcgactacagaggccagggcaccctggtcacagtctcttctggtaccggcggaggcggatctggcggcggaggtagcggtggcggaggatctgaattccagatcgtgctgacacagagccctgccctgatgagcgccagccctggcgagaaagtgaccatgacctgtagcgccagcagcagcgtgcgctacatgtactggtatcagcagaagcccagaagcagccccaagccctggattcacctgaccagcaatctggcctctggcgtgcccgctagattttccggctctggcagcggcaccagctacagcctgaccatcagcagcatggaagccgaggacgccgccacctactactgccagcagtggtccagccaccccttcacatttggctccggcaccaagctggaaatcaagctcgagatccagaaccctgatcctgccgtgtaccagctgcgggatagcaagagcagcgacaagagcgtgtgtctgttcaccgacttcgacagccagaccaacgtgtcccagagcaaggactccgacgtgtacatcaccgataagtgcgtgctggacatgcggagcatggacttcaagagcaactccgccgtggcctggtccaacaagtccgatttcgcctgcgccaacgccttcaacaacagcattatccccgaggacacattcttcccaagccccgagagcagctgcgacgtgaagctggtggaaaagagcttcgagacagacaccaacctgaacttccagatcctgtacgagatcctgctgggcaaggccaccctgtacgccgtgctggtgtctgccctggtgctgatggctatggtcaagcggaaggacagccggggacgcgccaagagaagcggatctggcgtgaagcagaccctgaatttcgacctgctgaagctggctggcgacgtggaatccaacccaggccctactagtatggactggatttggcgcatccttttccttgtcggcgctgctaccggcgcgcattccttcgaagatgtgcaactccaggaaagcggccctggccttgtgaagcctagccagagcctgtccctgacctgtaccgtgaccggcttcagcatcaccagcgactactcttggaactggatcagacagttccctggcaacaaactggaatggatgggctacatcagctactccggccacacctcctacaaccccagcctggaaagccggatctccatcaccagagacaccagcaagaaccagttcttcttgcaactgaacagcgtgaccaccgaggataccgccacatattactgtaccagaggcaactgggacgtggtgtactggggccagggcacacttgtgaccgtgtctgctacgcgtgaggacctgaagaacgtgttcccacctgaggtggccgtgttcgagcctagcgaggccgagatcagccacacccagaaagccaccctcgtgtgcctggctaccggcttctaccccgaccatgtggaactgtcttggtgggtcaacggcaaagaggtgcacagcggcgtgtgtaccgacccccagccactgaaagaacagcccgccctgaacgacagccggtactgcctgagcagcagactgagagtgtccgccaccttctggcagaacccccggaaccacttcagatgccaggtgcagttctacggcctgagcgagaacgacgagtggacccaggacagagccaagcccgtgacccagatcgtgtctgccgaagcctggggcagagccgattgcggctttaccagcgagagctaccagcagggcgtgctgagcgccaccaacctgagcgtgatcggcttcagaatcctgctgctgaaagtggccggctttaacctgctgatgaccctgcggctgtggtccagc

SEQ ID NO: 5494 - DNA, 2292 bp, synthetic construct
  source 1..2292: mol_type = other DNA
atggccttaccagtgaccgccttgctcctgccgctggccttgctgctccacgccgccaggccggaagtgcagctggttgaatctggcggaggactggttcagcctggcggatctctgagactgtcttgtgccgccagcggcttcagcttcagcgacttttggatgagctgggtccgacaggcccctggcaaaggacttgaatgggtcgccacaatcagccaggccggcagcgagaaggactacgtggactctgtgaagggcagattcaccatcagccgggacaacgccaagaagtccctgtacctccagatgaacagcctgagagccgaggacaccgccgtgtactattgtgcctctggcgtgtacagcttcgactacagaggccagggcaccctggtcacagtctcttctggtaccggcggaggcggatctggcggcggaggtagcggtggcggaggatctgaattcgacgtcgtgatgacccagagccctctgagcctgcctgtgacactgggacagcctgccagcatctcctgtcggagcagccagagcatcgtgcacagcgacggcaacacctacctggaatggtatcagcagcggccaggccagagccccagacggctgatctacaaggtgtccaacagattcagcggcgtgcccgacagattctccggcagcggctctggcaccgacttcaccctgaagatcagcagagtggaagccgaggacgtgggcgtgtactactgttttcaaggcagccacgccccctggacctttggcggaggaacaaaggtggaaatcaagctcgagatccagaaccctgatcctgccgtgtaccagctgcgggatagcaagagcagcgacaagagcgtgtgtctgttcaccgacttcgacagccagaccaacgtgtcccagagcaaggactccgacgtgtacatcaccgataagtgcgtgctggacatgcggagcatggacttcaagagcaactccgccgtggcctggtccaacaagtccgatttcgcctgcgccaacgccttcaacaacagcattatccccgaggacacattcttcccaagccccgagagcagctgcgacgtgaagctggtggaaaagagcttcgagacagacaccaacctgaacttccagatcctgtacgagatcctgctgggcaaggccaccctgtacgccgtgctggtgtctgccctggtgctgatggctatggtcaagcggaaggacagccggggacgcgccaagagaagcggatctggcgtgaagcagaccctgaatttcgacctgctgaagctggctggcgacgtggaatccaacccaggccctactagtatggactggatttggcgcatccttttccttgtcggcgctgctaccggcgcgcattccttcgaagaagtgcaactggtggaatcaggcggcggactggtgcagcctggcggatctctgagactgagctgtgccgccagcggcttcaccttcagcagctacggaatgcactgggtgcgccaggcccctggcaaaggactggaatgggtggcctacatcaccaccagaagcagcaccatctactacgccgacagcgtgaagggccggttcaccatctccagagacaacgccaagaacagcctgtacctccagatgaactccctgcgggccgaggacaccgccgtgtactattgcaccagagagcccctgaccggctactacgctatggactattggggccagggcaccagcgtgaccgtgtctagtacgcgtgaggacctgaagaacgtgttcccacctgaggtggccgtgttcgagcctagcgaggccgagatcagccacacccagaaagccaccctcgtgtgcctggctaccggcttctaccccgaccatgtggaactgtcttggtgggtcaacggcaaagaggtgcacagcggcgtgtgtaccgacccccagccactgaaagaacagcccgccctgaacgacagccggtactgcctgagcagcagactgagagtgtccgccaccttctggcagaacccccggaaccacttcagatgccaggtgcagttctacggcctgagcgagaacgacgagtggacccaggacagagccaagcccgtgacccagatcgtgtctgccgaagcctggggcagagccgattgcggctttaccagcgagagctaccagcagggcgtgctgagcgccaccaacctgagcgtgatcggcttcagaatcctgctgctgaaagtggccggctttaacctgctgatgaccctgcggctgtggtccagc

SEQ ID NO: 5495 - DNA, 2268 bp, synthetic construct
  source 1..2268: mol_type = other DNA
atggccttaccagtgaccgccttgctcctgccgctggccttgctgctccacgccgccaggccggaagtgcagctggttgaatctggcggaggactggttcagcctggcggatctctgagactgtcttgtgccgccagcggcttcagcttcagcgacttttggatgagctgggtccgacaggcccctggcaaaggacttgaatgggtcgccacaatcagccaggccggcagcgagaaggactacgtggactctgtgaagggcagattcaccatcagccgggacaacgccaagaagtccctgtacctccagatgaacagcctgagagccgaggacaccgccgtgtactattgtgcctctggcgtgtacagcttcgactacagaggccagggcaccctggtcacagtctcttctggtaccggcggaggcggatctggcggcggaggtagcggtggcggaggatctgaattcgacatccagatgacccagagccccagcagcctgtctgccagcgtgggcgacagagtgaccatcacctgtagagccagccagagcatcagcctgtggctgaactggtatcagcagaagcccggcaaggcccccaagctgctgatctacgccgccagcacactccagagcggcgtgccaagcagattttccggcagcggctccggcaccgacttcaccctgacaatcagctccctccagcccgaggacttcgccacctactactgccagcagtactacaccagcccctacaccttcggccagggcaccaaggtggaaatcaagagactcgagatccagaaccctgatcctgccgtgtaccagctgcgggatagcaagagcagcgacaagagcgtgtgtctgttcaccgacttcgacagccagaccaacgtgtcccagagcaaggactccgacgtgtacatcaccgataagtgcgtgctggacatgcggagcatggacttcaagagcaactccgccgtggcctggtccaacaagtccgatttcgcctgcgccaacgccttcaacaacagcattatccccgaggacacattcttcccaagccccgagagcagctgcgacgtgaagctggtggaaaagagcttcgagacagacaccaacctgaacttccagatcctgtacgagatcctgctgggcaaggccaccctgtacgccgtgctggtgtctgccctggtgctgatggctatggtcaagcggaaggacagccggggacgcgccaagagaagcggatctggcgtgaagcagaccctgaatttcgacctgctgaagctggctggcgacgtggaatccaacccaggccctactagtatggactggatttggcgcatccttttccttgtcggcgctgctaccggcgcgcattccttcgaacaggtgcaactgctggaatctggcggcggactggtgcagcctggcggatctctgagactgagctgtgccgccagcggcttcaccttcagcagctacgccatgagctgggtgcgccaggcccctggaaaaggactggaatgggtgtccgtgatccggtccagcggcagcagcacctattacgccgatagcgtgaagggccggttcaccatcagccgggacaacagcaagaacaccctgtacctccagatgaacagcctgcgggccgaggacaccgccgtgtactattgtgctaggggaggcggctacttcgactactggggccagggaacactcgtgaccgtgtcctctacgcgtgaggacctgaagaacgtgttcccacctgaggtggccgtgttcgagcctagcgaggccgagatcagccacacccagaaagccaccctcgtgtgcctggctaccggcttctaccccgaccatgtggaactgtcttggtgggtcaacggcaaagaggtgcacagcggcgtgtgtaccgacccccagccactgaaagaacagcccgccctgaacgacagccggtactgcctgagcagcagactgagagtgtccgccaccttctggcagaacccccggaaccacttcagatgccaggtgcagttctacggcctgagcgagaacgacgagtggacccaggacagagccaagcccgtgacccagatcgtgtctgccgaagcctggggcagagccgattgcggctttaccagcgagagctaccagcagggcgtgctgagcgccaccaacctgagcgtgatcggcttcagaatcctgctgctgaaagtggccggctttaacctgctgatgaccctgcggctgtggtccagc

SEQ ID NO: 5496 - DNA, 2277 bp, synthetic construct
  source 1..2277: mol_type = other DNA
atggccttaccagtgaccgccttgctcctgccgctggccttgctgctccacgccgccaggccggaagtgcagctggttgaatctggcggaggactggttcagcctggcggatctctgagactgtcttgtgccgccagcggcttcagcttcagcgacttttggatgagctgggtccgacaggcccctggcaaaggacttgaatgggtcgccacaatcagccaggccggcagcgagaaggactacgtggactctgtgaagggcagattcaccatcagccgggacaacgccaagaagtccctgtacctccagatgaacagcctgagagccgaggacaccgccgtgtactattgtgcctctggcgtgtacagcttcgactacagaggccagggcaccctggtcacagtctcttctggtaccggcggaggcggatctggcggcggaggtagcggtggcggaggatctgaattcgacatccagatgacccagagccccagcagcctgtctgccagcgtgggcgacagagtgaccatcacctgtagagccagccagagcatcagcagctacctgaactggtatcagcagaagcccggcaaggcccccaaactgctgatctacgccgtgtccacactccagagcggcgtgcccagcagattttctggcagcggctccggcaccgacttcaccctgacaatcagctccctccagcccgaggacttcgccacctactactgtcagcagagcggcaccttccctcccaccacatttggacagggcaccaaggtggaaatcaagagactcgagatccagaaccctgatcctgccgtgtaccagctgcgggatagcaagagcagcgacaagagcgtgtgtctgttcaccgacttcgacagccagaccaacgtgtcccagagcaaggactccgacgtgtacatcaccgataagtgcgtgctggacatgcggagcatggacttcaagagcaactccgccgtggcctggtccaacaagtccgatttcgcctgcgccaacgccttcaacaacagcattatccccgaggacacattcttcccaagccccgagagcagctgcgacgtgaagctggtggaaaagagcttcgagacagacaccaacctgaacttccagatcctgtacgagatcctgctgggcaaggccaccctgtacgccgtgctggtgtctgccctggtgctgatggctatggtcaagcggaaggacagccggggacgcgccaagagaagcggatctggcgtgaagcagaccctgaatttcgacctgctgaagctggctggcgacgtggaatccaacccaggccctactagtatggactggatttggcgcatccttttccttgtcggcgctgctaccggcgcgcattccttcgaacaggtgcaactgctggaatctggcggcggactggtgcagcctggcggatctctgagactgagctgtgccgccagcggcttcaccttcagcagccacggaatgcactgggtgcgccaggcccctggaaagggactggaatgggtgtccgtgatctccggcagcggcagcaataccggctacgccgatagcgtgaagggccggttcaccatcagccgggacaacagcaagaacaccctgtacctccagatgaacagcctgcgggccgaggacaccgccgtgtactattgtgccagacagtggggcagctacgccttcgattcttggggccagggcaccctcgtgaccgtgtcatctacgcgtgaggacctgaagaacgtgttcccacctgaggtggccgtgttcgagcctagcgaggccgagatcagccacacccagaaagccaccctcgtgtgcctggctaccggcttctaccccgaccatgtggaactgtcttggtgggtcaacggcaaagaggtgcacagcggcgtgtgtaccgacccccagccactgaaagaacagcccgccctgaacgacagccggtactgcctgagcagcagactgagagtgtccgccaccttctggcagaacccccggaaccacttcagatgccaggtgcagttctacggcctgagcgagaacgacgagtggacccaggacagagccaagcccgtgacccagatcgtgtctgccgaagcctggggcagagccgattgcggctttaccagcgagagctaccagcagggcgtgctgagcgccaccaacctgagcgtgatcggcttcagaatcctgctgctgaaagtggccggctttaacctgctgatgaccctgcggctgtggtccagc

SEQ ID NO: 5497 - DNA, 2307 bp, synthetic construct
  source 1..2307: mol_type = other DNA
atggccttaccagtgaccgccttgctcctgccgctggccttgctgctccacgccgccaggccggaagtgcagctggttgaatctggcggaggactggttcagcctggcggatctctgagactgtcttgtgccgccagcggcttcagcttcagcgacttttggatgagctgggtccgacaggcccctggcaaaggacttgaatgggtcgccacaatcagccaggccggcagcgagaaggactacgtggactctgtgaagggcagattcaccatcagccgggacaacgccaagaagtccctgtacctccagatgaacagcctgagagccgaggacaccgccgtgtactattgtgcctctggcgtgtacagcttcgactacagaggccagggcaccctggtcacagtctcttctggtaccggcggaggcggatctggcggcggaggtagcggtggcggaggatctgaattcgacatcgtgatgagccagagccctagcagcctggccgtgtccgtgggcgagaaagtgaccatgagctgcaagagcagccagtccctgctgcacagcagcaaccagaagaactacctggcctggtatcagcagaagcccggccagtcccccaaggtgctgatctactgggccagcaccagagaaagcggcgtgcccgatagattcaccggcagcggctctggcaccgacttcaccctgaccatcaccagcgtgaagtccgaggacctggctgtgtactactgccagcagtattacagctacccctggaccttcggcggaggcacccggctggaaatcaaaagactcgagatccagaaccctgatcctgccgtgtaccagctgcgggatagcaagagcagcgacaagagcgtgtgtctgttcaccgacttcgacagccagaccaacgtgtcccagagcaaggactccgacgtgtacatcaccgataagtgcgtgctggacatgcggagcatggacttcaagagcaactccgccgtggcctggtccaacaagtccgatttcgcctgcgccaacgccttcaacaacagcattatccccgaggacacattcttcccaagccccgagagcagctgcgacgtgaagctggtggaaaagagcttcgagacagacaccaacctgaacttccagatcctgtacgagatcctgctgggcaaggccaccctgtacgccgtgctggtgtctgccctggtgctgatggctatggtcaagcggaaggacagccggggacgcgccaagagaagcggatctggcgtgaagcagaccctgaatttcgacctgctgaagctggctggcgacgtggaatccaacccaggccctactagtatggactggatttggcgcatccttttccttgtcggcgctgctaccggcgcgcattccttcgaagaagtgcaactccagcagagcgtggccgagcttgtgaagcctggcgcttccgtgaagatgtcctgcaaggtgtccggctacaccctgacagaccacaccatccactggatgaagcagcggcctgagcagggcctggaatggatcggctacatctaccccagggacggcatcaccggctacaacgagaagttcaagggcaaggccacactgaccgccgacaccagcagcagcacagcctacatgcaactgaacagcctgaccagcgaggacagcgccgtgtacttctgtgccagatggggctacagctacagaaactacgcctactactacgactactggggccagggcacaaccctgaccgtgtctagtacgcgtgaggacctgaagaacgtgttcccacctgaggtggccgtgttcgagcctagcgaggccgagatcagccacacccagaaagccaccctcgtgtgcctggctaccggcttctaccccgaccatgtggaactgtcttggtgggtcaacggcaaagaggtgcacagcggcgtgtgtaccgacccccagccactgaaagaacagcccgccctgaacgacagccggtactgcctgagcagcagactgagagtgtccgccaccttctggcagaacccccggaaccacttcagatgccaggtgcagttctacggcctgagcgagaacgacgagtggacccaggacagagccaagcccgtgacccagatcgtgtctgccgaagcctggggcagagccgattgcggctttaccagcgagagctaccagcagggcgtgctgagcgccaccaacctgagcgtgatcggcttcagaatcctgctgctgaaagtggccggctttaacctgctgatgaccctgcggctgtggtccagc

SEQ ID NO: 5498 - DNA, 2298 bp, synthetic construct
  source 1..2298: mol_type = other DNA
atggccttaccagtgaccgccttgctcctgccgctggccttgctgctccacgccgccaggccggaagtgcagctggttgaatctggcggaggactggttcagcctggcggatctctgagactgtcttgtgccgccagcggcttcagcttcagcgacttttggatgagctgggtccgacaggcccctggcaaaggacttgaatgggtcgccacaatcagccaggccggcagcgagaaggactacgtggactctgtgaagggcagattcaccatcagccgggacaacgccaagaagtccctgtacctccagatgaacagcctgagagccgaggacaccgccgtgtactattgtgcctctggcgtgtacagcttcgactacagaggccagggcaccctggtcacagtctcttctggtaccggcggaggcggatctggcggcggaggtagcggtggcggaggatctgaattcgagatcgtgctgacacagagccctggcaccctgagcctgtctccaggcgaaagagccacactgagctgtcgggccagccagagcgtgtccagctcttacctggcctggtatcagcagaagcccggccaggctccccggctgctgatctacggaacaagcagcagagccaccggcatccccgacagattttctggcagcggctccggcaccgacttcaccctgacaatcagcagactggaacccgaggacttcgccgtgtactactgccagcagtacggcagcagccccttcacctttggcggaggcaccaaggtggaaatcaagagactcgagatccagaaccctgatcctgccgtgtaccagctgcgggatagcaagagcagcgacaagagcgtgtgtctgttcaccgacttcgacagccagaccaacgtgtcccagagcaaggactccgacgtgtacatcaccgataagtgcgtgctggacatgcggagcatggacttcaagagcaactccgccgtggcctggtccaacaagtccgatttcgcctgcgccaacgccttcaacaacagcattatccccgaggacacattcttcccaagccccgagagcagctgcgacgtgaagctggtggaaaagagcttcgagacagacaccaacctgaacttccagatcctgtacgagatcctgctgggcaaggccaccctgtacgccgtgctggtgtctgccctggtgctgatggctatggtcaagcggaaggacagccggggacgcgccaagagaagcggatctggcgtgaagcagaccctgaatttcgacctgctgaagctggctggcgacgtggaatccaacccaggccctactagtatggactggatttggcgcatccttttccttgtcggcgctgctaccggcgcgcattccttcgaacaggtgcaactccaggaatctggccccggactggctaagcccagcgagacactgagcctgacctgtaccgtgtccggcgacagcatcaccagctactactggtcctggatcagacagccccctggcaagggcctggaatggatcggctacatctactacagcggcagcaccaactacaaccccagcctgaagtccagagtgaccatcagcgtggacaccagcaagaaccagttctccctgaagctgagcagcgtgacagccgccgacaccgccgtgtattattgcgccagagatcagcggagaatcgccgctgccggcacccacttttacggcatggatgtgtggggccagggcaccaccgtgaccgtgtcatctacgcgtgaggacctgaagaacgtgttcccacctgaggtggccgtgttcgagcctagcgaggccgagatcagccacacccagaaagccaccctcgtgtgcctggctaccggcttctaccccgaccatgtggaactgtcttggtgggtcaacggcaaagaggtgcacagcggcgtgtgtaccgacccccagccactgaaagaacagcccgccctgaacgacagccggtactgcctgagcagcagactgagagtgtccgccaccttctggcagaacccccggaaccacttcagatgccaggtgcagttctacggcctgagcgagaacgacgagtggacccaggacagagccaagcccgtgacccagatcgtgtctgccgaagcctggggcagagccgattgcggctttaccagcgagagctaccagcagggcgtgctgagcgccaccaacctgagcgtgatcggcttcagaatcctgctgctgaaagtggccggctttaacctgctgatgaccctgcggctgtggtccagc

SEQ ID NO: 5499 - DNA, 2274 bp, synthetic construct
  source 1..2274: mol_type = other DNA
atggccttaccagtgaccgccttgctcctgccgctggccttgctgctccacgccgccaggccggaagtgcagctggttgaatctggcggaggactggttcagcctggcggatctctgagactgtcttgtgccgccagcggcttcagcttcagcgacttttggatgagctgggtccgacaggcccctggcaaaggacttgaatgggtcgccacaatcagccaggccggcagcgagaaggactacgtggactctgtgaagggcagattcaccatcagccgggacaacgccaagaagtccctgtacctccagatgaacagcctgagagccgaggacaccgccgtgtactattgtgcctctggcgtgtacagcttcgactacagaggccagggcaccctggtcacagtctcttctggtaccggcggaggcggatctggcggcggaggtagcggtggcggaggatctgaattcgacatcctgctgacccagagccccgtgatcctgtccgtgtctcctggcgagagagtgtccttcagctgtcgggccagccagagcatcggcaccaacatccactggtatcagcagcggaccaacggcagccccagactgctgattaagtacgccagcgagtccatcagcggcatccccagcagattttccggcagcggctccggcaccgacttcaccctgagcatcaacagcgtggaaagcgaggacattgccgactactactgccagcagaacaacaactggcccaccaccttcggagccggcaccaagctggaactgaagctcgagatccagaaccctgatcctgccgtgtaccagctgcgggatagcaagagcagcgacaagagcgtgtgtctgttcaccgacttcgacagccagaccaacgtgtcccagagcaaggactccgacgtgtacatcaccgataagtgcgtgctggacatgcggagcatggacttcaagagcaactccgccgtggcctggtccaacaagtccgatttcgcctgcgccaacgccttcaacaacagcattatccccgaggacacattcttcccaagccccgagagcagctgcgacgtgaagctggtggaaaagagcttcgagacagacaccaacctgaacttccagatcctgtacgagatcctgctgggcaaggccaccctgtacgccgtgctggtgtctgccctggtgctgatggctatggtcaagcggaaggacagccggggacgcgccaagagaagcggatctggcgtgaagcagaccctgaatttcgacctgctgaagctggctggcgacgtggaatccaacccaggccctactagtatggactggatttggcgcatccttttccttgtcggcgctgctaccggcgcgcattccttcgaacaggtgcagctgaagcagagcggacctggcctggtgcagcctagccagagcctgtccatcacctgtaccgtgtccggcttcagcctgaccaactacggcgtgcactgggtgcgccagagccctggaaaaggactggaatggctgggagtgatttggagcggcggcaacaccgactacaacacccccttcaccagcagactgtctatcaacaaggacaacagcaagagccaggtgttcttcaagatgaacagcctccagagcaacgacaccgccatctactactgtgctagagccctgacctactatgactacgagttcgcctactggggccagggcacactcgtgacagtgtctgctacgcgtgaggacctgaagaacgtgttcccacctgaggtggccgtgttcgagcctagcgaggccgagatcagccacacccagaaagccaccctcgtgtgcctggctaccggcttctaccccgaccatgtggaactgtcttggtgggtcaacggcaaagaggtgcacagcggcgtgtgtaccgacccccagccactgaaagaacagcccgccctgaacgacagccggtactgcctgagcagcagactgagagtgtccgccaccttctggcagaacccccggaaccacttcagatgccaggtgcagttctacggcctgagcgagaacgacgagtggacccaggacagagccaagcccgtgacccagatcgtgtctgccgaagcctggggcagagccgattgcggctttaccagcgagagctaccagcagggcgtgctgagcgccaccaacctgagcgtgatcggcttcagaatcctgctgctgaaagtggccggctttaacctgctgatgaccctgcggctgtggtccagc

SEQ ID NO: 5500 - DNA, 2253 bp, synthetic construct
  source 1..2253: mol_type = other DNA
atggccttaccagtgaccgccttgctcctgccgctggccttgctgctccacgccgccaggccggaagtgcagctggttgaatctggcggaggactggttcagcctggcggatctctgagactgtcttgtgccgccagcggcttcagcttcagcgacttttggatgagctgggtccgacaggcccctggcaaaggacttgaatgggtcgccacaatcagccaggccggcagcgagaaggactacgtggactctgtgaagggcagattcaccatcagccgggacaacgccaagaagtccctgtacctccagatgaacagcctgagagccgaggacaccgccgtgtactattgtgcctctggcgtgtacagcttcgactacagaggccagggcaccctggtcacagtctcttctggtaccggcggaggcggatctggcggcggaggtagcggtggcggaggatctgaattcatgacccagagccccaagttcctgctggtgtctgccggcgacagagtgaccctgacatgcaaggccagccagagcgtgaacaacgacgtgtactggtatcagcaggaacccggccagtcccccaagctgctgatctactgggccagcaccagagaaagcggcgtgcccgatagattcaccggcagcggctctggcaccgacttcaccctgacaatcagcagcgtgcaggccgaggacctggccgtgtactactgcaagcagagctacaacctgtacaccttcggcggaggcaccaagctggaaatcaagagactcgagatccagaaccctgatcctgccgtgtaccagctgcgggatagcaagagcagcgacaagagcgtgtgtctgttcaccgacttcgacagccagaccaacgtgtcccagagcaaggactccgacgtgtacatcaccgataagtgcgtgctggacatgcggagcatggacttcaagagcaactccgccgtggcctggtccaacaagtccgatttcgcctgcgccaacgccttcaacaacagcattatccccgaggacacattcttcccaagccccgagagcagctgcgacgtgaagctggtggaaaagagcttcgagacagacaccaacctgaacttccagatcctgtacgagatcctgctgggcaaggccaccctgtacgccgtgctggtgtctgccctggtgctgatggctatggtcaagcggaaggacagccggggacgcgccaagagaagcggatctggcgtgaagcagaccctgaatttcgacctgctgaagctggctggcgacgtggaatccaacccaggccctactagtatggactggatttggcgcatccttttccttgtcggcgctgctaccggcgcgcattccttcgaagaatctggaagaggactggtgcagcctggcggcagcagaaagctgtcttgtgccgccagcggcttcaccttcagcaccagcggaatgcactgggtgcgccaggcccctgagaagggactggaatgggtggcctacatcagctccggcagcaccaccatctaccacgccgataccgtgaagggccggttcaccatcagccgggacaaccccaagaataccctgttcctccagatgaccagcctgcggagcgaggacaccgccatgtactattgctgcgccagaagcggccagttcggcaactacttcgactactggggccagggcaccaccctgaccgtgtcatctacgcgtgaggacctgaagaacgtgttcccacctgaggtggccgtgttcgagcctagcgaggccgagatcagccacacccagaaagccaccctcgtgtgcctggctaccggcttctaccccgaccatgtggaactgtcttggtgggtcaacggcaaagaggtgcacagcggcgtgtgtaccgacccccagccactgaaagaacagcccgccctgaacgacagccggtactgcctgagcagcagactgagagtgtccgccaccttctggcagaacccccggaaccacttcagatgccaggtgcagttctacggcctgagcgagaacgacgagtggacccaggacagagccaagcccgtgacccagatcgtgtctgccgaagcctggggcagagccgattgcggctttaccagcgagagctaccagcagggcgtgctgagcgccaccaacctgagcgtgatcggcttcagaatcctgctgctgaaagtggccggctttaacctgctgatgaccctgcggctgtggtccagc

SEQ ID NO: 5501 - DNA, 2268 bp, synthetic construct
  source 1..2268: mol_type = other DNA
atggccttaccagtgaccgccttgctcctgccgctggccttgctgctccacgccgccaggccggaagtgcagctggttgaatctggcggaggactggttcagcctggcggatctctgagactgtcttgtgccgccagcggcttcagcttcagcgacttttggatgagctgggtccgacaggcccctggcaaaggacttgaatgggtcgccacaatcagccaggccggcagcgagaaggactacgtggactctgtgaagggcagattcaccatcagccgggacaacgccaagaagtccctgtacctccagatgaacagcctgagagccgaggacaccgccgtgtactattgtgcctctggcgtgtacagcttcgactacagaggccagggcaccctggtcacagtctcttctggtaccggcggaggcggatctggcggcggaggtagcggtggcggaggatctgaattccagagcccatctagcctggctgtgtctgccggcgagaaagtgaccatgagctgcaagagcagccagagcctgctgaacagccggacccggaagaactacctggcctggtatcagcagaagcccggccagagccccaagctgctgatctactgggccagcaccagagaaagcggcgtgcccgatagattcaccggctctggcagcggcaccgacttcaccctgacaatcagcagcgtgcaggccgaggacctggccgtgtactactgcaagcagagcaacctgtacaccttcggcggaggcaccaagctggaaatcaagctcgagatccagaaccctgatcctgccgtgtaccagctgcgggatagcaagagcagcgacaagagcgtgtgtctgttcaccgacttcgacagccagaccaacgtgtcccagagcaaggactccgacgtgtacatcaccgataagtgcgtgctggacatgcggagcatggacttcaagagcaactccgccgtggcctggtccaacaagtccgatttcgcctgcgccaacgccttcaacaacagcattatccccgaggacacattcttcccaagccccgagagcagctgcgacgtgaagctggtggaaaagagcttcgagacagacaccaacctgaacttccagatcctgtacgagatcctgctgggcaaggccaccctgtacgccgtgctggtgtctgccctggtgctgatggctatggtcaagcggaaggacagccggggacgcgccaagagaagcggatctggcgtgaagcagaccctgaatttcgacctgctgaagctggctggcgacgtggaatccaacccaggccctactagtatggactggatttggcgcatccttttccttgtcggcgctgctaccggcgcgcattccttcgaacaggtgcagctggaagagtctggacccgagcttgtgaagcctggggccagcgtgaagctgtcctgtaaagccagcggctacaccttcaccgagtacatcatccactgggtcaagcagcggagcggccagggcctggaatggatcggctggttttaccctggctccggcagcatcaagtacaacgagaagttcaaggacaaggccaccctgaccgccgacaagtccagcagcaccgtgtacatggaactgagcggcctgaccagcgaggacagcgccgtgtatttctgcgccagacacgacggctacagctacttcgactattggggccagggcaccacactgaccgtgtcctctacgcgtgaggacctgaagaacgtgttcccacctgaggtggccgtgttcgagcctagcgaggccgagatcagccacacccagaaagccaccctcgtgtgcctggctaccggcttctaccccgaccatgtggaactgtcttggtgggtcaacggcaaagaggtgcacagcggcgtgtgtaccgacccccagccactgaaagaacagcccgccctgaacgacagccggtactgcctgagcagcagactgagagtgtccgccaccttctggcagaacccccggaaccacttcagatgccaggtgcagttctacggcctgagcgagaacgacgagtggacccaggacagagccaagcccgtgacccagatcgtgtctgccgaagcctggggcagagccgattgcggctttaccagcgagagctaccagcagggcgtgctgagcgccaccaacctgagcgtgatcggcttcagaatcctgctgctgaaagtggccggctttaacctgctgatgaccctgcggctgtggtccagc

SEQ ID NO: 5502 - DNA, 2277 bp, synthetic construct
  source 1..2277: mol_type = other DNA
atggccttaccagtgaccgccttgctcctgccgctggccttgctgctccacgccgccaggccggaagtgcagctggttgaatctggcggaggactggttcagcctggcggatctctgagactgtcttgtgccgccagcggcttcagcttcagcgacttttggatgagctgggtccgacaggcccctggcaaaggacttgaatgggtcgccacaatcagccaggccggcagcgagaaggactacgtggactctgtgaagggcagattcaccatcagccgggacaacgccaagaagtccctgtacctccagatgaacagcctgagagccgaggacaccgccgtgtactattgtgcctctggcgtgtacagcttcgactacagaggccagggcaccctggtcacagtctcttctggtaccggcggaggcggatctggcggcggaggtagcggtggcggaggatctgaattcgacatccagatgacccagagccccagcagcctgtctgcctctctgggcgagagagtgtccctgacctgtcgggccacacaggaactgagcggctacctgtcttggctgcagcagaagcccgacggcaccatcaagcggctgatctacgccgccagcaccctggatagcggcgtgcccaagagattcagcggcaacagaagcggcagcgactacagcctgaccatcagctccctggaaagcgaggacttcgccgactactactgcctgcagtacgccatctacccctacaccttcggcggaggcaccaagctggaaatcaagctcgagatccagaaccctgatcctgccgtgtaccagctgcgggatagcaagagcagcgacaagagcgtgtgtctgttcaccgacttcgacagccagaccaacgtgtcccagagcaaggactccgacgtgtacatcaccgataagtgcgtgctggacatgcggagcatggacttcaagagcaactccgccgtggcctggtccaacaagtccgatttcgcctgcgccaacgccttcaacaacagcattatccccgaggacacattcttcccaagccccgagagcagctgcgacgtgaagctggtggaaaagagcttcgagacagacaccaacctgaacttccagatcctgtacgagatcctgctgggcaaggccaccctgtacgccgtgctggtgtctgccctggtgctgatggctatggtcaagcggaaggacagccggggacgcgccaagagaagcggatctggcgtgaagcagaccctgaatttcgacctgctgaagctggctggcgacgtggaatccaacccaggccctactagtatggactggatttggcgcatccttttccttgtcggcgctgctaccggcgcgcattccttcgaagaggtgcaactgcagcagtctggccccgagcttgtgaagcctggcgcctccgtgaagatgagctgcaaggccagcggctacacctttaccagctacttcatccactgggtcaagcagaaacccggccagggcctggaatggatcggcttcatcaacccttacaacgacggcagcaagtacaacgagaagttcaagggcaaggccaccctgaccagcgacaagagcagcagcaccgcctacatggaactgtccagcctgacatccgaggacagcgccgtgtactactgcaccagggacgacggctactacggctacgccatggactactggggccagggaacaagcgtcaccgtgtcctctacgcgtgaggacctgaagaacgtgttcccacctgaggtggccgtgttcgagcctagcgaggccgagatcagccacacccagaaagccaccctcgtgtgcctggctaccggcttctaccccgaccatgtggaactgtcttggtgggtcaacggcaaagaggtgcacagcggcgtgtgtaccgacccccagccactgaaagaacagcccgccctgaacgacagccggtactgcctgagcagcagactgagagtgtccgccaccttctggcagaacccccggaaccacttcagatgccaggtgcagttctacggcctgagcgagaacgacgagtggacccaggacagagccaagcccgtgacccagatcgtgtctgccgaagcctggggcagagccgattgcggctttaccagcgagagctaccagcagggcgtgctgagcgccaccaacctgagcgtgatcggcttcagaatcctgctgctgaaagtggccggctttaacctgctgatgaccctgcggctgtggtccagc

SEQ ID NO: 5503 - DNA, 2292 bp, synthetic construct
  source 1..2292: mol_type = other DNA
atggccttaccagtgaccgccttgctcctgccgctggccttgctgctccacgccgccaggccggaagtgcagctggttgaatctggcggaggactggttcagcctggcggatctctgagactgtcttgtgccgccagcggcttcagcttcagcgacttttggatgagctgggtccgacaggcccctggcaaaggacttgaatgggtcgccacaatcagccaggccggcagcgagaaggactacgtggactctgtgaagggcagattcaccatcagccgggacaacgccaagaagtccctgtacctccagatgaacagcctgagagccgaggacaccgccgtgtactattgtgcctctggcgtgtacagcttcgactacagaggccagggcaccctggtcacagtctcttctggtaccggcggaggcggatctggcggcggaggtagcggtggcggaggatctgaattcgacaccatcgtgctgacacagagccctgcttccctggccgtgtccctgggacagagagccaccatctcttgcagagccagcgagagcgtggacagctacggcaacagcttcatgcactggtatcagcagaagcccggccagccccccaagctgctgatctacctggcctccaacctggaaagcggcgtgcccgccagattttctggcagcggcagcagaaccgacttcaccctgaccatcgaccccgtggaagccgatgatgccgccacctactactgccagcagaacaactacgacccctggaccttcggcggaggcaccaagctggaaatcaagctcgagatccagaaccctgatcctgccgtgtaccagctgcgggatagcaagagcagcgacaagagcgtgtgtctgttcaccgacttcgacagccagaccaacgtgtcccagagcaaggactccgacgtgtacatcaccgataagtgcgtgctggacatgcggagcatggacttcaagagcaactccgccgtggcctggtccaacaagtccgatttcgcctgcgccaacgccttcaacaacagcattatccccgaggacacattcttcccaagccccgagagcagctgcgacgtgaagctggtggaaaagagcttcgagacagacaccaacctgaacttccagatcctgtacgagatcctgctgggcaaggccaccctgtacgccgtgctggtgtctgccctggtgctgatggctatggtcaagcggaaggacagccggggacgcgccaagagaagcggatctggcgtgaagcagaccctgaatttcgacctgctgaagctggctggcgacgtggaatccaacccaggccctactagtatggactggatttggcgcatccttttccttgtcggcgctgctaccggcgcgcattccttcgaagaagtgcaactccagcagagcggccctgagcttgtgaagcctggcgcttccgtgaagatgagctgcaaggccagcggctacaccttcaccagctacgtgatgcactgggtcaagcagaaacctggacagggcctggaatggatcggctacatcaacccctacaacgacggcaccaagtacaacgagaagttcaagggcaaggccaccctgacaagcgacaccagcagcagcaccgcctacatggaactgaacagcctgaccagcgaggacagcgccgtgtacttctgcgccagacccatctacttcgacaacgactacttcgattactggggccagggcaccaccctgaaggtgtcctctacgcgtgaggacctgaagaacgtgttcccacctgaggtggccgtgttcgagcctagcgaggccgagatcagccacacccagaaagccaccctcgtgtgcctggctaccggcttctaccccgaccatgtggaactgtcttggtgggtcaacggcaaagaggtgcacagcggcgtgtgtaccgacccccagccactgaaagaacagcccgccctgaacgacagccggtactgcctgagcagcagactgagagtgtccgccaccttctggcagaacccccggaaccacttcagatgccaggtgcagttctacggcctgagcgagaacgacgagtggacccaggacagagccaagcccgtgacccagatcgtgtctgccgaagcctggggcagagccgattgcggctttaccagcgagagctaccagcagggcgtgctgagcgccaccaacctgagcgtgatcggcttcagaatcctgctgctgaaagtggccggctttaacctgctgatgaccctgcggctgtggtccagc

SEQ ID NO: 5504 - DNA, 2277 bp, synthetic construct
  source 1..2277: mol_type = other DNA
atggccttaccagtgaccgccttgctcctgccgctggccttgctgctccacgccgccaggccggaagtgcagctggttgaatctggcggaggactggttcagcctggcggatctctgagactgtcttgtgccgccagcggcttcagcttcagcgacttttggatgagctgggtccgacaggcccctggcaaaggacttgaatgggtcgccacaatcagccaggccggcagcgagaaggactacgtggactctgtgaagggcagattcaccatcagccgggacaacgccaagaagtccctgtacctccagatgaacagcctgagagccgaggacaccgccgtgtactattgtgcctctggcgtgtacagcttcgactacagaggccagggcaccctggtcacagtctcttctggtaccggcggaggcggatctggcggcggaggtagcggtggcggaggatctgaattcgacatccagatgacccagagccccagcagcctgtctgccagcgtgggcgacagagtgaccatcacatgcaaggccagccaggacgtgggaatcgccgtggcctggtatcagcagaaacccggcaaggtgcccaagctgctgatctactgggccagcaccagacacaccggcgtgcccgatagattttccggcagcggctccggcaccgacttcaccctgacaatcagctccctccagcccgaggacgtggcaacctactactgccagcagtacagcagctacccctacaccttcggccagggcaccaaggtggaaatcaagagactcgagatccagaaccctgatcctgccgtgtaccagctgcgggatagcaagagcagcgacaagagcgtgtgtctgttcaccgacttcgacagccagaccaacgtgtcccagagcaaggactccgacgtgtacatcaccgataagtgcgtgctggacatgcggagcatggacttcaagagcaactccgccgtggcctggtccaacaagtccgatttcgcctgcgccaacgccttcaacaacagcattatccccgaggacacattcttcccaagccccgagagcagctgcgacgtgaagctggtggaaaagagcttcgagacagacaccaacctgaacttccagatcctgtacgagatcctgctgggcaaggccaccctgtacgccgtgctggtgtctgccctggtgctgatggctatggtcaagcggaaggacagccggggacgcgccaagagaagcggatctggcgtgaagcagaccctgaatttcgacctgctgaagctggctggcgacgtggaatccaacccaggccctactagtatggactggatttggcgcatccttttccttgtcggcgctgctaccggcgcgcattccttcgaagaagtgcaactggtggaatcaggcggcggactggtgcagcctggcggatctctgagactgagctgtgccgccagcggcttcgacttcagccggtactggatgagctgggtgcgccaggcccctggcaaaggactggaatggatcggcgagatcaaccccgacagcagcaccatcaactacgcccccagcctgaaggacaagttcatcatcagccgggacaacgccaagaacagcctgtacctccagatgaactccctgcgggccgaggacaccgccgtgtactattgcgccagacccgacggcaactactggtacttcgacgtgtggggccagggaaccctcgtgaccgtgtcatctacgcgtgaggacctgaagaacgtgttcccacctgaggtggccgtgttcgagcctagcgaggccgagatcagccacacccagaaagccaccctcgtgtgcctggctaccggcttctaccccgaccatgtggaactgtcttggtgggtcaacggcaaagaggtgcacagcggcgtgtgtaccgacccccagccactgaaagaacagcccgccctgaacgacagccggtactgcctgagcagcagactgagagtgtccgccaccttctggcagaacccccggaaccacttcagatgccaggtgcagttctacggcctgagcgagaacgacgagtggacccaggacagagccaagcccgtgacccagatcgtgtctgccgaagcctggggcagagccgattgcggctttaccagcgagagctaccagcagggcgtgctgagcgccaccaacctgagcgtgatcggcttcagaatcctgctgctgaaagtggccggctttaacctgctgatgaccctgcggctgtggtccagc

SEQ ID NO: 5505 - DNA, 2277 bp, synthetic construct
  source 1..2277: mol_type = other DNA
atggccttaccagtgaccgccttgctcctgccgctggccttgctgctccacgccgccaggccggaagtgcagctggttgaatctggcggaggactggttcagcctggcggatctctgagactgtcttgtgccgccagcggcttcagcttcagcgacttttggatgagctgggtccgacaggcccctggcaaaggacttgaatgggtcgccacaatcagccaggccggcagcgagaaggactacgtggactctgtgaagggcagattcaccatcagccgggacaacgccaagaagtccctgtacctccagatgaacagcctgagagccgaggacaccgccgtgtactattgtgcctctggcgtgtacagcttcgactacagaggccagggcaccctggtcacagtctcttctggtaccggcggaggcggatctggcggcggaggtagcggtggcggaggatctgaattcgacatcgtgatgacccagagccagaagagcatgagcaccagcgtgggcgacagagtgagcatcacctgcaaggccagccaggacgtgatcaccggcgtggcctggtaccagcagaagcccggccagagccccaagctgctgatctacagcgccagctacagatacaccggcgtgcccgacagattcaccggcagcggcagcggcaccgacttcaccttcaccatcagcaacgtgcaggccgaggacctggccgtgtactactgccagcagcactacagcacccccctgaccttcggcgccggcaccaagctggagctgaagctcgagatccagaaccctgatcctgccgtgtaccagctgcgggatagcaagagcagcgacaagagcgtgtgtctgttcaccgacttcgacagccagaccaacgtgtcccagagcaaggactccgacgtgtacatcaccgataagtgcgtgctggacatgcggagcatggacttcaagagcaactccgccgtggcctggtccaacaagtccgatttcgcctgcgccaacgccttcaacaacagcattatccccgaggacacattcttcccaagccccgagagcagctgcgacgtgaagctggtggaaaagagcttcgagacagacaccaacctgaacttccagatcctgtacgagatcctgctgggcaaggccaccctgtacgccgtgctggtgtctgccctggtgctgatggctatggtcaagcggaaggacagccggggacgcgccaagagaagcggatctggcgtgaagcagaccctgaatttcgacctgctgaagctggctggcgacgtggaatccaacccaggccctactagtatggactggatttggcgcatccttttccttgtcggcgctgctaccggcgcgcattccttcgaacaggtgcagctgcagcagcccggcgccgagctggtgagacccggcgccagcgtgaagctgagctgcaaggccagcggctacagcttcaccacctactggatgaactgggtgaagcagagacccggccagggcctggagtggatcggcatgatccaccccagcgacagcgagaccagactgaaccagaagttcaaggacaaggccaccctgaccgtggacaagagcagcagcaccgcctacatgcagctgagcagccccaccagcgaggacagcgccgtgtactactgcgccagaagcaccatgatcgccaccagagccatggactactggggccagggcaccagcgtgaccgtgagcagcacgcgtgaggacctgaagaacgtgttcccacctgaggtggccgtgttcgagcctagcgaggccgagatcagccacacccagaaagccaccctcgtgtgcctggctaccggcttctaccccgaccatgtggaactgtcttggtgggtcaacggcaaagaggtgcacagcggcgtgtgtaccgacccccagccactgaaagaacagcccgccctgaacgacagccggtactgcctgagcagcagactgagagtgtccgccaccttctggcagaacccccggaaccacttcagatgccaggtgcagttctacggcctgagcgagaacgacgagtggacccaggacagagccaagcccgtgacccagatcgtgtctgccgaagcctggggcagagccgattgcggctttaccagcgagagctaccagcagggcgtgctgagcgccaccaacctgagcgtgatcggcttcagaatcctgctgctgaaagtggccggctttaacctgctgatgaccctgcggctgtggtccagc

SEQ ID NO: 5506 - DNA, 2295 bp, synthetic construct
  source 1..2295: mol_type = other DNA
atggccttaccagtgaccgccttgctcctgccgctggccttgctgctccacgccgccaggccggaagtgcagctggttgaatctggcggaggactggttcagcctggcggatctctgagactgtcttgtgccgccagcggcttcagcttcagcgacttttggatgagctgggtccgacaggcccctggcaaaggacttgaatgggtcgccacaatcagccaggccggcagcgagaaggactacgtggactctgtgaagggcagattcaccatcagccgggacaacgccaagaagtccctgtacctccagatgaacagcctgagagccgaggacaccgccgtgtactattgtgcctctggcgtgtacagcttcgactacagaggccagggcaccctggtcacagtctcttctggtaccggcggaggcggatctggcggcggaggtagcggtggcggaggatctgaattccagagcgtgctgacacagcctccatccgtgtctggcgctccaggccagagagtgaccatctcctgtaccggcagcggcagcaacatcggagccccctacgacgtgtcctggtatcagcaactgcctggcaccgcccccaagctgctgatctaccacaacaacaagcggcccagcggcgtgcccgatagattcagcggctctaagagcggcaccagcgccagcctggctatcactggactccaggccgaggacgaggccgactactactgtgccacagtggaagccggcctgagcggctctgtgtttggcggcggaacaaagctgaccgtgctgggagctctcgagatccagaaccctgatcctgccgtgtaccagctgcgggatagcaagagcagcgacaagagcgtgtgtctgttcaccgacttcgacagccagaccaacgtgtcccagagcaaggactccgacgtgtacatcaccgataagtgcgtgctggacatgcggagcatggacttcaagagcaactccgccgtggcctggtccaacaagtccgatttcgcctgcgccaacgccttcaacaacagcattatccccgaggacacattcttcccaagccccgagagcagctgcgacgtgaagctggtggaaaagagcttcgagacagacaccaacctgaacttccagatcctgtacgagatcctgctgggcaaggccaccctgtacgccgtgctggtgtctgccctggtgctgatggctatggtcaagcggaaggacagccggggacgcgccaagagaagcggatctggcgtgaagcagaccctgaatttcgacctgctgaagctggctggcgacgtggaatccaacccaggccctactagtatggactggatttggcgcatccttttccttgtcggcgctgctaccggcgcgcattccttcgaacaggtgcaactggtgcagagcggagccgaagtgaagaaacctggggccagcgtgaaggtgtcctgcaaggtgtccggctacaccctgaccgagctgagcattcactgggtgcgccaggcccctggcaagggactggaatggatgggcggcttcgaccccgaagagaacgagatcgtgtacgcccagcggttccagggcagagtgacaatgaccgaggacaccagcaccgacaccgcctacatggaactgagcagcctgcggagcgaggataccgccgtgtactactgcgccatcgtgggcagcttcagccctctgacactgggcctgtggggccagggaactatggtcaccgtgtccagcacgcgtgaggacctgaagaacgtgttcccacctgaggtggccgtgttcgagcctagcgaggccgagatcagccacacccagaaagccaccctcgtgtgcctggctaccggcttctaccccgaccatgtggaactgtcttggtgggtcaacggcaaagaggtgcacagcggcgtgtgtaccgacccccagccactgaaagaacagcccgccctgaacgacagccggtactgcctgagcagcagactgagagtgtccgccaccttctggcagaacccccggaaccacttcagatgccaggtgcagttctacggcctgagcgagaacgacgagtggacccaggacagagccaagcccgtgacccagatcgtgtctgccgaagcctggggcagagccgattgcggctttaccagcgagagctaccagcagggcgtgctgagcgccaccaacctgagcgtgatcggcttcagaatcctgctgctgaaagtggccggctttaacctgctgatgaccctgcggctgtggtccagc

SEQ ID NO: 5507 - DNA, 2295 bp, synthetic construct
  source 1..2295: mol_type = other DNA
atggccttaccagtgaccgccttgctcctgccgctggccttgctgctccacgccgccaggccggaagtgcagctggttgaatctggcggaggactggttcagcctggcggatctctgagactgtcttgtgccgccagcggcttcagcttcagcgacttttggatgagctgggtccgacaggcccctggcaaaggacttgaatgggtcgccacaatcagccaggccggcagcgagaaggactacgtggactctgtgaagggcagattcaccatcagccgggacaacgccaagaagtccctgtacctccagatgaacagcctgagagccgaggacaccgccgtgtactattgtgcctctggcgtgtacagcttcgactacagaggccagggcaccctggtcacagtctcttctggtaccggcggaggcggatctggcggcggaggtagcggtggcggaggatctgaattccagagcgtgctgacacagcctccatccgtgtctggcgctccaggccagagagtgaccatctcctgtaccggcagcggcagcaacatcggagccccctacgacgtgtcctggtatcagcaactgcctggcaccgcccccaagctgctgatctaccacaacaacaagcggcccagcggcgtgcccgatagattcagcggctctaagagcggcaccagcgccagcctggctatcactggactccaggccgaggacgaggccgactactactgccagagctacgacagcagcagcatcagcaccatcttcggcggaggcaccaagctgacagtgctgggagctctcgagatccagaaccctgatcctgccgtgtaccagctgcgggatagcaagagcagcgacaagagcgtgtgtctgttcaccgacttcgacagccagaccaacgtgtcccagagcaaggactccgacgtgtacatcaccgataagtgcgtgctggacatgcggagcatggacttcaagagcaactccgccgtggcctggtccaacaagtccgatttcgcctgcgccaacgccttcaacaacagcattatccccgaggacacattcttcccaagccccgagagcagctgcgacgtgaagctggtggaaaagagcttcgagacagacaccaacctgaacttccagatcctgtacgagatcctgctgggcaaggccaccctgtacgccgtgctggtgtctgccctggtgctgatggctatggtcaagcggaaggacagccggggacgcgccaagagaagcggatctggcgtgaagcagaccctgaatttcgacctgctgaagctggctggcgacgtggaatccaacccaggccctactagtatggactggatttggcgcatccttttccttgtcggcgctgctaccggcgcgcattccttcgaacaggtgcaactggtgcagagcggagccgaagtgaagaaacctggggccagcgtgaaggtgtcctgcaaggtgtccggctacaccctgaccgagctgagcattcactgggtgcgccaggcccctggcaagggactggaatggatgggcggcttcgaccccgaagagaacgagatcgtgtacgcccagcggttccagggcagagtgacaatgaccgaggacaccagcaccgacaccgcctacatggaactgagcagcctgcggagcgaggataccgccgtgtactactgtgccatcgtgggcagcttcagcggaatcgcctacagaccttggggccagggcacaatggtcaccgtgtctagcacgcgtgaggacctgaagaacgtgttcccacctgaggtggccgtgttcgagcctagcgaggccgagatcagccacacccagaaagccaccctcgtgtgcctggctaccggcttctaccccgaccatgtggaactgtcttggtgggtcaacggcaaagaggtgcacagcggcgtgtgtaccgacccccagccactgaaagaacagcccgccctgaacgacagccggtactgcctgagcagcagactgagagtgtccgccaccttctggcagaacccccggaaccacttcagatgccaggtgcagttctacggcctgagcgagaacgacgagtggacccaggacagagccaagcccgtgacccagatcgtgtctgccgaagcctggggcagagccgattgcggctttaccagcgagagctaccagcagggcgtgctgagcgccaccaacctgagcgtgatcggcttcagaatcctgctgctgaaagtggccggctttaacctgctgatgaccctgcggctgtggtccagc

SEQ ID NO: 5508 - DNA, 2259 bp, synthetic construct
  source 1..2259: mol_type = other DNA
atggccttaccagtgaccgccttgctcctgccgctggccttgctgctccacgccgccaggccggaagtgcagctggttgaatctggcggaggactggttcagcctggcggatctctgagactgtcttgtgccgccagcggcttcagcttcagcgacttttggatgagctgggtccgacaggcccctggcaaaggacttgaatgggtcgccacaatcagccaggccggcagcgagaaggactacgtggactctgtgaagggcagattcaccatcagccgggacaacgccaagaagtccctgtacctccagatgaacagcctgagagccgaggacaccgccgtgtactattgtgcctctggcgtgtacagcttcgactacagaggccagggcaccctggtcacagtctcttctggtaccggcggaggcggatctggcggcggaggtagcggtggcggaggatctgaattcgacatccagatgacccagagccccagcagcctgtctgccagcgtgggcgacagagtgaccatcacctgtagagccagccagggcatcagaaacaacctggcctggtatcagcagaagcccggcaaggcccccaagcggctgatctacgccgccagcaatctccagagcggcgtgcccagcagattcacaggctctggcagcggcaccgagttcaccctgatcgtgtctagcctccagcccgaggacttcgccacctactactgcctccagcaccacagctaccccctgacatctggcggaggcaccaaggtggaactcgagatccagaaccctgatcctgccgtgtaccagctgcgggatagcaagagcagcgacaagagcgtgtgtctgttcaccgacttcgacagccagaccaacgtgtcccagagcaaggactccgacgtgtacatcaccgataagtgcgtgctggacatgcggagcatggacttcaagagcaactccgccgtggcctggtccaacaagtccgatttcgcctgcgccaacgccttcaacaacagcattatccccgaggacacattcttcccaagccccgagagcagctgcgacgtgaagctggtggaaaagagcttcgagacagacaccaacctgaacttccagatcctgtacgagatcctgctgggcaaggccaccctgtacgccgtgctggtgtctgccctggtgctgatggctatggtcaagcggaaggacagccggggacgcgccaagagaagcggatctggcgtgaagcagaccctgaatttcgacctgctgaagctggctggcgacgtggaatccaacccaggccctactagtatggactggatttggcgcatccttttccttgtcggcgctgctaccggcgcgcattccttcgaagaggtgcaggtgctggaaagtggcggaggactggtgcagcctggcggctctctgagactgtcttgtgccgccagcggcttcaccttcagcagctacgccatgagctgggtgcgccaggcccctggaaaaggactggaatgggtgtccgccatcagcggctctggcgggtctaccaactacgccgatagcgtgaagggccggttcaccatcagccgggacaacagcaagaacaccctgtacctccagatgaacagcctgcgggccgaggacaccgccgtgtattattgtgccggcagcagcgggtggagcgagtattggggacagggcaccctcgtgaccgtgtcctctacgcgtgaggacctgaagaacgtgttcccacctgaggtggccgtgttcgagcctagcgaggccgagatcagccacacccagaaagccaccctcgtgtgcctggctaccggcttctaccccgaccatgtggaactgtcttggtgggtcaacggcaaagaggtgcacagcggcgtgtgtaccgacccccagccactgaaagaacagcccgccctgaacgacagccggtactgcctgagcagcagactgagagtgtccgccaccttctggcagaacccccggaaccacttcagatgccaggtgcagttctacggcctgagcgagaacgacgagtggacccaggacagagccaagcccgtgacccagatcgtgtctgccgaagcctggggcagagccgattgcggctttaccagcgagagctaccagcagggcgtgctgagcgccaccaacctgagcgtgatcggcttcagaatcctgctgctgaaagtggccggctttaacctgctgatgaccctgcggctgtggtccagc

SEQ ID NO: 5509 - DNA, 2277 bp, synthetic construct
  source 1..2277: mol_type = other DNA
atggccttaccagtgaccgccttgctcctgccgctggccttgctgctccacgccgccaggccggaagtgcagctggttgaatctggcggaggactggttcagcctggcggatctctgagactgtcttgtgccgccagcggcttcagcttcagcgacttttggatgagctgggtccgacaggcccctggcaaaggacttgaatgggtcgccacaatcagccaggccggcagcgagaaggactacgtggactctgtgaagggcagattcaccatcagccgggacaacgccaagaagtccctgtacctccagatgaacagcctgagagccgaggacaccgccgtgtactattgtgcctctggcgtgtacagcttcgactacagaggccagggcaccctggtcacagtctcttctggtaccggcggaggcggatctggcggcggaggtagcggtggcggaggatctgaattcgacgagatccagctggtgcagagcggagccgaagtgaagaagcctggcgagagcctgcggatcagctgcaagggcagcggcttcaacatcgaggactactacatccactgggtgcgccagatgcccggcaagggcctggaatggatgggcagaatcgaccccgagaacgacgagactaagtacggccccatcttccagggccacgtgaccatcagcgccgacaccagcatcaacaccgtgtacctccagtggtccagcctgaaggccagcgacaccgccatgtactactgcgcctttagaggcggcgtgtactggggccagggcaccacagtgacagtgtctagcctcgagatccagaaccctgatcctgccgtgtaccagctgcgggatagcaagagcagcgacaagagcgtgtgtctgttcaccgacttcgacagccagaccaacgtgtcccagagcaaggactccgacgtgtacatcaccgataagtgcgtgctggacatgcggagcatggacttcaagagcaactccgccgtggcctggtccaacaagtccgatttcgcctgcgccaacgccttcaacaacagcattatccccgaggacacattcttcccaagccccgagagcagctgcgacgtgaagctggtggaaaagagcttcgagacagacaccaacctgaacttccagatcctgtacgagatcctgctgggcaaggccaccctgtacgccgtgctggtgtctgccctggtgctgatggctatggtcaagcggaaggacagccggggacgcgccaagagaagcggatctggcgtgaagcagaccctgaatttcgacctgctgaagctggctggcgacgtggaatccaacccaggccctactagtatggactggatttggcgcatccttttccttgtcggcgctgctaccggcgcgcattccttcgaagatgtcgtgatgacccagagccccgacagcctggctgtgtctctgggagagagagccaccatcaactgcaagtccagccagtccctgctggacagcgacggcaagacctacctgaactggctccagcagaagcccggccagccccccaagagactgatctccctggtgtccaagctggactccggcgtgcccgatagattttccggctctggcagcggcaccgacttcaccctgacaatcagctcccttcaggccgaggacgtggccgtgtactattgctggcagggcacacacttccccggcacctttggcggaggcaccaaggtggaaatcaagacgcgtgaggacctgaagaacgtgttcccacctgaggtggccgtgttcgagcctagcgaggccgagatcagccacacccagaaagccaccctcgtgtgcctggctaccggcttctaccccgaccatgtggaactgtcttggtgggtcaacggcaaagaggtgcacagcggcgtgtgtaccgacccccagccactgaaagaacagcccgccctgaacgacagccggtactgcctgagcagcagactgagagtgtccgccaccttctggcagaacccccggaaccacttcagatgccaggtgcagttctacggcctgagcgagaacgacgagtggacccaggacagagccaagcccgtgacccagatcgtgtctgccgaagcctggggcagagccgattgcggctttaccagcgagagctaccagcagggcgtgctgagcgccaccaacctgagcgtgatcggcttcagaatcctgctgctgaaagtggccggctttaacctgctgatgaccctgcggctgtggtccagc

SEQ ID NO: 5510 - DNA, 2298 bp, synthetic construct
  source 1..2298: mol_type = other DNA
atggccttaccagtgaccgccttgctcctgccgctggccttgctgctccacgccgccaggccggaagtgcagctggttgaatctggcggaggactggttcagcctggcggatctctgagactgtcttgtgccgccagcggcttcagcttcagcgacttttggatgagctgggtccgacaggcccctggcaaaggacttgaatgggtcgccacaatcagccaggccggcagcgagaaggactacgtggactctgtgaagggcagattcaccatcagccgggacaacgccaagaagtccctgtacctccagatgaacagcctgagagccgaggacaccgccgtgtactattgtgcctctggcgtgtacagcttcgactacagaggccagggcaccctggtcacagtctcttctggtaccggcggaggcggatctggcggcggaggtagcggtggcggaggatctgaattcgacgagcttgtgatgacccagagccccagcagcctgacagtgacagccggcgagaaagtgaccatgagctgcaagagcagccagagcctgctgaacagcggcaaccagaagaactacctgacctggtatcagcagaagcccggccagccccccaagctgctgatctactgggccagcaccagagaaagcggcgtgcccgatagattcaccggctctggcagcggcaccgacttcaccctgacaatcagcagcgtgcaggccgaggacctggccgtgtactactgccagaacgactacagctaccccctgaccttcggagccggcaccaagctggaaatcaagctcgagatccagaaccctgatcctgccgtgtaccagctgcgggatagcaagagcagcgacaagagcgtgtgtctgttcaccgacttcgacagccagaccaacgtgtcccagagcaaggactccgacgtgtacatcaccgataagtgcgtgctggacatgcggagcatggacttcaagagcaactccgccgtggcctggtccaacaagtccgatttcgcctgcgccaacgccttcaacaacagcattatccccgaggacacattcttcccaagccccgagagcagctgcgacgtgaagctggtggaaaagagcttcgagacagacaccaacctgaacttccagatcctgtacgagatcctgctgggcaaggccaccctgtacgccgtgctggtgtctgccctggtgctgatggctatggtcaagcggaaggacagccggggacgcgccaagagaagcggatctggcgtgaagcagaccctgaatttcgacctgctgaagctggctggcgacgtggaatccaacccaggccctactagtatggactggatttggcgcatccttttccttgtcggcgctgctaccggcgcgcattccttcgaagaagtgcagctgctggaacagtctggcgccgaacttgtgcggcctggcaccagcgtgaagatcagctgtaaagccagcggctacgccttcaccaactactggctgggctgggtcaagcagaggcctggacacggcctggaatggatcggcgacatctttcccggctccggcaacatccactacaacgagaagttcaagggcaaggccaccctgaccgccgacaagtctagcagcaccgcctacatgcagctgtccagcctgacctttgaggacagcgccgtgtatttctgtgcccggctgcggaactgggacgagcccatggattattggggccagggcaccaccgtgaccgtgtctagtacgcgtgaggacctgaagaacgtgttcccacctgaggtggccgtgttcgagcctagcgaggccgagatcagccacacccagaaagccaccctcgtgtgcctggctaccggcttctaccccgaccatgtggaactgtcttggtgggtcaacggcaaagaggtgcacagcggcgtgtgtaccgacccccagccactgaaagaacagcccgccctgaacgacagccggtactgcctgagcagcagactgagagtgtccgccaccttctggcagaacccccggaaccacttcagatgccaggtgcagttctacggcctgagcgagaacgacgagtggacccaggacagagccaagcccgtgacccagatcgtgtctgccgaagcctggggcagagccgattgcggctttaccagcgagagctaccagcagggcgtgctgagcgccaccaacctgagcgtgatcggcttcagaatcctgctgctgaaagtggccggctttaacctgctgatgaccctgcggctgtggtccagc

SEQ ID NO: 5511 - DNA, 2301 bp, synthetic construct
  source 1..2301: mol_type = other DNA
atggccttaccagtgaccgccttgctcctgccgctggccttgctgctccacgccgccaggccggaagtgcagctggttgaatctggcggaggactggttcagcctggcggatctctgagactgtcttgtgccgccagcggcttcagcttcagcgacttttggatgagctgggtccgacaggcccctggcaaaggacttgaatgggtcgccacaatcagccaggccggcagcgagaaggactacgtggactctgtgaagggcagattcaccatcagccgggacaacgccaagaagtccctgtacctccagatgaacagcctgagagccgaggacaccgccgtgtactattgtgcctctggcgtgtacagcttcgactacagaggccagggcaccctggtcacagtctcttctggtaccggcggaggcggatctggcggcggaggtagcggtggcggaggatctgaattcgacgagctgcagatgacccagagccctagcagcctgtctgccagcgtgggcgacagagtgaccatcacctgtagagccagccagagcatcagcagctacctgaactggtatcagcagaagcccggccagccccccaaactgctgatctactgggccagcaccagagaaagcggcgtgcccgatagattcagcggcagcgagagcggcaccaactacaccctgaccatcagctccctgcagcccgaggacttcgccacctacttttgccagcagagcgacagcctgcccatcacctttggacagggcacccggctggacattcagctcgagatccagaaccctgatcctgccgtgtaccagctgcgggatagcaagagcagcgacaagagcgtgtgtctgttcaccgacttcgacagccagaccaacgtgtcccagagcaaggactccgacgtgtacatcaccgataagtgcgtgctggacatgcggagcatggacttcaagagcaactccgccgtggcctggtccaacaagtccgatttcgcctgcgccaacgccttcaacaacagcattatccccgaggacacattcttcccaagccccgagagcagctgcgacgtgaagctggtggaaaagagcttcgagacagacaccaacctgaacttccagatcctgtacgagatcctgctgggcaaggccaccctgtacgccgtgctggtgtctgccctggtgctgatggctatggtcaagcggaaggacagccggggacgcgccaagagaagcggatctggcgtgaagcagaccctgaatttcgacctgctgaagctggctggcgacgtggaatccaacccaggccctactagtatggactggatttggcgcatccttttccttgtcggcgctgctaccggcgcgcattccttcgaagaggtgcaactgctggaatctgggggcggagtggtgcagcctggcagaagcctgagactgagctgtgccgccagcggcttcaccttcagctcctacggaatgcactgggtgcgccaggcccctggcaaaggactggaatgggtggccgtgatctcctacgacggcagcaacaagtactacgccgacagcgtgaagggccggttcaccatcagccgggacaacagcaagaacaccctgtacctgcagatgaacagcctgcgggccgaggacaccgccgtgtactactgcgccaaggatatgggctggggcagcggctggcggccttactactactacggcatggacgtgtggggccagggcaccaccgtgacagtgtcatctacgcgtgaggacctgaagaacgtgttcccacctgaggtggccgtgttcgagcctagcgaggccgagatcagccacacccagaaagccaccctcgtgtgcctggctaccggcttctaccccgaccatgtggaactgtcttggtgggtcaacggcaaagaggtgcacagcggcgtgtgtaccgacccccagccactgaaagaacagcccgccctgaacgacagccggtactgcctgagcagcagactgagagtgtccgccaccttctggcagaacccccggaaccacttcagatgccaggtgcagttctacggcctgagcgagaacgacgagtggacccaggacagagccaagcccgtgacccagatcgtgtctgccgaagcctggggcagagccgattgcggctttaccagcgagagctaccagcagggcgtgctgagcgccaccaacctgagcgtgatcggcttcagaatcctgctgctgaaagtggccggctttaacctgctgatgaccctgcggctgtggtccagc

SEQ ID NO: 5512 - DNA, 2292 bp, synthetic construct
  source 1..2292: mol_type = other DNA
atggccttaccagtgaccgccttgctcctgccgctggccttgctgctccacgccgccaggccggaagtgcagctggttgaatctggcggaggactggttcagcctggcggatctctgagactgtcttgtgccgccagcggcttcagcttcagcgacttttggatgagctgggtccgacaggcccctggcaaaggacttgaatgggtcgccacaatcagccaggccggcagcgagaaggactacgtggactctgtgaagggcagattcaccatcagccgggacaacgccaagaagtccctgtacctccagatgaacagcctgagagccgaggacaccgccgtgtactattgtgcctctggcgtgtacagcttcgactacagaggccagggcaccctggtcacagtctcttctggtaccggcggaggcggatctggcggcggaggtagcggtggcggaggatctgaattcgacgacatccaaatgacacagagtccttctagtttgagtgcgagcgtgggggacagggtgaccattacctgcagggccagccagagcataagctcataccttaattggtaccagcaaaaaccaggtaaggcccctaagctcctgatctacgcggcctcttcacttcaatctggggtcccttcccgcttcagtggctccggcagcggcaccgacttcacgctcactatatcaagtctgcagcctgaggatctcgccacctattactgtcaacaaagttattccacccctttcacctttggaccgggcacgaaagtggatattaagctcgagatccagaaccctgatcctgccgtgtaccagctgcgggatagcaagagcagcgacaagagcgtgtgtctgttcaccgacttcgacagccagaccaacgtgtcccagagcaaggactccgacgtgtacatcaccgataagtgcgtgctggacatgcggagcatggacttcaagagcaactccgccgtggcctggtccaacaagtccgatttcgcctgcgccaacgccttcaacaacagcattatccccgaggacacattcttcccaagccccgagagcagctgcgacgtgaagctggtggaaaagagcttcgagacagacaccaacctgaacttccagatcctgtacgagatcctgctgggcaaggccaccctgtacgccgtgctggtgtctgccctggtgctgatggctatggtcaagcggaaggacagccggggacgcgccaagagaagcggatctggcgtgaagcagaccctgaatttcgacctgctgaagctggctggcgacgtggaatccaacccaggccctactagtatggactggatttggcgcatccttttccttgtcggcgctgctaccggcgcgcattccttcgaagtgcacgaggtccagcttgtgcagtccggggcagaggtcaagaagcctggttctagcgtaaaagtgagttgcaaagcctcaggtgggacattttcatcctacgcgatcagttgggttagacaggctcctggtcaagggctggaatggatgggcggaattattccaatcttcggaacagcgaattacgcgcagaagttccagggtagagtaaccatcactgctgacaagtccacctccaccgcatacatggaattgtctagtctccggagcgaggatacggcggtgtattattgtgctacgttcgccctgtttggcttccgcgaacaggctttcgacatctgggggcagggcacgacagtcacggttagtagtacgcgtgaggacctgaagaacgtgttcccacctgaggtggccgtgttcgagcctagcgaggccgagatcagccacacccagaaagccaccctcgtgtgcctggctaccggcttctaccccgaccatgtggaactgtcttggtgggtcaacggcaaagaggtgcacagcggcgtgtgtaccgacccccagccactgaaagaacagcccgccctgaacgacagccggtactgcctgagcagcagactgagagtgtccgccaccttctggcagaacccccggaaccacttcagatgccaggtgcagttctacggcctgagcgagaacgacgagtggacccaggacagagccaagcccgtgacccagatcgtgtctgccgaagcctggggcagagccgattgcggctttaccagcgagagctaccagcagggcgtgctgagcgccaccaacctgagcgtgatcggcttcagaatcctgctgctgaaagtggccggctttaacctgctgatgaccctgcggctgtggtccagc

SEQ ID NO: 5513 - DNA, 2286 bp, synthetic construct
  source 1..2286: mol_type = other DNA
atggccttaccagtgaccgccttgctcctgccgctggccttgctgctccacgccgccaggccggaagtgcagctggttgaatctggcggaggactggttcagcctggcggatctctgagactgtcttgtgccgccagcggcttcagcttcagcgacttttggatgagctgggtccgacaggcccctggcaaaggacttgaatgggtcgccacaatcagccaggccggcagcgagaaggactacgtggactctgtgaagggcagattcaccatcagccgggacaacgccaagaagtccctgtacctccagatgaacagcctgagagccgaggacaccgccgtgtactattgtgcctctggcgtgtacagcttcgactacagaggccagggcaccctggtcacagtctcttctggtaccggcggaggcggatctggcggcggaggtagcggtggcggaggatctgaattcgacatcgtgctgacccagagccctctgagcctggccgtgtctctgggacagcctgccatcatcagctgcaaggccagccagagcgtgtcctttgccggcacctctctgatgcactggtatcaccagaagcccggccagcagcccagactgctgatctacagagccagcaacctggaagccggcgtgcccgatagattttccggcagcggcagcaagaccgacttcaccctgaccatcagccccgtggaagccgaagatgccgccacctactactgccagcagagcagagagtacccctacaccttcggcggaggcaccaagctggaaatcaagaggctcgagatccagaaccctgatcctgccgtgtaccagctgcgggatagcaagagcagcgacaagagcgtgtgtctgttcaccgacttcgacagccagaccaacgtgtcccagagcaaggactccgacgtgtacatcaccgataagtgcgtgctggacatgcggagcatggacttcaagagcaactccgccgtggcctggtccaacaagtccgatttcgcctgcgccaacgccttcaacaacagcattatccccgaggacacattcttcccaagccccgagagcagctgcgacgtgaagctggtggaaaagagcttcgagacagacaccaacctgaacttccagatcctgtacgagatcctgctgggcaaggccaccctgtacgccgtgctggtgtctgccctggtgctgatggctatggtcaagcggaaggacagccggggacgcgccaagagaagcggatctggcgtgaagcagaccctgaatttcgacctgctgaagctggctggcgacgtggaatccaacccaggccctactagtatggactggatttggcgcatccttttccttgtcggcgctgctaccggcgcgcattccttcgaacaggtccaactggtgcagagcggagccgaggtcgtgaagcctggcgcttccgtgaagattagctgcaaagccagcggctacacctttaccggctactttatgaactgggtcaagcagagccctggccagagcctggaatggatcggcagaatccacccctacgacggcgacaccttctacaaccagaagttccagggcaaggccaccctgacagtggacaagagcagcaacaccgcccacatggaactgctgagcctgaccagcgaggacttcgccgtgtactactgcaccagatacgacggcagccgggctatggactattggggccagggcaccaccgtgaccgtgtctagtacgcgtgaggacctgaagaacgtgttcccacctgaggtggccgtgttcgagcctagcgaggccgagatcagccacacccagaaagccaccctcgtgtgcctggctaccggcttctaccccgaccatgtggaactgtcttggtgggtcaacggcaaagaggtgcacagcggcgtgtgtaccgacccccagccactgaaagaacagcccgccctgaacgacagccggtactgcctgagcagcagactgagagtgtccgccaccttctggcagaacccccggaaccacttcagatgccaggtgcagttctacggcctgagcgagaacgacgagtggacccaggacagagccaagcccgtgacccagatcgtgtctgccgaagcctggggcagagccgattgcggctttaccagcgagagctaccagcagggcgtgctgagcgccaccaacctgagcgtgatcggcttcagaatcctgctgctgaaagtggccggctttaacctgctgatgaccctgcggctgtggtccagc

SEQ ID NO: 5514 - DNA, 2277 bp, synthetic construct
  source 1..2277: mol_type = other DNA
atggccttaccagtgaccgccttgctcctgccgctggccttgctgctccacgccgccaggccggaagtgcagctggttgaatctggcggaggactggttcagcctggcggatctctgagactgtcttgtgccgccagcggcttcagcttcagcgacttttggatgagctgggtccgacaggcccctggcaaaggacttgaatgggtcgccacaatcagccaggccggcagcgagaaggactacgtggactctgtgaagggcagattcaccatcagccgggacaacgccaagaagtccctgtacctccagatgaacagcctgagagccgaggacaccgccgtgtactattgtgcctctggcgtgtacagcttcgactacagaggccagggcaccctggtcacagtctcttctggtaccggcggaggcggatctggcggcggaggtagcggtggcggaggatctgaattcgacgacgttgtgatgacccagacccccctgagcctgcctgtgacacctggcgaacctgccagcatcagctgtcggagcagccagagcctggtgcacagaaacggcaacacctacctgcactggtatctccagaagcccggccagagccccaagctgctgatccacaaggtgtccaacagattcagcggcgtgcccgacagattctccggcagcggctctggcaccgacttcaccctgaagatcagccgggtggaagccgaggacctgggcgtgtacttctgtagccagagcacccatgtgccccccctgacatttggagccggcaccaagctggaactgaagctcgagatccagaaccctgatcctgccgtgtaccagctgcgggatagcaagagcagcgacaagagcgtgtgtctgttcaccgacttcgacagccagaccaacgtgtcccagagcaaggactccgacgtgtacatcaccgataagtgcgtgctggacatgcggagcatggacttcaagagcaactccgccgtggcctggtccaacaagtccgatttcgcctgcgccaacgccttcaacaacagcattatccccgaggacacattcttcccaagccccgagagcagctgcgacgtgaagctggtggaaaagagcttcgagacagacaccaacctgaacttccagatcctgtacgagatcctgctgggcaaggccaccctgtacgccgtgctggtgtctgccctggtgctgatggctatggtcaagcggaaggacagccggggacgcgccaagagaagcggatctggcgtgaagcagaccctgaatttcgacctgctgaagctggctggcgacgtggaatccaacccaggccctactagtatggactggatttggcgcatccttttccttgtcggcgctgctaccggcgcgcattccttcgaagaagtgcagctggtgcagtctggcgctgaggtggaaaagcctggggccagcgtgaagattagctgcaaggccagcggcagcagcttcaccggctacaacatgaactgggtgcgccagaacatcggcaagagcctggaatggatcggagccatcgacccctactacggcggcaccagctacaaccagaagttcaagggcagagccaccctgaccgtggacaagagcaccagcaccgcctacatgcacctgaagtccctgcggagcgaggacaccgccgtgtactactgtgtgtccggcatggaatattggggccagggcaccagcgtgaccgtgtctagtacgcgtgaggacctgaagaacgtgttcccacctgaggtggccgtgttcgagcctagcgaggccgagatcagccacacccagaaagccaccctcgtgtgcctggctaccggcttctaccccgaccatgtggaactgtcttggtgggtcaacggcaaagaggtgcacagcggcgtgtgtaccgacccccagccactgaaagaacagcccgccctgaacgacagccggtactgcctgagcagcagactgagagtgtccgccaccttctggcagaacccccggaaccacttcagatgccaggtgcagttctacggcctgagcgagaacgacgagtggacccaggacagagccaagcccgtgacccagatcgtgtctgccgaagcctggggcagagccgattgcggctttaccagcgagagctaccagcagggcgtgctgagcgccaccaacctgagcgtgatcggcttcagaatcctgctgctgaaagtggccggctttaacctgctgatgaccctgcggctgtggtccagc

SEQ ID NO: 5515 - DNA, 2271 bp, synthetic construct
  source 1..2271: mol_type = other DNA
atggccttaccagtgaccgccttgctcctgccgctggccttgctgctccacgccgccaggccggaagtgcagctggttgaatctggcggaggactggttcagcctggcggatctctgagactgtcttgtgccgccagcggcttcagcttcagcgacttttggatgagctgggtccgacaggcccctggcaaaggacttgaatgggtcgccacaatcagccaggccggcagcgagaaggactacgtggactctgtgaagggcagattcaccatcagccgggacaacgccaagaagtccctgtacctccagatgaacagcctgagagccgaggacaccgccgtgtactattgtgcctctggcgtgtacagcttcgactacagaggccagggcaccctggtcacagtctcttctggtaccggcggaggcggatctggcggcggaggtagcggtggcggaggatctgaattcgacgagatcgtgatgacccagacccctgccaccctgtctgtgtctgccggcgagagagtgaccattacctgcaaggccagccagagcgtgtccaacgacgtgacctggtatcagcagaagcccggccaggcccccagactgctgatctacagcgccagcaacagatacagcggcgtgcccgccagattttccggcagcggctacggcaccgagttcaccttcaccatcagcagcgtgcagagcgaggacttcgccgtgtacttctgtcagcaagactacagcagcttcggccagggcaccaagctggaaatcaagaggctcgagatccagaaccctgatcctgccgtgtaccagctgcgggatagcaagagcagcgacaagagcgtgtgtctgttcaccgacttcgacagccagaccaacgtgtcccagagcaaggactccgacgtgtacatcaccgataagtgcgtgctggacatgcggagcatggacttcaagagcaactccgccgtggcctggtccaacaagtccgatttcgcctgcgccaacgccttcaacaacagcattatccccgaggacacattcttcccaagccccgagagcagctgcgacgtgaagctggtggaaaagagcttcgagacagacaccaacctgaacttccagatcctgtacgagatcctgctgggcaaggccaccctgtacgccgtgctggtgtctgccctggtgctgatggctatggtcaagcggaaggacagccggggacgcgccaagagaagcggatctggcgtgaagcagaccctgaatttcgacctgctgaagctggctggcgacgtggaatccaacccaggccctactagtatggactggatttggcgcatccttttccttgtcggcgctgctaccggcgcgcattccttcgaacaggtgcagctggtggaatctggacctggcgtggtgcagcctggcagaagcctgagaatcagctgtgccgtgtccggcttcagcgtgaccaactacggcgtgcactgggtgcgccagccacctggaaaaggactggaatggctgggcgtgatctgggctggcggcatcaccaactacaacagcgccttcatgtcccggctgaccatctccaaggacaacagcaagaacaccgtgtacctccagatgaacagcctgcgggccgaggacaccgccatgtactactgtgcttccagaggcggccactacggctacgccctggattattggggccagggaaccctcgtgaccgtgtcctctacgcgtgaggacctgaagaacgtgttcccacctgaggtggccgtgttcgagcctagcgaggccgagatcagccacacccagaaagccaccctcgtgtgcctggctaccggcttctaccccgaccatgtggaactgtcttggtgggtcaacggcaaagaggtgcacagcggcgtgtgtaccgacccccagccactgaaagaacagcccgccctgaacgacagccggtactgcctgagcagcagactgagagtgtccgccaccttctggcagaacccccggaaccacttcagatgccaggtgcagttctacggcctgagcgagaacgacgagtggacccaggacagagccaagcccgtgacccagatcgtgtctgccgaagcctggggcagagccgattgcggctttaccagcgagagctaccagcagggcgtgctgagcgccaccaacctgagcgtgatcggcttcagaatcctgctgctgaaagtggccggctttaacctgctgatgaccctgcggctgtggtccagc

SEQ ID NO: 5516 - DNA, 2277 bp, synthetic construct
  source 1..2277: mol_type = other DNA
atggccttaccagtgaccgccttgctcctgccgctggccttgctgctccacgccgccaggccggaagtgcagctggttgaatctggcggaggactggttcagcctggcggatctctgagactgtcttgtgccgccagcggcttcagcttcagcgacttttggatgagctgggtccgacaggcccctggcaaaggacttgaatgggtcgccacaatcagccaggccggcagcgagaaggactacgtggactctgtgaagggcagattcaccatcagccgggacaacgccaagaagtccctgtacctccagatgaacagcctgagagccgaggacaccgccgtgtactattgtgcctctggcgtgtacagcttcgactacagaggccagggcaccctggtcacagtctcttctggtaccggcggaggcggatctggcggcggaggtagcggtggcggaggatctgaattcgacatccagatgacccagaccgccagcagcctgcctgcctctctgggcgacagagtgaccatctcctgtagcgccagccaggacatcagcaactacctgaactggtatcagcagaaacccgacggcaccgtgaagctgctgatcttctacagcagcaacctgcacagcggcgtgcccagcagattttctggcggcggaagcggcaccgactacagcctgaccatcagcaatctggaacccgaggacattgccacctacttttgccaccagtacagcaagctgccctggacctttggcggaggcaccaagctggaaatcaagagactcgagatccagaaccctgatcctgccgtgtaccagctgcgggatagcaagagcagcgacaagagcgtgtgtctgttcaccgacttcgacagccagaccaacgtgtcccagagcaaggactccgacgtgtacatcaccgataagtgcgtgctggacatgcggagcatggacttcaagagcaactccgccgtggcctggtccaacaagtccgatttcgcctgcgccaacgccttcaacaacagcattatccccgaggacacattcttcccaagccccgagagcagctgcgacgtgaagctggtggaaaagagcttcgagacagacaccaacctgaacttccagatcctgtacgagatcctgctgggcaaggccaccctgtacgccgtgctggtgtctgccctggtgctgatggctatggtcaagcggaaggacagccggggacgcgccaagagaagcggatctggcgtgaagcagaccctgaatttcgacctgctgaagctggctggcgacgtggaatccaacccaggccctactagtatggactggatttggcgcatccttttccttgtcggcgctgctaccggcgcgcattccttcgaagaagtgaccctggtggaaagcggcggagacttcgtgaagcctggcggctctctgaaggtgtcctgtgccgccagcggcttcgcctttagccactacgccatgagctgggtgcgccagacccctgccaagagactggaatgggtggcctacatcagcagcggcggctccggcacctactactccgatagcgtgaagggccggttcaccatcagccgggacaacgccaagaacaccctgtacctccagatgcggagcctgcggagcgaggacagcgccatgtatttctgcaccagagtgaagctgggcacctattacttcgactcttggggccagggcaccaccctgaccgtgtcatctacgcgtgaggacctgaagaacgtgttcccacctgaggtggccgtgttcgagcctagcgaggccgagatcagccacacccagaaagccaccctcgtgtgcctggctaccggcttctaccccgaccatgtggaactgtcttggtgggtcaacggcaaagaggtgcacagcggcgtgtgtaccgacccccagccactgaaagaacagcccgccctgaacgacagccggtactgcctgagcagcagactgagagtgtccgccaccttctggcagaacccccggaaccacttcagatgccaggtgcagttctacggcctgagcgagaacgacgagtggacccaggacagagccaagcccgtgacccagatcgtgtctgccgaagcctggggcagagccgattgcggctttaccagcgagagctaccagcagggcgtgctgagcgccaccaacctgagcgtgatcggcttcagaatcctgctgctgaaagtggccggctttaacctgctgatgaccctgcggctgtggtccagc

SEQ ID NO: 5517 - DNA, 2283 bp, synthetic construct
  source 1..2283: mol_type = other DNA
atggccttaccagtgaccgccttgctcctgccgctggccttgctgctccacgccgccaggccggaagtgcagctggttgaatctggcggaggactggttcagcctggcggatctctgagactgtcttgtgccgccagcggcttcagcttcagcgacttttggatgagctgggtccgacaggcccctggcaaaggacttgaatgggtcgccacaatcagccaggccggcagcgagaaggactacgtggactctgtgaagggcagattcaccatcagccgggacaacgccaagaagtccctgtacctccagatgaacagcctgagagccgaggacaccgccgtgtactattgtgcctctggcgtgtacagcttcgactacagaggccagggcaccctggtcacagtctcttctggtaccggcggaggcggatctggcggcggaggtagcggtggcggaggatctgaattccagttcgtgctgacccagagcccttctgcctctgctgccctgggagcctctgccaagctgacctgtacactgagcagcgcccacaagacctacaccatcgactggtatcagcagcagaagggaaaggcccccagatacctgatccaagtgaagtccgacggcacctacacaaaggccaccggcgtgcccgatagattcagcggcagtagcagcggagccgatagatacctgattatccccagcgtgcaggccgacgacgaggccgattactactgcggcaccgattacaccggcggctacgtgttcggcggaggcacacaactgaccgtgacactcgagatccagaaccctgatcctgccgtgtaccagctgcgggatagcaagagcagcgacaagagcgtgtgtctgttcaccgacttcgacagccagaccaacgtgtcccagagcaaggactccgacgtgtacatcaccgataagtgcgtgctggacatgcggagcatggacttcaagagcaactccgccgtggcctggtccaacaagtccgatttcgcctgcgccaacgccttcaacaacagcattatccccgaggacacattcttcccaagccccgagagcagctgcgacgtgaagctggtggaaaagagcttcgagacagacaccaacctgaacttccagatcctgtacgagatcctgctgggcaaggccaccctgtacgccgtgctggtgtctgccctggtgctgatggctatggtcaagcggaaggacagccggggacgcgccaagagaagcggatctggcgtgaagcagaccctgaatttcgacctgctgaagctggctggcgacgtggaatccaacccaggccctactagtatggactggatttggcgcatccttttccttgtcggcgctgctaccggcgcgcattccttcgaagagcaactgaaagagtctggcggcggactgttcaagcccaccgataccctgaccctgacctgcaccgtgtccggcttcagcctgagctactacggcgtgaactgggtgcgccaggcccctggcaatggcctggaatggatcggcacaatcggcggcagcggcgacacctactatgcctcttgggccaagtccagaagcaccatcatcagaaacaccaacgagaacaccgtgaccctgaagatgaccagcctgacagccgccgacaccgccacctacttttgcgtcagatacgccaacatcggctacgagtatttcaacgtgtggggacccggcaccctcgtgaccgtgtcatctacgcgtgaggacctgaagaacgtgttcccacctgaggtggccgtgttcgagcctagcgaggccgagatcagccacacccagaaagccaccctcgtgtgcctggctaccggcttctaccccgaccatgtggaactgtcttggtgggtcaacggcaaagaggtgcacagcggcgtgtgtaccgacccccagccactgaaagaacagcccgccctgaacgacagccggtactgcctgagcagcagactgagagtgtccgccaccttctggcagaacccccggaaccacttcagatgccaggtgcagttctacggcctgagcgagaacgacgagtggacccaggacagagccaagcccgtgacccagatcgtgtctgccgaagcctggggcagagccgattgcggctttaccagcgagagctaccagcagggcgtgctgagcgccaccaacctgagcgtgatcggcttcagaatcctgctgctgaaagtggccggctttaacctgctgatgaccctgcggctgtggtccagc

SEQ ID NO: 5518 - DNA, 2298 bp, synthetic construct
  source 1..2298: mol_type = other DNA
atggccttaccagtgaccgccttgctcctgccgctggccttgctgctccacgccgccaggccggaagtgcagctggttgaatctggcggaggactggttcagcctggcggatctctgagactgtcttgtgccgccagcggcttcagcttcagcgacttttggatgagctgggtccgacaggcccctggcaaaggacttgaatgggtcgccacaatcagccaggccggcagcgagaaggactacgtggactctgtgaagggcagattcaccatcagccgggacaacgccaagaagtccctgtacctccagatgaacagcctgagagccgaggacaccgccgtgtactattgtgcctctggcgtgtacagcttcgactacagaggccagggcaccctggtcacagtctcttctggtaccggcggaggcggatctggcggcggaggtagcggtggcggaggatctgaattccagttcgtgctgacccagagcccttctgtgtctgccgccctgggagcctctgccaagctgacctgtacactgagcagcgcccacaagacctacaccatcgactggtatcagcagcagcagggcgaggcccccagatacctgatgcaagtgaagtccgacggcagctacaccaagggcaccggcgtgcccgatagattcagcggcagtagcagcggagccgatagatacctgattatccccagcgtgcaggccgacgacgaggccggatatgtgtgcggcgctgacgacaatggcggctacgtgttcggcggaggcacccaactgacagtgacactcgagatccagaaccctgatcctgccgtgtaccagctgcgggatagcaagagcagcgacaagagcgtgtgtctgttcaccgacttcgacagccagaccaacgtgtcccagagcaaggactccgacgtgtacatcaccgataagtgcgtgctggacatgcggagcatggacttcaagagcaactccgccgtggcctggtccaacaagtccgatttcgcctgcgccaacgccttcaacaacagcattatccccgaggacacattcttcccaagccccgagagcagctgcgacgtgaagctggtggaaaagagcttcgagacagacaccaacctgaacttccagatcctgtacgagatcctgctgggcaaggccaccctgtacgccgtgctggtgtctgccctggtgctgatggctatggtcaagcggaaggacagccggggacgcgccaagagaagcggatctggcgtgaagcagaccctgaatttcgacctgctgaagctggctggcgacgtggaatccaacccaggccctactagtatggactggatttggcgcatccttttccttgtcggcgctgctaccggcgcgcattccttcgaacagagcgtgaaagagtctgagggcggcctgttcaagcccaccgataccctgaccctgacctgcaccgtgtccggcttcagcctgagcagacacgccctgacatgggtgcgccaggcccctggaaatggcctggaatggatcggagccatcgacaacgccggcaccacctactatgcctcttgggccaagtccagaagcaccatcacccggaacaccgacctgcacaccgtgaccctgaagatgaccagcctgaccgccagcgacaccgccacctacttttgcgccagagtgttctacgacatcaacagcggctactacctggacggcatggacctgtggggacctggcacacttgtgaccgtgtccagcacgcgtgaggacctgaagaacgtgttcccacctgaggtggccgtgttcgagcctagcgaggccgagatcagccacacccagaaagccaccctcgtgtgcctggctaccggcttctaccccgaccatgtggaactgtcttggtgggtcaacggcaaagaggtgcacagcggcgtgtgtaccgacccccagccactgaaagaacagcccgccctgaacgacagccggtactgcctgagcagcagactgagagtgtccgccaccttctggcagaacccccggaaccacttcagatgccaggtgcagttctacggcctgagcgagaacgacgagtggacccaggacagagccaagcccgtgacccagatcgtgtctgccgaagcctggggcagagccgattgcggctttaccagcgagagctaccagcagggcgtgctgagcgccaccaacctgagcgtgatcggcttcagaatcctgctgctgaaagtggccggctttaacctgctgatgaccctgcggctgtggtccagc

SEQ ID NO: 5519 - DNA, 2280 bp, synthetic construct
  source 1..2280: mol_type = other DNA
atggccttaccagtgaccgccttgctcctgccgctggccttgctgctccacgccgccaggccggaagtgcagctggttgaatctggcggaggactggttcagcctggcggatctctgagactgtcttgtgccgccagcggcttcagcttcagcgacttttggatgagctgggtccgacaggcccctggcaaaggacttgaatgggtcgccacaatcagccaggccggcagcgagaaggactacgtggactctgtgaagggcagattcaccatcagccgggacaacgccaagaagtccctgtacctccagatgaacagcctgagagccgaggacaccgccgtgtactattgtgcctctggcgtgtacagcttcgactacagaggccagggcaccctggtcacagtctcttctggtaccggcggaggcggatctggcggcggaggtagcggtggcggaggatctgaattcgacatccagatgacccagagccccagcagcctgtctgccagcgtgggcgacagagtgaccatcacctgtagagccagccagggcatcagctcttggctggcctggtatcagcagaagcccgagaaggcccccaagagcctgatctacgccgcctctagtctccagagcggcgtgcccagcagattttctggcagcggctccggcaccgacttcaccctgacaatcagctccctccagcccgaggacttcgccacctactactgccagcagtacaacagctacccccccacctttggcggaggcaccaaggtggaaatcaagctcgagatccagaaccctgatcctgccgtgtaccagctgcgggatagcaagagcagcgacaagagcgtgtgtctgttcaccgacttcgacagccagaccaacgtgtcccagagcaaggactccgacgtgtacatcaccgataagtgcgtgctggacatgcggagcatggacttcaagagcaactccgccgtggcctggtccaacaagtccgatttcgcctgcgccaacgccttcaacaacagcattatccccgaggacacattcttcccaagccccgagagcagctgcgacgtgaagctggtggaaaagagcttcgagacagacaccaacctgaacttccagatcctgtacgagatcctgctgggcaaggccaccctgtacgccgtgctggtgtctgccctggtgctgatggctatggtcaagcggaaggacagccggggacgcgccaagagaagcggatctggcgtgaagcagaccctgaatttcgacctgctgaagctggctggcgacgtggaatccaacccaggccctactagtatggactggatttggcgcatccttttccttgtcggcgctgctaccggcgcgcattccttcgaagaagtgcaactggtggaatcaggcggcggactggtgcagcctggcgagtctctgagactgagctgtgtggcctccggcttcaccttcagccggtacaagatgaactgggtgcgccaggcccctggcaagggactggaatgggtgtcctacatcagccgcagcggcagagacatctactacgccgacagcgtgaagggccggttcaccatcagcagagacaacgccaagaacagcctgtacctccagatgaactccctgcgggacgaggacaccgccgtgtactactgtgccggaaccgtgaccacctattactacttcggcatggacgtgtggggccacggcaccaccgtgacagtgtcatctacgcgtgaggacctgaagaacgtgttcccacctgaggtggccgtgttcgagcctagcgaggccgagatcagccacacccagaaagccaccctcgtgtgcctggctaccggcttctaccccgaccatgtggaactgtcttggtgggtcaacggcaaagaggtgcacagcggcgtgtgtaccgacccccagccactgaaagaacagcccgccctgaacgacagccggtactgcctgagcagcagactgagagtgtccgccaccttctggcagaacccccggaaccacttcagatgccaggtgcagttctacggcctgagcgagaacgacgagtggacccaggacagagccaagcccgtgacccagatcgtgtctgccgaagcctggggcagagccgattgcggctttaccagcgagagctaccagcagggcgtgctgagcgccaccaacctgagcgtgatcggcttcagaatcctgctgctgaaagtggccggctttaacctgctgatgaccctgcggctgtggtccagc

SEQ ID NO: 5520 - DNA, 2283 bp, synthetic construct
  source 1..2283: mol_type = other DNA
atggccttaccagtgaccgccttgctcctgccgctggccttgctgctccacgccgccaggccggaagtgcagctggttgaatctggcggaggactggttcagcctggcggatctctgagactgtcttgtgccgccagcggcttcagcttcagcgacttttggatgagctgggtccgacaggcccctggcaaaggacttgaatgggtcgccacaatcagccaggccggcagcgagaaggactacgtggactctgtgaagggcagattcaccatcagccgggacaacgccaagaagtccctgtacctccagatgaacagcctgagagccgaggacaccgccgtgtactattgtgcctctggcgtgtacagcttcgactacagaggccagggcaccctggtcacagtctcttctggtaccggcggaggcggatctggcggcggaggtagcggtggcggaggatctgaattcgacatccagatgacccagagccccagcagcctgtctgccagcgtgggcgacagagtgaccatcacctgtagagccagccagggcatcagctcttggctggcctggtatcagcagaagcccgagaaggcccccaagagcctgatctacgccgcctctagtctccagagcggcgtgcccagcagattttctggcagcggctccggcaccgacttcaccctgacaatcagctccctccagcccgaggacttcgccacctactactgccagcagtacaacagctaccctcccacctttggcggaggcaccaaggtggaaatcaagctcgagatccagaaccctgatcctgccgtgtaccagctgcgggatagcaagagcagcgacaagagcgtgtgtctgttcaccgacttcgacagccagaccaacgtgtcccagagcaaggactccgacgtgtacatcaccgataagtgcgtgctggacatgcggagcatggacttcaagagcaactccgccgtggcctggtccaacaagtccgatttcgcctgcgccaacgccttcaacaacagcattatccccgaggacacattcttcccaagccccgagagcagctgcgacgtgaagctggtggaaaagagcttcgagacagacaccaacctgaacttccagatcctgtacgagatcctgctgggcaaggccaccctgtacgccgtgctggtgtctgccctggtgctgatggctatggtcaagcggaaggacagccggggacgcgccaagagaagcggatctggcgtgaagcagaccctgaatttcgacctgctgaagctggctggcgacgtggaatccaacccaggccctactagtatggactggatttggcgcatccttttccttgtcggcgctgctaccggcgcgcattccttcgaagaagtgcaactggtggaatccgggggaggctctgtgcagcctggcgagtctctgagactgagctgtgtggcctccggcttcaccttcagccggtacaagatgaactgggtgcgccaggcccctggcaagggactggaatgggtgtcctacatcagccgcagcggcagagacatctactacgccgacagcgtgaagggccggttcaccatcagcagagacaacgccaagaacagcctgtacctccagatgaactccctgcgggacgaggacaccgccgtgtactactgtgccggaaccgtgaccacctattactacgacttcggcatggacgtgtggggccagggcacaaccgtgacagtgtctagcacgcgtgaggacctgaagaacgtgttcccacctgaggtggccgtgttcgagcctagcgaggccgagatcagccacacccagaaagccaccctcgtgtgcctggctaccggcttctaccccgaccatgtggaactgtcttggtgggtcaacggcaaagaggtgcacagcggcgtgtgtaccgacccccagccactgaaagaacagcccgccctgaacgacagccggtactgcctgagcagcagactgagagtgtccgccaccttctggcagaacccccggaaccacttcagatgccaggtgcagttctacggcctgagcgagaacgacgagtggacccaggacagagccaagcccgtgacccagatcgtgtctgccgaagcctggggcagagccgattgcggctttaccagcgagagctaccagcagggcgtgctgagcgccaccaacctgagcgtgatcggcttcagaatcctgctgctgaaagtggccggctttaacctgctgatgaccctgcggctgtggtccagc

SEQ ID NO: 5521 - DNA, 2277 bp, synthetic construct
  source 1..2277: mol_type = other DNA
atggccttaccagtgaccgccttgctcctgccgctggccttgctgctccacgccgccaggccggaagtgcagctggttgaatctggcggaggactggttcagcctggcggatctctgagactgtcttgtgccgccagcggcttcagcttcagcgacttttggatgagctgggtccgacaggcccctggcaaaggacttgaatgggtcgccacaatcagccaggccggcagcgagaaggactacgtggactctgtgaagggcagattcaccatcagccgggacaacgccaagaagtccctgtacctccagatgaacagcctgagagccgaggacaccgccgtgtactattgtgcctctggcgtgtacagcttcgactacagaggccagggcaccctggtcacagtctcttctggtaccggcggaggcggatctggcggcggaggtagcggtggcggaggatctgaattccagtctgtgctgacacagcctccatctgcctctggcacacctggacagagagtgaccatcagctgtagcggcagcagaagcaacgtcggcggcaactacgtgttctggtatcagcaggtcccaggcgctacccctaagctgctgatctacagaagcaatcagcggcctagcggcgtgcccgatagatttgccggaagcaagagcggcagctctgccagccttgccatctctggactgagaagcgaggacgaggccgactactactgtgccacctgggatgatagcctgagcggcttcgtgtttggcaccggcaccaaagtgacagtgcttggtctcgagatccagaaccctgatcctgccgtgtaccagctgcgggatagcaagagcagcgacaagagcgtgtgtctgttcaccgacttcgacagccagaccaacgtgtcccagagcaaggactccgacgtgtacatcaccgataagtgcgtgctggacatgcggagcatggacttcaagagcaactccgccgtggcctggtccaacaagtccgatttcgcctgcgccaacgccttcaacaacagcattatccccgaggacacattcttcccaagccccgagagcagctgcgacgtgaagctggtggaaaagagcttcgagacagacaccaacctgaacttccagatcctgtacgagatcctgctgggcaaggccaccctgtacgccgtgctggtgtctgccctggtgctgatggctatggtcaagcggaaggacagccggggacgcgccaagagaagcggatctggcgtgaagcagaccctgaatttcgacctgctgaagctggctggcgacgtggaatccaacccaggccctactagtatggactggatttggcgcatccttttccttgtcggcgctgctaccggcgcgcattccttcgaagttcagctggttgaatctggcggcggactggttaagcctggcggatctctgagactgtcttgtgccgccagcggcttcaccttcagcgattactacatgagctggatcagacaggcccctggcaaaggactggaatgggtgtcctacatcagcagcagcggctccaccatctactacgccgatagcgtgaagggcagattcaccatcagccgggacaacgccaagaacagcctgtacctccagatgaactccctgagagccgaggacaccgccgtgtactattgcgccagaggctacggcaaagcctacgatcaatggggccagggcacactggtcaccgtttcttctacgcgtgaggacctgaagaacgtgttcccacctgaggtggccgtgttcgagcctagcgaggccgagatcagccacacccagaaagccaccctcgtgtgcctggctaccggcttctaccccgaccatgtggaactgtcttggtgggtcaacggcaaagaggtgcacagcggcgtgtgtaccgacccccagccactgaaagaacagcccgccctgaacgacagccggtactgcctgagcagcagactgagagtgtccgccaccttctggcagaacccccggaaccacttcagatgccaggtgcagttctacggcctgagcgagaacgacgagtggacccaggacagagccaagcccgtgacccagatcgtgtctgccgaagcctggggcagagccgattgcggctttaccagcgagagctaccagcagggcgtgctgagcgccaccaacctgagcgtgatcggcttcagaatcctgctgctgaaagtggccggctttaacctgctgatgaccctgcggctgtggtccagc

SEQ ID NO: 5522 - DNA, 2274 bp, synthetic construct
  source 1..2274: mol_type = other DNA
atggccttaccagtgaccgccttgctcctgccgctggccttgctgctccacgccgccaggccggaagtgcagctggttgaatctggcggaggactggttcagcctggcggatctctgagactgtcttgtgccgccagcggcttcagcttcagcgacttttggatgagctgggtccgacaggcccctggcaaaggacttgaatgggtcgccacaatcagccaggccggcagcgagaaggactacgtggactctgtgaagggcagattcaccatcagccgggacaacgccaagaagtccctgtacctccagatgaacagcctgagagccgaggacaccgccgtgtactattgtgcctctggcgtgtacagcttcgactacagaggccagggcaccctggtcacagtctcttctggtaccggcggaggcggatctggcggcggaggtagcggtggcggaggatctgaattccagtctgtggtcacacagccacctagcatgtctgccgctccaggccagcaagtgaccatctcttgtagcggcggcaacagcaacatcgagcggaactacgtgtcctggtatctgcaactgcctggcacagcccctaagctggtcatcttcgacaacgacagacggcccagcggcatccccgatagattttctggcagcaagagcggcaccagcgccacactgggaattaccggacttcagacaggcgacgaggccgactactactgtggcacatgggactctagcctgagaggctgggttttcggcggaggcacaaagctgacagtgcttggtctcgagatccagaaccctgatcctgccgtgtaccagctgcgggatagcaagagcagcgacaagagcgtgtgtctgttcaccgacttcgacagccagaccaacgtgtcccagagcaaggactccgacgtgtacatcaccgataagtgcgtgctggacatgcggagcatggacttcaagagcaactccgccgtggcctggtccaacaagtccgatttcgcctgcgccaacgccttcaacaacagcattatccccgaggacacattcttcccaagccccgagagcagctgcgacgtgaagctggtggaaaagagcttcgagacagacaccaacctgaacttccagatcctgtacgagatcctgctgggcaaggccaccctgtacgccgtgctggtgtctgccctggtgctgatggctatggtcaagcggaaggacagccggggacgcgccaagagaagcggatctggcgtgaagcagaccctgaatttcgacctgctgaagctggctggcgacgtggaatccaacccaggccctactagtatggactggatttggcgcatccttttccttgtcggcgctgctaccggcgcgcattccttcgaagtgcagctcgttgagtctggcggcggactgattcaacctggcggaagcctgagactgagctgtgccgcttccggcttcaccttcagcaactacgccatgaactgggttcgacaggcccctggcaaaggactggaatgggtgtccaccatcaacggcagaggcagcagcaccatctacgccgattctgtgaagggcagattcaccatcagccgggacaacagcaagaacaccctgtacctccagatgaactccctgagagccgaggacaccgccacctattactgtgcccggtacatcagcagaggactgggcgattcttggggccagggcacactggttacagtgacgcgtgaggacctgaagaacgtgttcccacctgaggtggccgtgttcgagcctagcgaggccgagatcagccacacccagaaagccaccctcgtgtgcctggctaccggcttctaccccgaccatgtggaactgtcttggtgggtcaacggcaaagaggtgcacagcggcgtgtgtaccgacccccagccactgaaagaacagcccgccctgaacgacagccggtactgcctgagcagcagactgagagtgtccgccaccttctggcagaacccccggaaccacttcagatgccaggtgcagttctacggcctgagcgagaacgacgagtggacccaggacagagccaagcccgtgacccagatcgtgtctgccgaagcctggggcagagccgattgcggctttaccagcgagagctaccagcagggcgtgctgagcgccaccaacctgagcgtgatcggcttcagaatcctgctgctgaaagtggccggctttaacctgctgatgaccctgcggctgtggtccagc

SEQ ID NO: 5523 - DNA, 2277 bp, synthetic construct
  source 1..2277: mol_type = other DNA
atggccttaccagtgaccgccttgctcctgccgctggccttgctgctccacgccgccaggccggaagtgcagctggttgaatctggcggaggactggttcagcctggcggatctctgagactgtcttgtgccgccagcggcttcagcttcagcgacttttggatgagctgggtccgacaggcccctggcaaaggacttgaatgggtcgccacaatcagccaggccggcagcgagaaggactacgtggactctgtgaagggcagattcaccatcagccgggacaacgccaagaagtccctgtacctccagatgaacagcctgagagccgaggacaccgccgtgtactattgtgcctctggcgtgtacagcttcgactacagaggccagggcaccctggtcacagtctcttctggtaccggcggaggcggatctggcggcggaggtagcggtggcggaggatctgaattcgacgtcgtgatgacccagacccctctgagcctgcctgtgtccctgggcgatcaggccagcatcagctgtagaagcagccagagcctggtgcacagcaacggcaacacctacctgcactggtatctccagaagcccggccagagccccaagctgctgatctacaaggtgtccaacagattcagcggcgtgcccgacagattctccggcagcggctctggcaccgacttcaccctgaagatcagccgggtggaagccgaggacctgggcgtgtacttctgtagccagaacacccccgtgccccccaagtttggcagcggcaccaagctggaaatcaagctcgagatccagaaccctgatcctgccgtgtaccagctgcgggatagcaagagcagcgacaagagcgtgtgtctgttcaccgacttcgacagccagaccaacgtgtcccagagcaaggactccgacgtgtacatcaccgataagtgcgtgctggacatgcggagcatggacttcaagagcaactccgccgtggcctggtccaacaagtccgatttcgcctgcgccaacgccttcaacaacagcattatccccgaggacacattcttcccaagccccgagagcagctgcgacgtgaagctggtggaaaagagcttcgagacagacaccaacctgaacttccagatcctgtacgagatcctgctgggcaaggccaccctgtacgccgtgctggtgtctgccctggtgctgatggctatggtcaagcggaaggacagccggggacgcgccaagagaagcggatctggcgtgaagcagaccctgaatttcgacctgctgaagctggctggcgacgtggaatccaacccaggccctactagtatggactggatttggcgcatccttttccttgtcggcgctgctaccggcgcgcattccttcgaacaggtgcagctccagcagtctggcgctgaactcgtgcggcctggcgcttctgtgaagctgtcttgcaaggccagcggctacaccttcaacgactacgagatgcactgggtcaagcagacccctgtgcacggcctgaagtggatcggagccctggaacccaagaccggcgataccgcctacagccagaagttcaagggcaaggccaccctgaccgccgacaagagcagcagcacagcctacatggaactgcggagcctgaccagcgaggacagcgccgtgtactactgcaccagctgctactactacacctacagcggccagggcaccctcgtgacagtgtctgctacgcgtgaggacctgaagaacgtgttcccacctgaggtggccgtgttcgagcctagcgaggccgagatcagccacacccagaaagccaccctcgtgtgcctggctaccggcttctaccccgaccatgtggaactgtcttggtgggtcaacggcaaagaggtgcacagcggcgtgtgtaccgacccccagccactgaaagaacagcccgccctgaacgacagccggtactgcctgagcagcagactgagagtgtccgccaccttctggcagaacccccggaaccacttcagatgccaggtgcagttctacggcctgagcgagaacgacgagtggacccaggacagagccaagcccgtgacccagatcgtgtctgccgaagcctggggcagagccgattgcggctttaccagcgagagctaccagcagggcgtgctgagcgccaccaacctgagcgtgatcggcttcagaatcctgctgctgaaagtggccggctttaacctgctgatgaccctgcggctgtggtccagc

SEQ ID NO: 5524 - DNA, 2274 bp, synthetic construct
  source 1..2274: mol_type = other DNA
atggccttaccagtgaccgccttgctcctgccgctggccttgctgctccacgccgccaggccggaagtgcagctggttgaatctggcggaggactggttcagcctggcggatctctgagactgtcttgtgccgccagcggcttcagcttcagcgacttttggatgagctgggtccgacaggcccctggcaaaggacttgaatgggtcgccacaatcagccaggccggcagcgagaaggactacgtggactctgtgaagggcagattcaccatcagccgggacaacgccaagaagtccctgtacctccagatgaacagcctgagagccgaggacaccgccgtgtactattgtgcctctggcgtgtacagcttcgactacagaggccagggcaccctggtcacagtctcttctggtaccggcggaggcggatctggcggcggaggtagcggtggcggaggatctgaattcgacatccaactgacccagagccccagcagcctgtctgcctctgtgggcgacagagtgaccatcacctgtagagccagccagggcatcagaaacgacctgggctggtatcagcagaagcccggcaaggcccccaagcggctgatctatgctgccagctccctccagaatggcgtgcccagcagattttccggcagcggctctggcaccgagttcaccctgaccatcagctccctccagcccgaggacttcgccacctactactgcctccagcacaacacctaccccgccttcggccagggcaccaaggtggaaatcaagagactcgagatccagaaccctgatcctgccgtgtaccagctgcgggatagcaagagcagcgacaagagcgtgtgtctgttcaccgacttcgacagccagaccaacgtgtcccagagcaaggactccgacgtgtacatcaccgataagtgcgtgctggacatgcggagcatggacttcaagagcaactccgccgtggcctggtccaacaagtccgatttcgcctgcgccaacgccttcaacaacagcattatccccgaggacacattcttcccaagccccgagagcagctgcgacgtgaagctggtggaaaagagcttcgagacagacaccaacctgaacttccagatcctgtacgagatcctgctgggcaaggccaccctgtacgccgtgctggtgtctgccctggtgctgatggctatggtcaagcggaaggacagccggggacgcgccaagagaagcggatctggcgtgaagcagaccctgaatttcgacctgctgaagctggctggcgacgtggaatccaacccaggccctactagtatggactggatttggcgcatccttttccttgtcggcgctgctaccggcgcgcattccttcgaacaggtgcaactccaggaatctggccctggcctcgtgaagcctagccagaccctgagcctgacctgtaccgtgtctggcggcagcatcagcagcttcaactactactggtcctggatcagacaccaccctggcaagggcctggaatggatcggctacatctactacagcggcagcacctacagcaaccccagcctgaagtcccgcgtgaccatctccgtggacaccagcaagaaccagtttagcctgaccctgtccagcgtgacagccgccgataccgccgtgtactactgcgccagaggctacaactggaactacttcgactactggggccagggaaccctcgtgaccgtgtctagtacgcgtgaggacctgaagaacgtgttcccacctgaggtggccgtgttcgagcctagcgaggccgagatcagccacacccagaaagccaccctcgtgtgcctggctaccggcttctaccccgaccatgtggaactgtcttggtgggtcaacggcaaagaggtgcacagcggcgtgtgtaccgacccccagccactgaaagaacagcccgccctgaacgacagccggtactgcctgagcagcagactgagagtgtccgccaccttctggcagaacccccggaaccacttcagatgccaggtgcagttctacggcctgagcgagaacgacgagtggacccaggacagagccaagcccgtgacccagatcgtgtctgccgaagcctggggcagagccgattgcggctttaccagcgagagctaccagcagggcgtgctgagcgccaccaacctgagcgtgatcggcttcagaatcctgctgctgaaagtggccggctttaacctgctgatgaccctgcggctgtggtccagc

SEQ ID NO: 5525 - DNA, 2280 bp, synthetic construct
  source 1..2280: mol_type = other DNA
atggccttaccagtgaccgccttgctcctgccgctggccttgctgctccacgccgccaggccggaagtgcagctggttgaatctggcggaggactggttcagcctggcggatctctgagactgtcttgtgccgccagcggcttcagcttcagcgacttttggatgagctgggtccgacaggcccctggcaaaggacttgaatgggtcgccacaatcagccaggccggcagcgagaaggactacgtggactctgtgaagggcagattcaccatcagccgggacaacgccaagaagtccctgtacctccagatgaacagcctgagagccgaggacaccgccgtgtactattgtgcctctggcgtgtacagcttcgactacagaggccagggcaccctggtcacagtctcttctggtaccggcggaggcggatctggcggcggaggtagcggtggcggaggatctgaattcgacgacatcgtgctgacccagagccccgccagcctggccgtgagcctgggccagagcgtgaccatcagctgcagagccagcgagagcgtggagtactacggcaccagcctgatgcagtggtaccagcagaagcccggccagccccccaagctgctgatctacgccaccagcaacgtggagagcggcgtgcccgccagattcagcggcagcggcagcggcaccgacttcagcctgaacatccaccccgtggaggaggacgacatcgccatgtacttctgccagcagagcagaaagctgcccagcaccttcggcggcggcaccaagctggagatcaagctcgagatccagaaccctgatcctgccgtgtaccagctgcgggatagcaagagcagcgacaagagcgtgtgtctgttcaccgacttcgacagccagaccaacgtgtcccagagcaaggactccgacgtgtacatcaccgataagtgcgtgctggacatgcggagcatggacttcaagagcaactccgccgtggcctggtccaacaagtccgatttcgcctgcgccaacgccttcaacaacagcattatccccgaggacacattcttcccaagccccgagagcagctgcgacgtgaagctggtggaaaagagcttcgagacagacaccaacctgaacttccagatcctgtacgagatcctgctgggcaaggccaccctgtacgccgtgctggtgtctgccctggtgctgatggctatggtcaagcggaaggacagccggggacgcgccaagagaagcggatctggcgtgaagcagaccctgaatttcgacctgctgaagctggctggcgacgtggaatccaacccaggccctactagtatggactggatttggcgcatccttttccttgtcggcgctgctaccggcgcgcattccttcgaagacgtgagactgcaggagagcggccccggccaggtgaagcccagccagaccgtgagcctgacctgcagcgtgaccggctacagcatcaccaacggcaaccactggtggaactggatcagacaggtgagcggcagcaagctggagtggatcggctacatcagcagcagcggcagcaccgacagcaaccccagcctgaagagcagaatcagcatcaccagagacaccagcaagaaccagctgttcctgcagctgaacagcgtgaccaccgaggacatcgccacctactactgcgccagaggctactacttcgactactggggccagggcaccaccctgaccgtgagcagcacgcgtgaggacctgaagaacgtgttcccacctgaggtggccgtgttcgagcctagcgaggccgagatcagccacacccagaaagccaccctcgtgtgcctggctaccggcttctaccccgaccatgtggaactgtcttggtgggtcaacggcaaagaggtgcacagcggcgtgtgtaccgacccccagccactgaaagaacagcccgccctgaacgacagccggtactgcctgagcagcagactgagagtgtccgccaccttctggcagaacccccggaaccacttcagatgccaggtgcagttctacggcctgagcgagaacgacgagtggacccaggacagagccaagcccgtgacccagatcgtgtctgccgaagcctggggcagagccgattgcggctttaccagcgagagctaccagcagggcgtgctgagcgccaccaacctgagcgtgatcggcttcagaatcctgctgctgaaagtggccggctttaacctgctgatgaccctgcggctgtggtccagc

SEQ ID NO: 5526 - DNA, 2277 bp, synthetic construct
  source 1..2277: mol_type = other DNA
atggccttaccagtgaccgccttgctcctgccgctggccttgctgctccacgccgccaggccggaagtgcagctggttgaatctggcggaggactggttcagcctggcggatctctgagactgtcttgtgccgccagcggcttcagcttcagcgacttttggatgagctgggtccgacaggcccctggcaaaggacttgaatgggtcgccacaatcagccaggccggcagcgagaaggactacgtggactctgtgaagggcagattcaccatcagccgggacaacgccaagaagtccctgtacctccagatgaacagcctgagagccgaggacaccgccgtgtactattgtgcctctggcgtgtacagcttcgactacagaggccagggcaccctggtcacagtctcttctggtaccggcggaggcggatctggcggcggaggtagcggtggcggaggatctgaattcgacatccagatgacccagagccccagcagcctgtctgccagcgtgggcgacagagtgaccatcacctgtagagccagccaggacgtgaacaccgccgtggcctggtatcagcagaagcctggcaaggcccccaagctgctgatctacagcgccagcttcctggaaagcggcgtgcccagcagattcagcggaagcagaagcggcaccgacttcaccctgaccatcagctccctccagcccgaggacttcgccacctactactgccagcagcactacaccacccctcccaccttcggccagaccaaggtggaaatcaagagactcgagatccagaaccctgatcctgccgtgtaccagctgcgggatagcaagagcagcgacaagagcgtgtgtctgttcaccgacttcgacagccagaccaacgtgtcccagagcaaggactccgacgtgtacatcaccgataagtgcgtgctggacatgcggagcatggacttcaagagcaactccgccgtggcctggtccaacaagtccgatttcgcctgcgccaacgccttcaacaacagcattatccccgaggacacattcttcccaagccccgagagcagctgcgacgtgaagctggtggaaaagagcttcgagacagacaccaacctgaacttccagatcctgtacgagatcctgctgggcaaggccaccctgtacgccgtgctggtgtctgccctggtgctgatggctatggtcaagcggaaggacagccggggacgcgccaagagaagcggatctggcgtgaagcagaccctgaatttcgacctgctgaagctggctggcgacgtggaatccaacccaggccctactagtatggactggatttggcgcatccttttccttgtcggcgctgctaccggcgcgcattccttcgaagaagtgcaactggtggaatctggcggcggactggtgcagcctggcggatctctgagactgagctgtgccgccagcggcttcaacatcaaggacacctacatccactgggtgcgccaggcccctggaaagggactggaatgggtggcccggatctaccccaccaacggctacaccagatacgccgacagcgtgaagggccggttcaccatcagcgccgacaccagcaagaataccgcctacctccagatgaacagcctgcgggccgaggataccgccgtgtactactgctcaagatggggaggcgacggcttctacgctatggacgtgtggggccagggcacccttgtgaccgtgtcatctacgcgtgaggacctgaagaacgtgttcccacctgaggtggccgtgttcgagcctagcgaggccgagatcagccacacccagaaagccaccctcgtgtgcctggctaccggcttctaccccgaccatgtggaactgtcttggtgggtcaacggcaaagaggtgcacagcggcgtgtgtaccgacccccagccactgaaagaacagcccgccctgaacgacagccggtactgcctgagcagcagactgagagtgtccgccaccttctggcagaacccccggaaccacttcagatgccaggtgcagttctacggcctgagcgagaacgacgagtggacccaggacagagccaagcccgtgacccagatcgtgtctgccgaagcctggggcagagccgattgcggctttaccagcgagagctaccagcagggcgtgctgagcgccaccaacctgagcgtgatcggcttcagaatcctgctgctgaaagtggccggctttaacctgctgatgaccctgcggctgtggtccagc

SEQ ID NO: 5527 - DNA, 2274 bp, synthetic construct
  source 1..2274: mol_type = other DNA
atggccttaccagtgaccgccttgctcctgccgctggccttgctgctccacgccgccaggccggaagtgcagctggttgaatctggcggaggactggttcagcctggcggatctctgagactgtcttgtgccgccagcggcttcagcttcagcgacttttggatgagctgggtccgacaggcccctggcaaaggacttgaatgggtcgccacaatcagccaggccggcagcgagaaggactacgtggactctgtgaagggcagattcaccatcagccgggacaacgccaagaagtccctgtacctccagatgaacagcctgagagccgaggacaccgccgtgtactattgtgcctctggcgtgtacagcttcgactacagaggccagggcaccctggtcacagtctcttctggtaccggcggaggcggatctggcggcggaggtagcggtggcggaggatctgaattcgaccagagcgtgctgacacagcctcctagcgtgtcagtggcccctggcaagaccgccagaatcccctgcgagggcaactacatcggcagcagcaacgtgcactggtatcagcagaagcccggccaggctcccgtgctcgtgatccacttcgacagcgacagacccagcggcatccccgacagattcagcggcagcaacagcggcaacatggctaccctgaccatcagcagagtggaagccggggacgaggccgactactactgtcaagtgtgggagaaccacggctgggtgttcggcggaggcaccaagctgacagtgctgtctctcgagatccagaaccctgatcctgccgtgtaccagctgcgggatagcaagagcagcgacaagagcgtgtgtctgttcaccgacttcgacagccagaccaacgtgtcccagagcaaggactccgacgtgtacatcaccgataagtgcgtgctggacatgcggagcatggacttcaagagcaactccgccgtggcctggtccaacaagtccgatttcgcctgcgccaacgccttcaacaacagcattatccccgaggacacattcttcccaagccccgagagcagctgcgacgtgaagctggtggaaaagagcttcgagacagacaccaacctgaacttccagatcctgtacgagatcctgctgggcaaggccaccctgtacgccgtgctggtgtctgccctggtgctgatggctatggtcaagcggaaggacagccggggacgcgccaagagaagcggatctggcgtgaagcagaccctgaatttcgacctgctgaagctggctggcgacgtggaatccaacccaggccctactagtatggactggatttggcgcatccttttccttgtcggcgctgctaccggcgcgcattccttcgaagaggtgcaactggtggaaacaggcggcggactggtgcagcctggcgagtctctgagactgagctgtgccgccagcggcttcaccttcagcgactacgagatgaactgggtgcgccaggcccctggaaagggcctggaatgggtgtcctacatcagcagctccggcagcaccatctactacgccgacagcgtgaagggccggtttaccatctaccgggacaacgccaagaacagcctgtacctccagatgaactccctgcgggccgaggacaccgccctgtactattgtgccagagcctggggcgtgggaccccctgattattggggacagggcaccctcgtgaccgtgtcctctacgcgtgaggacctgaagaacgtgttcccacctgaggtggccgtgttcgagcctagcgaggccgagatcagccacacccagaaagccaccctcgtgtgcctggctaccggcttctaccccgaccatgtggaactgtcttggtgggtcaacggcaaagaggtgcacagcggcgtgtgtaccgacccccagccactgaaagaacagcccgccctgaacgacagccggtactgcctgagcagcagactgagagtgtccgccaccttctggcagaacccccggaaccacttcagatgccaggtgcagttctacggcctgagcgagaacgacgagtggacccaggacagagccaagcccgtgacccagatcgtgtctgccgaagcctggggcagagccgattgcggctttaccagcgagagctaccagcagggcgtgctgagcgccaccaacctgagcgtgatcggcttcagaatcctgctgctgaaagtggccggctttaacctgctgatgaccctgcggctgtggtccagc

SEQ ID NO: 5528 - DNA, 2298 bp, synthetic construct
  source 1..2298: mol_type = other DNA
atggccttaccagtgaccgccttgctcctgccgctggccttgctgctccacgccgccaggccggaagtgcagctggttgaatctggcggaggactggttcagcctggcggatctctgagactgtcttgtgccgccagcggcttcagcttcagcgacttttggatgagctgggtccgacaggcccctggcaaaggacttgaatgggtcgccacaatcagccaggccggcagcgagaaggactacgtggactctgtgaagggcagattcaccatcagccgggacaacgccaagaagtccctgtacctccagatgaacagcctgagagccgaggacaccgccgtgtactattgtgcctctggcgtgtacagcttcgactacagaggccagggcaccctggtcacagtctcttctggtaccggcggaggcggatctggcggcggaggtagcggtggcggaggatctgaattcgacatccagatgacccagagccccagcagcctgtctgccagcgtgggcgataccgtgaccatcacctgtcaggccaacggctacctgaactggtatcagcagcggagaggcaaggcccccaagctgctgatctacgacggcagcaagctggaaagaggcgtgcccagcagattcagcggcagaagatggggccaggagtacaacctgaccatcaacaacctccagcccgaggatattgccacatacttttgccaggtgtacgagttcgtggtgcccggcacacggctggacctgaagagaacagtggctgctcctctcgagatccagaaccctgatcctgccgtgtaccagctgcgggatagcaagagcagcgacaagagcgtgtgtctgttcaccgacttcgacagccagaccaacgtgtcccagagcaaggactccgacgtgtacatcaccgataagtgcgtgctggacatgcggagcatggacttcaagagcaactccgccgtggcctggtccaacaagtccgatttcgcctgcgccaacgccttcaacaacagcattatccccgaggacacattcttcccaagccccgagagcagctgcgacgtgaagctggtggaaaagagcttcgagacagacaccaacctgaacttccagatcctgtacgagatcctgctgggcaaggccaccctgtacgccgtgctggtgtctgccctggtgctgatggctatggtcaagcggaaggacagccggggacgcgccaagagaagcggatctggcgtgaagcagaccctgaatttcgacctgctgaagctggctggcgacgtggaatccaacccaggccctactagtatggactggatttggcgcatccttttccttgtcggcgctgctaccggcgcgcattccttcgaacaggtgcagctgctccagtctggcgctgccgtgacaaagcctggcgcttctgtgcgggtgtcctgtgaagccagcggctacaacatccgggactacttcatccactggtggcggcaggctccaggccagggactccagtgggtgggatggatcaaccccaagaccggccagcccaacaaccccagacagttccagggcagagtgtccctgaccagacacgccagctgggacttcgacaccttcagcttctacatggatctgaaggccctgcggagcgacgataccgccgtgtacttctgcgccagacagagaagcgactactgggatttcgacgtgtggggcagcggcacccaagtgacagtgtctagcgccagcaccaagggacccacgcgtgaggacctgaagaacgtgttcccacctgaggtggccgtgttcgagcctagcgaggccgagatcagccacacccagaaagccaccctcgtgtgcctggctaccggcttctaccccgaccatgtggaactgtcttggtgggtcaacggcaaagaggtgcacagcggcgtgtgtaccgacccccagccactgaaagaacagcccgccctgaacgacagccggtactgcctgagcagcagactgagagtgtccgccaccttctggcagaacccccggaaccacttcagatgccaggtgcagttctacggcctgagcgagaacgacgagtggacccaggacagagccaagcccgtgacccagatcgtgtctgccgaagcctggggcagagccgattgcggctttaccagcgagagctaccagcagggcgtgctgagcgccaccaacctgagcgtgatcggcttcagaatcctgctgctgaaagtggccggctttaacctgctgatgaccctgcggctgtggtccagc

SEQ ID NO: 5529 - DNA, 2316 bp, synthetic construct
  source 1..2316: mol_type = other DNA
atggccttaccagtgaccgccttgctcctgccgctggccttgctgctccacgccgccaggccggaagtgcagctggttgaatctggcggaggactggttcagcctggcggatctctgagactgtcttgtgccgccagcggcttcagcttcagcgacttttggatgagctgggtccgacaggcccctggcaaaggacttgaatgggtcgccacaatcagccaggccggcagcgagaaggactacgtggactctgtgaagggcagattcaccatcagccgggacaacgccaagaagtccctgtacctccagatgaacagcctgagagccgaggacaccgccgtgtactattgtgcctctggcgtgtacagcttcgactacagaggccagggcaccctggtcacagtctcttctggtaccggcggaggcggatctggcggcggaggtagcggtggcggaggatctgaattccagtctgccctgacacagcctcctagcgcctctggctctcccggccagagcatcaccatcagctgtaccggcaccagcaacaacttcgtgtcctggtatcagcagcacgccggcaaggcccccaagctcgtgatctacgacgtgaacaagcggcccagcggcgtgcccgatagattcagcggcagcaagagcggcaacaccgccagcctgacagtgtctggcctccagaccgatgacgaggccgtgtactactgcggcagcctcgtgggcaactgggacgtgatctttggcggaggcaccaagctgaccgtgctgctcgagatccagaaccctgatcctgccgtgtaccagctgcgggatagcaagagcagcgacaagagcgtgtgtctgttcaccgacttcgacagccagaccaacgtgtcccagagcaaggactccgacgtgtacatcaccgataagtgcgtgctggacatgcggagcatggacttcaagagcaactccgccgtggcctggtccaacaagtccgatttcgcctgcgccaacgccttcaacaacagcattatccccgaggacacattcttcccaagccccgagagcagctgcgacgtgaagctggtggaaaagagcttcgagacagacaccaacctgaacttccagatcctgtacgagatcctgctgggcaaggccaccctgtacgccgtgctggtgtctgccctggtgctgatggctatggtcaagcggaaggacagccggggacgcgccaagagaagcggatctggcgtgaagcagaccctgaatttcgacctgctgaagctggctggcgacgtggaatccaacccaggccctactagtatggactggatttggcgcatccttttccttgtcggcgctgctaccggcgcgcattccttcgaacagccccagctccaggaatctggccccacactggtggaagccagcgagacactgagcctgacctgtgccgtgtccggcgattctaccgccgcctgcaatagcttctggggctgggtgcgccagcctcctggaaagggactggaatgggtgggaagcctgagccactgcgccagctattggaaccggggctggacctaccacaaccccagcctgaagtccagactgaccctggccctggacacccccaagaacctggtgttcctgaagctgaacagcgtgacagccgccgacaccgccacctactactgtgccagatttggcggcgaggtgctgcggtacaccgactggcctaaacctgcctgggtggacctgtggggcagaggaacactcgtgaccgtgtccagcacgcgtgaggacctgaagaacgtgttcccacctgaggtggccgtgttcgagcctagcgaggccgagatcagccacacccagaaagccaccctcgtgtgcctggctaccggcttctaccccgaccatgtggaactgtcttggtgggtcaacggcaaagaggtgcacagcggcgtgtgtaccgacccccagccactgaaagaacagcccgccctgaacgacagccggtactgcctgagcagcagactgagagtgtccgccaccttctggcagaacccccggaaccacttcagatgccaggtgcagttctacggcctgagcgagaacgacgagtggacccaggacagagccaagcccgtgacccagatcgtgtctgccgaagcctggggcagagccgattgcggctttaccagcgagagctaccagcagggcgtgctgagcgccaccaacctgagcgtgatcggcttcagaatcctgctgctgaaagtggccggctttaacctgctgatgaccctgcggctgtggtccagc

SEQ ID NO: 5530 - DNA, 2271 bp, synthetic construct
  source 1..2271: mol_type = other DNA
atggccttaccagtgaccgccttgctcctgccgctggccttgctgctccacgccgccaggccggaagtgcagctggttgaatctggcggaggactggttcagcctggcggatctctgagactgtcttgtgccgccagcggcttcagcttcagcgacttttggatgagctgggtccgacaggcccctggcaaaggacttgaatgggtcgccacaatcagccaggccggcagcgagaaggactacgtggactctgtgaagggcagattcaccatcagccgggacaacgccaagaagtccctgtacctccagatgaacagcctgagagccgaggacaccgccgtgtactattgtgcctctggcgtgtacagcttcgactacagaggccagggcaccctggtcacagtctcttctggtaccggcggaggcggatctggcggcggaggtagcggtggcggaggatctgaattcgagatcgtgctgacacagagccctggcaccctgagcctgtctccaggcgagacagccatcatcagctgccggacaagccagtacggcagcctggcctggtatcagcagaggccaggacaggcccccagactcgtgatctacagcggcagcacaagagccgccggaatccccgatagattcagcggctccagatggggacccgactacaacctgaccatcagcaacctggaaagcggcgacttcggcgtgtactactgccagcagtacgagttcttcggccagggcaccaaggtgcaggtggacatcaaaagactcgagatccagaaccctgatcctgccgtgtaccagctgcgggatagcaagagcagcgacaagagcgtgtgtctgttcaccgacttcgacagccagaccaacgtgtcccagagcaaggactccgacgtgtacatcaccgataagtgcgtgctggacatgcggagcatggacttcaagagcaactccgccgtggcctggtccaacaagtccgatttcgcctgcgccaacgccttcaacaacagcattatccccgaggacacattcttcccaagccccgagagcagctgcgacgtgaagctggtggaaaagagcttcgagacagacaccaacctgaacttccagatcctgtacgagatcctgctgggcaaggccaccctgtacgccgtgctggtgtctgccctggtgctgatggctatggtcaagcggaaggacagccggggacgcgccaagagaagcggatctggcgtgaagcagaccctgaatttcgacctgctgaagctggctggcgacgtggaatccaacccaggccctactagtatggactggatttggcgcatccttttccttgtcggcgctgctaccggcgcgcattccttcgaacaggtgcagctggtgcagtctggcggccagatgaagaaacccggcgagagcatgagaatcagctgtcgggcctccggctacgagttcatcgactgcaccctgaactggatcagactggcccctggcaagcggcctgagtggatgggatggctgaagcctagaggcggagccgtgaactacgccagacctctccagggcagagtgaccatgaccagggacgtgtacagcgataccgccttcctggaactgcggagcctgaccgtggatgataccgccgtgtacttctgcaccagaggcaagaactgcgattacaactgggacttcgagcactggggcagaggcacccctgtgatcgtgtctagcacgcgtgaggacctgaagaacgtgttcccacctgaggtggccgtgttcgagcctagcgaggccgagatcagccacacccagaaagccaccctcgtgtgcctggctaccggcttctaccccgaccatgtggaactgtcttggtgggtcaacggcaaagaggtgcacagcggcgtgtgtaccgacccccagccactgaaagaacagcccgccctgaacgacagccggtactgcctgagcagcagactgagagtgtccgccaccttctggcagaacccccggaaccacttcagatgccaggtgcagttctacggcctgagcgagaacgacgagtggacccaggacagagccaagcccgtgacccagatcgtgtctgccgaagcctggggcagagccgattgcggctttaccagcgagagctaccagcagggcgtgctgagcgccaccaacctgagcgtgatcggcttcagaatcctgctgctgaaagtggccggctttaacctgctgatgaccctgcggctgtggtccagc

SEQ ID NO: 5531 - DNA, 2301 bp, synthetic construct
  source 1..2301: mol_type = other DNA
atggccttaccagtgaccgccttgctcctgccgctggccttgctgctccacgccgccaggccggaagtgcagctggttgaatctggcggaggactggttcagcctggcggatctctgagactgtcttgtgccgccagcggcttcagcttcagcgacttttggatgagctgggtccgacaggcccctggcaaaggacttgaatgggtcgccacaatcagccaggccggcagcgagaaggactacgtggactctgtgaagggcagattcaccatcagccgggacaacgccaagaagtccctgtacctccagatgaacagcctgagagccgaggacaccgccgtgtactattgtgcctctggcgtgtacagcttcgactacagaggccagggcaccctggtcacagtctcttctggtaccggcggaggcggatctggcggcggaggtagcggtggcggaggatctgaattcgagctggtgctgacacagagccctggcaccctgtctctgtctgccggcgaaagagccaccctgagctgtagagccagccagagcgtgtcctctggcagcctggcttggtatcagcagaagccaggccaggcccccagactgctgatctacggcgcttctaccagagccaccggcatccccgatagattcagcggctctggctccggcaccgacttcaccctgacaatcggcagactggaacccgaggacctggccgtgtactactgccagcagtacggcaccagcccctacacattcggccagggcaccaagctggaaatcctcgagatccagaaccctgatcctgccgtgtaccagctgcgggatagcaagagcagcgacaagagcgtgtgtctgttcaccgacttcgacagccagaccaacgtgtcccagagcaaggactccgacgtgtacatcaccgataagtgcgtgctggacatgcggagcatggacttcaagagcaactccgccgtggcctggtccaacaagtccgatttcgcctgcgccaacgccttcaacaacagcattatccccgaggacacattcttcccaagccccgagagcagctgcgacgtgaagctggtggaaaagagcttcgagacagacaccaacctgaacttccagatcctgtacgagatcctgctgggcaaggccaccctgtacgccgtgctggtgtctgccctggtgctgatggctatggtcaagcggaaggacagccggggacgcgccaagagaagcggatctggcgtgaagcagaccctgaatttcgacctgctgaagctggctggcgacgtggaatccaacccaggccctactagtatggactggatttggcgcatccttttccttgtcggcgctgctaccggcgcgcattccttcgaactggaacagagcggagccgaagtgaagaaacccggcagcagcgtgcaggtgtcctgcaaagcaagcggcggcaccttctctatgtacggcttcaactgggtgcgccaggctcctggacacggcctggaatggatgggcggcatcatccccatcttcggcacctccaactacgcccagaaattccggggcagagtgaccttcaccgccgaccaggccacaagcaccgcctacatggaactgaccaacctgcggagcgacgacaccgccgtgtattattgcgccagagacttcggccccgactgggaggatggcgacagctacgatggcagcggcagaggcttcttcgacttctggggccagggaacccttgtgaccgtgtcctcaacgcgtgaggacctgaagaacgtgttcccacctgaggtggccgtgttcgagcctagcgaggccgagatcagccacacccagaaagccaccctcgtgtgcctggctaccggcttctaccccgaccatgtggaactgtcttggtgggtcaacggcaaagaggtgcacagcggcgtgtgtaccgacccccagccactgaaagaacagcccgccctgaacgacagccggtactgcctgagcagcagactgagagtgtccgccaccttctggcagaacccccggaaccacttcagatgccaggtgcagttctacggcctgagcgagaacgacgagtggacccaggacagagccaagcccgtgacccagatcgtgtctgccgaagcctggggcagagccgattgcggctttaccagcgagagctaccagcagggcgtgctgagcgccaccaacctgagcgtgatcggcttcagaatcctgctgctgaaagtggccggctttaacctgctgatgaccctgcggctgtggtccagc

SEQ ID NO: 5532 - DNA, 2241 bp, synthetic construct
  source 1..2241: mol_type = other DNA
atggccttaccagtgaccgccttgctcctgccgctggccttgctgctccacgccgccaggccggaagtgcagctggttgaatctggcggaggactggttcagcctggcggatctctgagactgtcttgtgccgccagcggcttcagcttcagcgacttttggatgagctgggtccgacaggcccctggcaaaggacttgaatgggtcgccacaatcagccaggccggcagcgagaaggactacgtggactctgtgaagggcagattcaccatcagccgggacaacgccaagaagtccctgtacctccagatgaacagcctgagagccgaggacaccgccgtgtactattgtgcctctggcgtgtacagcttcgactacagaggccagggcaccctggtcacagtctcttctggtaccggcggaggcggatctggcggcggaggtagcggtggcggaggatctgaattcgacatccagatgacccagagccccagcagcctgtctgccagcgtgggcgacagagtgaccatcacctgtcaggccagccaggacatcaacaactacctgaactggtatcagcagaagcccggcaaggcccccaagctgctgatctacgacgccagcaatctgcagaccggcgtgcccagcagattttccggctctggcagcggcaccgacttcaccttcaccatcgaggacattgccacctactactgccagcagtacaccttcggccctggcaccaaggtggacatcaaactcgagatccagaaccctgatcctgccgtgtaccagctgcgggatagcaagagcagcgacaagagcgtgtgtctgttcaccgacttcgacagccagaccaacgtgtcccagagcaaggactccgacgtgtacatcaccgataagtgcgtgctggacatgcggagcatggacttcaagagcaactccgccgtggcctggtccaacaagtccgatttcgcctgcgccaacgccttcaacaacagcattatccccgaggacacattcttcccaagccccgagagcagctgcgacgtgaagctggtggaaaagagcttcgagacagacaccaacctgaacttccagatcctgtacgagatcctgctgggcaaggccaccctgtacgccgtgctggtgtctgccctggtgctgatggctatggtcaagcggaaggacagccggggacgcgccaagagaagcggatctggcgtgaagcagaccctgaatttcgacctgctgaagctggctggcgacgtggaatccaacccaggccctactagtatggactggatttggcgcatccttttccttgtcggcgctgctaccggcgcgcattccttcgaagaagtgcaactgctggaatctggcggcggactggtgcagcctggcggatctctgagactgagctgtgccgccagcggcttcacctttagctggtacagcatgacctgggtgcgccaggcccctggcaaaggactggaatgggtgtccagcatcgtgccctggggcgatttcacccagtacgccgatagcgtgaagggccggttcaccatcagccgggacaacagcaagaacaccctgtacctgcagatgaacagcctgcgggccgaggacaccgccgtgtactattgtgccaagggacctggctggggcagcttcgatctgtggggcagaggaacccttgtgaccgtgtccagcacgcgtgaggacctgaagaacgtgttcccacctgaggtggccgtgttcgagcctagcgaggccgagatcagccacacccagaaagccaccctcgtgtgcctggctaccggcttctaccccgaccatgtggaactgtcttggtgggtcaacggcaaagaggtgcacagcggcgtgtgtaccgacccccagccactgaaagaacagcccgccctgaacgacagccggtactgcctgagcagcagactgagagtgtccgccaccttctggcagaacccccggaaccacttcagatgccaggtgcagttctacggcctgagcgagaacgacgagtggacccaggacagagccaagcccgtgacccagatcgtgtctgccgaagcctggggcagagccgattgcggctttaccagcgagagctaccagcagggcgtgctgagcgccaccaacctgagcgtgatcggcttcagaatcctgctgctgaaagtggccggctttaacctgctgatgaccctgcggctgtggtccagc

SEQ ID NO: 5533 - DNA, 2271 bp, synthetic construct
  source 1..2271: mol_type = other DNA
atggccttaccagtgaccgccttgctcctgccgctggccttgctgctccacgccgccaggccggaagtgcagctggttgaatctggcggaggactggttcagcctggcggatctctgagactgtcttgtgccgccagcggcttcagcttcagcgacttttggatgagctgggtccgacaggcccctggcaaaggacttgaatgggtcgccacaatcagccaggccggcagcgagaaggactacgtggactctgtgaagggcagattcaccatcagccgggacaacgccaagaagtccctgtacctccagatgaacagcctgagagccgaggacaccgccgtgtactattgtgcctctggcgtgtacagcttcgactacagaggccagggcaccctggtcacagtctcttctggtaccggcggaggcggatctggcggcggaggtagcggtggcggaggatctgaattcgacatccagatgacccagagccccagcagcctgtctgccagcgtgggcgacagagtgaccatcacctgtaccgccagcctgagcgtgtccagcacctacctgcactggtatcagcagaagcccggcagcagccccaagctgtggatctacagcaccagcaacctggcctccggcgtgcccagcagattttctggcagcggctctggcaccagctacaccctgaccatcagctccctccagcccgaggacttcgccacctactactgccaccagtaccacagaagccccctgacctttggcggaggcaccaaggtggaaatcaagagactcgagatccagaaccctgatcctgccgtgtaccagctgcgggatagcaagagcagcgacaagagcgtgtgtctgttcaccgacttcgacagccagaccaacgtgtcccagagcaaggactccgacgtgtacatcaccgataagtgcgtgctggacatgcggagcatggacttcaagagcaactccgccgtggcctggtccaacaagtccgatttcgcctgcgccaacgccttcaacaacagcattatccccgaggacacattcttcccaagccccgagagcagctgcgacgtgaagctggtggaaaagagcttcgagacagacaccaacctgaacttccagatcctgtacgagatcctgctgggcaaggccaccctgtacgccgtgctggtgtctgccctggtgctgatggctatggtcaagcggaaggacagccggggacgcgccaagagaagcggatctggcgtgaagcagaccctgaatttcgacctgctgaagctggctggcgacgtggaatccaacccaggccctactagtatggactggatttggcgcatccttttccttgtcggcgctgctaccggcgcgcattccttcgaagaagtgcaactggtggaatctggcggcggactggtgcagcctggcggatctctgagactgagctgtgccgccagcggcttcagcctgaccaaatacggcgtgcactgggtgcgccaggcccctggaaaaggactggaatgggtgggagtgaagtgggctggcggctccaccgactacaacagcgccctgatgagccggttcaccatcagcaaggacaacgccaagaacagcctgtacctccagatgaactccctgcgggccgaggacaccgccgtgtactactgtgccagagatcaccgggacgctatggactactggggccagggaacactcgtgaccgtgtcctctacgcgtgaggacctgaagaacgtgttcccacctgaggtggccgtgttcgagcctagcgaggccgagatcagccacacccagaaagccaccctcgtgtgcctggctaccggcttctaccccgaccatgtggaactgtcttggtgggtcaacggcaaagaggtgcacagcggcgtgtgtaccgacccccagccactgaaagaacagcccgccctgaacgacagccggtactgcctgagcagcagactgagagtgtccgccaccttctggcagaacccccggaaccacttcagatgccaggtgcagttctacggcctgagcgagaacgacgagtggacccaggacagagccaagcccgtgacccagatcgtgtctgccgaagcctggggcagagccgattgcggctttaccagcgagagctaccagcagggcgtgctgagcgccaccaacctgagcgtgatcggcttcagaatcctgctgctgaaagtggccggctttaacctgctgatgaccctgcggctgtggtccagc

SEQ ID NO: 5534 - DNA, 2283 bp, synthetic construct
  source 1..2283: mol_type = other DNA
atggccttaccagtgaccgccttgctcctgccgctggccttgctgctccacgccgccaggccggaagtgcagctggttgaatctggcggaggactggttcagcctggcggatctctgagactgtcttgtgccgccagcggcttcagcttcagcgacttttggatgagctgggtccgacaggcccctggcaaaggacttgaatgggtcgccacaatcagccaggccggcagcgagaaggactacgtggactctgtgaagggcagattcaccatcagccgggacaacgccaagaagtccctgtacctccagatgaacagcctgagagccgaggacaccgccgtgtactattgtgcctctggcgtgtacagcttcgactacagaggccagggcaccctggtcacagtctcttctggtaccggcggaggcggatctggcggcggaggtagcggtggcggaggatctgaattcgacatccagatgacccagagccccagcagcctgtctgccagcgtgggcgacagagtgaccatcacatgcaaggccagccaggacgtgggaacagccgtggcctggtatcagcagaagcctggcaaggcccccaagctgctgatctacagcgccagctacagatccaccggcgtgcccagcagattttccggctctggcagcggcaccgacttcaccctgaccatctctagcctccagcccgaggacttcgccacctactactgccagcaccactactccgccccctggacatttggcggaggcaccaaggtggaaatcaagctcgagatccagaaccctgatcctgccgtgtaccagctgcgggatagcaagagcagcgacaagagcgtgtgtctgttcaccgacttcgacagccagaccaacgtgtcccagagcaaggactccgacgtgtacatcaccgataagtgcgtgctggacatgcggagcatggacttcaagagcaactccgccgtggcctggtccaacaagtccgatttcgcctgcgccaacgccttcaacaacagcattatccccgaggacacattcttcccaagccccgagagcagctgcgacgtgaagctggtggaaaagagcttcgagacagacaccaacctgaacttccagatcctgtacgagatcctgctgggcaaggccaccctgtacgccgtgctggtgtctgccctggtgctgatggctatggtcaagcggaaggacagccggggacgcgccaagagaagcggatctggcgtgaagcagaccctgaatttcgacctgctgaagctggctggcgacgtggaatccaacccaggccctactagtatggactggatttggcgcatccttttccttgtcggcgctgctaccggcgcgcattccttcgaagaagtgcaactggtggaatcaggcggcggactggtgcagcctggcggatctctgagactgagctgtgccgccagcggcttcaccttcagcagaaacggcatgagctgggtgcgccaggcccctggaaaaggactggaatgggtggcaaccgtgtccagcggcggcagctacatctactacgccgacagcgtgaagggccggttcaccatctccagagacaacgccaagaacagcctgtacctccagatgaactccctgcgggccgaggacaccgccgtgtactattgtgccagacagggcaccaccgccctggctaccagattcttcgatgtgtggggccagggcaccctcgtgaccgtgtcatctacgcgtgaggacctgaagaacgtgttcccacctgaggtggccgtgttcgagcctagcgaggccgagatcagccacacccagaaagccaccctcgtgtgcctggctaccggcttctaccccgaccatgtggaactgtcttggtgggtcaacggcaaagaggtgcacagcggcgtgtgtaccgacccccagccactgaaagaacagcccgccctgaacgacagccggtactgcctgagcagcagactgagagtgtccgccaccttctggcagaacccccggaaccacttcagatgccaggtgcagttctacggcctgagcgagaacgacgagtggacccaggacagagccaagcccgtgacccagatcgtgtctgccgaagcctggggcagagccgattgcggctttaccagcgagagctaccagcagggcgtgctgagcgccaccaacctgagcgtgatcggcttcagaatcctgctgctgaaagtggccggctttaacctgctgatgaccctgcggctgtggtccagc

SEQ ID NO: 5535 - DNA, 2271 bp, synthetic construct
  source 1..2271: mol_type = other DNA
atggccttaccagtgaccgccttgctcctgccgctggccttgctgctccacgccgccaggccggaagtgcagctggttgaatctggcggaggactggttcagcctggcggatctctgagactgtcttgtgccgccagcggcttcagcttcagcgacttttggatgagctgggtccgacaggcccctggcaaaggacttgaatgggtcgccacaatcagccaggccggcagcgagaaggactacgtggactctgtgaagggcagattcaccatcagccgggacaacgccaagaagtccctgtacctccagatgaacagcctgagagccgaggacaccgccgtgtactattgtgcctctggcgtgtacagcttcgactacagaggccagggcaccctggtcacagtctcttctggtaccggcggaggcggatctggcggcggaggtagcggtggcggaggatctgaattcgacatccagatgacccagagcccccctagcctgtctgcctctgtgggcggcaaagtgaccatcacatgcaaggccagccaggacatcgaccgctacatggcctggtatcaggacaagcccggcaagggacccaagctgctgatccacgataccagcaccctccagcccggcatccccagcagattttctggcagcggctccggcagagactacagcttcagcatcagcaacctggaacccgaggacattgccacctactactgcctccagtacgacaacctgtggaccttcggcggaggcaccaagctggaaatcaagagactcgagatccagaaccctgatcctgccgtgtaccagctgcgggatagcaagagcagcgacaagagcgtgtgtctgttcaccgacttcgacagccagaccaacgtgtcccagagcaaggactccgacgtgtacatcaccgataagtgcgtgctggacatgcggagcatggacttcaagagcaactccgccgtggcctggtccaacaagtccgatttcgcctgcgccaacgccttcaacaacagcattatccccgaggacacattcttcccaagccccgagagcagctgcgacgtgaagctggtggaaaagagcttcgagacagacaccaacctgaacttccagatcctgtacgagatcctgctgggcaaggccaccctgtacgccgtgctggtgtctgccctggtgctgatggctatggtcaagcggaaggacagccggggacgcgccaagagaagcggatctggcgtgaagcagaccctgaatttcgacctgctgaagctggctggcgacgtggaatccaacccaggccctactagtatggactggatttggcgcatccttttccttgtcggcgctgctaccggcgcgcattccttcgaacaggtgcaactggtgcagagcggagccgagcttgtgaagcctggcgcttccgtgaagatgagctgcaaagccagcggctacatcttcaccaactacaacatccactgggtcaagaagtccccaggccagggcctggaatggatcggagccatctaccccggaaacggcgacgccccttacagccagaagttccaggacagagccaccctgaccgccgacaccagcagcagcaccacctacatggaactgagcagcctgaccagcgaggacagcgccgtgtactattgcgtgcgggccaactgggatgtggccttcgcctattggggccagggcacactggtgtccgtgtcctctacgcgtgaggacctgaagaacgtgttcccacctgaggtggccgtgttcgagcctagcgaggccgagatcagccacacccagaaagccaccctcgtgtgcctggctaccggcttctaccccgaccatgtggaactgtcttggtgggtcaacggcaaagaggtgcacagcggcgtgtgtaccgacccccagccactgaaagaacagcccgccctgaacgacagccggtactgcctgagcagcagactgagagtgtccgccaccttctggcagaacccccggaaccacttcagatgccaggtgcagttctacggcctgagcgagaacgacgagtggacccaggacagagccaagcccgtgacccagatcgtgtctgccgaagcctggggcagagccgattgcggctttaccagcgagagctaccagcagggcgtgctgagcgccaccaacctgagcgtgatcggcttcagaatcctgctgctgaaagtggccggctttaacctgctgatgaccctgcggctgtggtccagc

SEQ ID NO: 5536 - DNA, 2274 bp, synthetic construct
  source 1..2274: mol_type = other DNA
atggccttaccagtgaccgccttgctcctgccgctggccttgctgctccacgccgccaggccggaagtgcagctggttgaatctggcggaggactggttcagcctggcggatctctgagactgtcttgtgccgccagcggcttcagcttcagcgacttttggatgagctgggtccgacaggcccctggcaaaggacttgaatgggtcgccacaatcagccaggccggcagcgagaaggactacgtggactctgtgaagggcagattcaccatcagccgggacaacgccaagaagtccctgtacctccagatgaacagcctgagagccgaggacaccgccgtgtactattgtgcctctggcgtgtacagcttcgactacagaggccagggcaccctggtcacagtctcttctggtaccggcggaggcggatctggcggcggaggtagcggtggcggaggatctgaattcgacatccagatgacccagagccctgccagcctgtctgcctctgtgggcgagacagtgaccatcacctgtcgggtgtccggcaacatccacaactacctggcctggtatcagcagaagcagggcaagagcccccaactgctggtgtacaacgccaagaccctggccgatggcgtgcccagcagattttctggctctggcagcggcacccagtacagcctgaagatcaacagcctccagcccgaggacttcggcagctactactgccagcacttctggtccaacccctacaccttcggcggaggcaccaagctggaaatcaagctcgagatccagaaccctgatcctgccgtgtaccagctgcgggatagcaagagcagcgacaagagcgtgtgtctgttcaccgacttcgacagccagaccaacgtgtcccagagcaaggactccgacgtgtacatcaccgataagtgcgtgctggacatgcggagcatggacttcaagagcaactccgccgtggcctggtccaacaagtccgatttcgcctgcgccaacgccttcaacaacagcattatccccgaggacacattcttcccaagccccgagagcagctgcgacgtgaagctggtggaaaagagcttcgagacagacaccaacctgaacttccagatcctgtacgagatcctgctgggcaaggccaccctgtacgccgtgctggtgtctgccctggtgctgatggctatggtcaagcggaaggacagccggggacgcgccaagagaagcggatctggcgtgaagcagaccctgaatttcgacctgctgaagctggctggcgacgtggaatccaacccaggccctactagtatggactggatttggcgcatccttttccttgtcggcgctgctaccggcgcgcattccttcgaacaggtgcaactccagcagtctggcgcttccgtgaaggtgtcctgcaaggccagcgaactcgtgcggcctggcacaggctacgccttcaccaattacctgatcgagtgggtcaagcagaggcccggacagggcctggaatggatcggagtgattaacccaggcagcggcggcaccaactacaacgagaagttcaagggcaaggccaccctgaccgccgacaagagcagcagcacagcctacatgcaactgagcagcctgaccagcgacgacagcgccgtgtacttctgcgcccggtacagaagctacgactggtacttcgacgtgtggggagccggcaccaccgtgacagtgtcatctacgcgtgaggacctgaagaacgtgttcccacctgaggtggccgtgttcgagcctagcgaggccgagatcagccacacccagaaagccaccctcgtgtgcctggctaccggcttctaccccgaccatgtggaactgtcttggtgggtcaacggcaaagaggtgcacagcggcgtgtgtaccgacccccagccactgaaagaacagcccgccctgaacgacagccggtactgcctgagcagcagactgagagtgtccgccaccttctggcagaacccccggaaccacttcagatgccaggtgcagttctacggcctgagcgagaacgacgagtggacccaggacagagccaagcccgtgacccagatcgtgtctgccgaagcctggggcagagccgattgcggctttaccagcgagagctaccagcagggcgtgctgagcgccaccaacctgagcgtgatcggcttcagaatcctgctgctgaaagtggccggctttaacctgctgatgaccctgcggctgtggtccagc

SEQ ID NO: 5537 - DNA, 2271 bp, synthetic construct
  source 1..2271: mol_type = other DNA
atggccttaccagtgaccgccttgctcctgccgctggccttgctgctccacgccgccaggccggaagtgcagctggttgaatctggcggaggactggttcagcctggcggatctctgagactgtcttgtgccgccagcggcttcagcttcagcgacttttggatgagctgggtccgacaggcccctggcaaaggacttgaatgggtcgccacaatcagccaggccggcagcgagaaggactacgtggactctgtgaagggcagattcaccatcagccgggacaacgccaagaagtccctgtacctccagatgaacagcctgagagccgaggacaccgccgtgtactattgtgcctctggcgtgtacagcttcgactacagaggccagggcaccctggtcacagtctcttctggtaccggcggaggcggatctggcggcggaggtagcggtggcggaggatctgaattcgacatccagatgacccagagcttcagcagcctgagcgccagcgtgggcgacagagtgaccatcacctgtagagccagccaggacatcagcaactacctgaactggtatcagcagaagcccggcaaggcccccaagctgctgatctactacaccagcagactgcacagcggcgtgcccagcagattttctggcagcggctccggcaccgactacaccctgacaatcagctccctgcagcccgaggacttcgctacctacttctgtcagcaaggcaacaccctgccctggacctttggcggaggcaccaagctggaaatcaagagactcgagatccagaaccctgatcctgccgtgtaccagctgcgggatagcaagagcagcgacaagagcgtgtgtctgttcaccgacttcgacagccagaccaacgtgtcccagagcaaggactccgacgtgtacatcaccgataagtgcgtgctggacatgcggagcatggacttcaagagcaactccgccgtggcctggtccaacaagtccgatttcgcctgcgccaacgccttcaacaacagcattatccccgaggacacattcttcccaagccccgagagcagctgcgacgtgaagctggtggaaaagagcttcgagacagacaccaacctgaacttccagatcctgtacgagatcctgctgggcaaggccaccctgtacgccgtgctggtgtctgccctggtgctgatggctatggtcaagcggaaggacagccggggacgcgccaagagaagcggatctggcgtgaagcagaccctgaatttcgacctgctgaagctggctggcgacgtggaatccaacccaggccctactagtatggactggatttggcgcatccttttccttgtcggcgctgctaccggcgcgcattccttcgaagaagtgcaactggtgcagtccggcggagggctggtgcagagcggaggatctctgagactgagctgcagagccagcggctacaccttcacccggtactggatgctgtgggtgcgccagaggccaggcaagggactggaatgggtggccgagatcaacccccggaacgaccggaccaactacaacgagaagttcaagacccggttcaccatcagcgtggacagaagcaagaacaccctgtacctgcagatggacagcctgcgggccgaggataccgccgtgtacttttgtgctctgggaggcggctacgctatggactactggggccagggaacccttgtgaccgtgtcctctacgcgtgaggacctgaagaacgtgttcccacctgaggtggccgtgttcgagcctagcgaggccgagatcagccacacccagaaagccaccctcgtgtgcctggctaccggcttctaccccgaccatgtggaactgtcttggtgggtcaacggcaaagaggtgcacagcggcgtgtgtaccgacccccagccactgaaagaacagcccgccctgaacgacagccggtactgcctgagcagcagactgagagtgtccgccaccttctggcagaacccccggaaccacttcagatgccaggtgcagttctacggcctgagcgagaacgacgagtggacccaggacagagccaagcccgtgacccagatcgtgtctgccgaagcctggggcagagccgattgcggctttaccagcgagagctaccagcagggcgtgctgagcgccaccaacctgagcgtgatcggcttcagaatcctgctgctgaaagtggccggctttaacctgctgatgaccctgcggctgtggtccagc

SEQ ID NO: 5538 - DNA, 2274 bp, synthetic construct
  source 1..2274: mol_type = other DNA
atggccttaccagtgaccgccttgctcctgccgctggccttgctgctccacgccgccaggccggaagtgcagctggttgaatctggcggaggactggttcagcctggcggatctctgagactgtcttgtgccgccagcggcttcagcttcagcgacttttggatgagctgggtccgacaggcccctggcaaaggacttgaatgggtcgccacaatcagccaggccggcagcgagaaggactacgtggactctgtgaagggcagattcaccatcagccgggacaacgccaagaagtccctgtacctccagatgaacagcctgagagccgaggacaccgccgtgtactattgtgcctctggcgtgtacagcttcgactacagaggccagggcaccctggtcacagtctcttctggtaccggcggaggcggatctggcggcggaggtagcggtggcggaggatctgaattcgacatccagatgacacagtctccggcgtcactgtccgcctccgtgggggagactgtgactattatttgtagggcatcagttaacatctactcttatttggcctggtaccagcagaagcaaggcaagagtcctcagctgctggtgtataatgcgaagatcctggcagagggcgtgccgagccggttctccggcagcggctcaggtacccaattttccctcaagatcaattcactgcagccagaggactttggcagttactattgtcaacaccactacggcacattcactttcgggtccggtacaaaattggagattaagcgactcgagatccagaaccctgatcctgccgtgtaccagctgcgggatagcaagagcagcgacaagagcgtgtgtctgttcaccgacttcgacagccagaccaacgtgtcccagagcaaggactccgacgtgtacatcaccgataagtgcgtgctggacatgcggagcatggacttcaagagcaactccgccgtggcctggtccaacaagtccgatttcgcctgcgccaacgccttcaacaacagcattatccccgaggacacattcttcccaagccccgagagcagctgcgacgtgaagctggtggaaaagagcttcgagacagacaccaacctgaacttccagatcctgtacgagatcctgctgggcaaggccaccctgtacgccgtgctggtgtctgccctggtgctgatggctatggtcaagcggaaggacagccggggacgcgccaagagaagcggatctggcgtgaagcagaccctgaatttcgacctgctgaagctggctggcgacgtggaatccaacccaggccctactagtatggactggatttggcgcatccttttccttgtcggcgctgctaccggcgcgcattccttcgaacaggtacagttgaaagaaagcgggcctggactggtagcgccttcccaatctctctccatcacgtgcaccatctctggcttctccctgacttcctatggagttcactgggtgaggcagccccccggcaagggactggaatggctggtcgtcatctggtccgacgggtccacaacctacaactccgctctgaaaagtcggctctctatttctaaagataatagcaagagccaggtgtttctgaaaatgaactctctgcagaccgatgatacggccatttactactgcgcttcacactatggctcaaccttggcattcgcttcctggggccacggaacactggtgaccgtttccgcagccacgcgtgaggacctgaagaacgtgttcccacctgaggtggccgtgttcgagcctagcgaggccgagatcagccacacccagaaagccaccctcgtgtgcctggctaccggcttctaccccgaccatgtggaactgtcttggtgggtcaacggcaaagaggtgcacagcggcgtgtgtaccgacccccagccactgaaagaacagcccgccctgaacgacagccggtactgcctgagcagcagactgagagtgtccgccaccttctggcagaacccccggaaccacttcagatgccaggtgcagttctacggcctgagcgagaacgacgagtggacccaggacagagccaagcccgtgacccagatcgtgtctgccgaagcctggggcagagccgattgcggctttaccagcgagagctaccagcagggcgtgctgagcgccaccaacctgagcgtgatcggcttcagaatcctgctgctgaaagtggccggctttaacctgctgatgaccctgcggctgtggtccagc

SEQ ID NO: 5539 - DNA, 2298 bp, synthetic construct
  source 1..2298: mol_type = other DNA
atggccttaccagtgaccgccttgctcctgccgctggccttgctgctccacgccgccaggccggaagtgcagctggttgaatctggcggaggactggttcagcctggcggatctctgagactgtcttgtgccgccagcggcttcagcttcagcgacttttggatgagctgggtccgacaggcccctggcaaaggacttgaatgggtcgccacaatcagccaggccggcagcgagaaggactacgtggactctgtgaagggcagattcaccatcagccgggacaacgccaagaagtccctgtacctccagatgaacagcctgagagccgaggacaccgccgtgtactattgtgcctctggcgtgtacagcttcgactacagaggccagggcaccctggtcacagtctcttctggtaccggcggaggcggatctggcggcggaggtagcggtggcggaggatctgaattcgacattgtgatgacccagtctcacaaattcatgtccacatcagtaggagacagggtcagcgtcacctgcaaggccagtcagaatgtgggtaataatgtagcctggtatcaacagaaaccagggcaatctcctaaagtactgatttactcggcatcctaccggtacagtggagtccctgatcgcttcacaggcagtggatctgggacagatttcactctcaccatcagtaatgtgcagtctgaagacttggcagagtatttctgtcagcaatataacacctatccattcacgttcggctcggggacaaagttggaaataaaactcgagatccagaaccctgatcctgccgtgtaccagctgcgggatagcaagagcagcgacaagagcgtgtgtctgttcaccgacttcgacagccagaccaacgtgtcccagagcaaggactccgacgtgtacatcaccgataagtgcgtgctggacatgcggagcatggacttcaagagcaactccgccgtggcctggtccaacaagtccgatttcgcctgcgccaacgccttcaacaacagcattatccccgaggacacattcttcccaagccccgagagcagctgcgacgtgaagctggtggaaaagagcttcgagacagacaccaacctgaacttccagatcctgtacgagatcctgctgggcaaggccaccctgtacgccgtgctggtgtctgccctggtgctgatggctatggtcaagcggaaggacagccggggacgcgccaagagaagcggatctggcgtgaagcagaccctgaatttcgacctgctgaagctggctggcgacgtggaatccaacccaggccctactagtatggactggatttggcgcatccttttccttgtcggcgctgctaccggcgcgcattccttcgaagaggtacagctggaggaaagcggtggaggactggtgcaacctggagggtctatgaagctctcttgcgtagcttctgggttcacgttctccaattactggatgaactgggtgcggcagtcccccgagaaaggcctggaatgggtagcagaaattcggttcaagtcccataactatgctacacactttgccgagtctgtcaaaggccggttcactattagtcgagacgacagcaagtcttcagtctacctgcagatgaataacttgcgggcagaggacacaggtatctactactgcaccaggagaatcggcaactccgactatgactggtggtactttgacgtctggggagcaggcaccagcgtgacggtgagttcagcctcaacgcgtgaggacctgaagaacgtgttcccacctgaggtggccgtgttcgagcctagcgaggccgagatcagccacacccagaaagccaccctcgtgtgcctggctaccggcttctaccccgaccatgtggaactgtcttggtgggtcaacggcaaagaggtgcacagcggcgtgtgtaccgacccccagccactgaaagaacagcccgccctgaacgacagccggtactgcctgagcagcagactgagagtgtccgccaccttctggcagaacccccggaaccacttcagatgccaggtgcagttctacggcctgagcgagaacgacgagtggacccaggacagagccaagcccgtgacccagatcgtgtctgccgaagcctggggcagagccgattgcggctttaccagcgagagctaccagcagggcgtgctgagcgccaccaacctgagcgtgatcggcttcagaatcctgctgctgaaagtggccggctttaacctgctgatgaccctgcggctgtggtccagc

SEQ ID NO: 5540 - DNA, 2277 bp, synthetic construct
  source 1..2277: mol_type = other DNA
atggccttaccagtgaccgccttgctcctgccgctggccttgctgctccacgccgccaggccggaagtgcagctggttgaatctggcggaggactggttcagcctggcggatctctgagactgtcttgtgccgccagcggcttcagcttcagcgacttttggatgagctgggtccgacaggcccctggcaaaggacttgaatgggtcgccacaatcagccaggccggcagcgagaaggactacgtggactctgtgaagggcagattcaccatcagccgggacaacgccaagaagtccctgtacctccagatgaacagcctgagagccgaggacaccgccgtgtactattgtgcctctggcgtgtacagcttcgactacagaggccagggcaccctggtcacagtctcttctggtaccggcggaggcggatctggcggcggaggtagcggtggcggaggatctgaattcgaccagatcgtgctgacccagtcccccgctattatgtccgcatcaccgggcgaaaaagtgacgatctcctgtagcgcttcatctagcgtctcctacatgtattggtatcaacagaaacctgggtctagcccaaagccgtggatctacagaaccagtaaccttgccagtggggtgccagcccgcttcagcggtagtggcagtggaacttcctatagcctcacaataagcaacatggaggctgaagatgccgctgcctattactgccagcagtaccacagttacccaaccacgttcggcgggggaactaagctcgaagtaaaactcgagatccagaaccctgatcctgccgtgtaccagctgcgggatagcaagagcagcgacaagagcgtgtgtctgttcaccgacttcgacagccagaccaacgtgtcccagagcaaggactccgacgtgtacatcaccgataagtgcgtgctggacatgcggagcatggacttcaagagcaactccgccgtggcctggtccaacaagtccgatttcgcctgcgccaacgccttcaacaacagcattatccccgaggacacattcttcccaagccccgagagcagctgcgacgtgaagctggtggaaaagagcttcgagacagacaccaacctgaacttccagatcctgtacgagatcctgctgggcaaggccaccctgtacgccgtgctggtgtctgccctggtgctgatggctatggtcaagcggaaggacagccggggacgcgccaagagaagcggatctggcgtgaagcagaccctgaatttcgacctgctgaagctggctggcgacgtggaatccaacccaggccctactagtatggactggatttggcgcatccttttccttgtcggcgctgctaccggcgcgcattccttcgaagaggtgcagctggtggaatctgggggcggcctggtccaacctaagggatcactcaagctctcttgtgcggccagcggattctctttcaatacctatgctatgaattgggtgagacaggcgcccggaaagggcctcgaatggatagcccatatccggtcaaaatcaaacaatttcgcaacctactatgcggactccgtgaaggaccgattttccatctcccgagatgcctccgagaatattctgttcctgcagatgaataacctcaagacagaggacaccgccatgtactactgtgtgcgccagggcggtgactttcccatggattactgggggcaggggaccagcgtgaccgtgagctctacgcgtgaggacctgaagaacgtgttcccacctgaggtggccgtgttcgagcctagcgaggccgagatcagccacacccagaaagccaccctcgtgtgcctggctaccggcttctaccccgaccatgtggaactgtcttggtgggtcaacggcaaagaggtgcacagcggcgtgtgtaccgacccccagccactgaaagaacagcccgccctgaacgacagccggtactgcctgagcagcagactgagagtgtccgccaccttctggcagaacccccggaaccacttcagatgccaggtgcagttctacggcctgagcgagaacgacgagtggacccaggacagagccaagcccgtgacccagatcgtgtctgccgaagcctggggcagagccgattgcggctttaccagcgagagctaccagcagggcgtgctgagcgccaccaacctgagcgtgatcggcttcagaatcctgctgctgaaagtggccggctttaacctgctgatgaccctgcggctgtggtccagc

SEQ ID NO: 5541 - DNA, 2274 bp, synthetic construct
  source 1..2274: mol_type = other DNA
atggccttaccagtgaccgccttgctcctgccgctggccttgctgctccacgccgccaggccggaagtgcagctggttgaatctggcggaggactggttcagcctggcggatctctgagactgtcttgtgccgccagcggcttcagcttcagcgacttttggatgagctgggtccgacaggcccctggcaaaggacttgaatgggtcgccacaatcagccaggccggcagcgagaaggactacgtggactctgtgaagggcagattcaccatcagccgggacaacgccaagaagtccctgtacctccagatgaacagcctgagagccgaggacaccgccgtgtactattgtgcctctggcgtgtacagcttcgactacagaggccagggcaccctggtcacagtctcttctggtaccggcggaggcggatctggcggcggaggtagcggtggcggaggatctgaattcgacgacatccagatgacccagagcagcagcagcttcagcgtgagcctgggcgacagagtgaccatcacctgcatggccagcgaggacatctacatcagactggcctggtaccagcagaagcccggcaacgcccccagactgctgatcagcgccgccaccagcctggagaccggcgtgcccagcagattcagcggcagcggcagcggcaaggactacaccctgagcatcaccagcctgcagaccgaggacgtgggcacctactactgccagcagtactggagcagcccctggaccttcggcggcggcaccaagctggagatcaacctcgagatccagaaccctgatcctgccgtgtaccagctgcgggatagcaagagcagcgacaagagcgtgtgtctgttcaccgacttcgacagccagaccaacgtgtcccagagcaaggactccgacgtgtacatcaccgataagtgcgtgctggacatgcggagcatggacttcaagagcaactccgccgtggcctggtccaacaagtccgatttcgcctgcgccaacgccttcaacaacagcattatccccgaggacacattcttcccaagccccgagagcagctgcgacgtgaagctggtggaaaagagcttcgagacagacaccaacctgaacttccagatcctgtacgagatcctgctgggcaaggccaccctgtacgccgtgctggtgtctgccctggtgctgatggctatggtcaagcggaaggacagccggggacgcgccaagagaagcggatctggcgtgaagcagaccctgaatttcgacctgctgaagctggctggcgacgtggaatccaacccaggccctactagtatggactggatttggcgcatccttttccttgtcggcgctgctaccggcgcgcattccttcgaagacgtgcagctgcaggagagcggccccggcctggtgaagcccagccagagcctgagcctgacctgcaccgtgaccggctacagcatcaccagcgactacacctggaactggatcagacagttccccggcaacaagctggagtggatgggctacatcacctacagcggcagcaccagctacaaccccagcctgaagagcagaaacagcatcaccagagacaccagcaagaaccagttcttcctgcagctgaacagcgtgaccaccgaggacaccgccacctactactgcgccagactgggcagaagatacacaatggactactggggccagggcaccagcgtgaccgtgagcagcacgcgtgaggacctgaagaacgtgttcccacctgaggtggccgtgttcgagcctagcgaggccgagatcagccacacccagaaagccaccctcgtgtgcctggctaccggcttctaccccgaccatgtggaactgtcttggtgggtcaacggcaaagaggtgcacagcggcgtgtgtaccgacccccagccactgaaagaacagcccgccctgaacgacagccggtactgcctgagcagcagactgagagtgtccgccaccttctggcagaacccccggaaccacttcagatgccaggtgcagttctacggcctgagcgagaacgacgagtggacccaggacagagccaagcccgtgacccagatcgtgtctgccgaagcctggggcagagccgattgcggctttaccagcgagagctaccagcagggcgtgctgagcgccaccaacctgagcgtgatcggcttcagaatcctgctgctgaaagtggccggctttaacctgctgatgaccctgcggctgtggtccagc

SEQ ID NO: 5542 - DNA, 2283 bp, synthetic construct
  source 1..2283: mol_type = other DNA
atggccttaccagtgaccgccttgctcctgccgctggccttgctgctccacgccgccaggccggaagtgcagctggttgaatctggcggaggactggttcagcctggcggatctctgagactgtcttgtgccgccagcggcttcagcttcagcgacttttggatgagctgggtccgacaggcccctggcaaaggacttgaatgggtcgccacaatcagccaggccggcagcgagaaggactacgtggactctgtgaagggcagattcaccatcagccgggacaacgccaagaagtccctgtacctccagatgaacagcctgagagccgaggacaccgccgtgtactattgtgcctctggcgtgtacagcttcgactacagaggccagggcaccctggtcacagtctcttctggtaccggcggaggcggatctggcggcggaggtagcggtggcggaggatctgaattcgacgacatccagatgacccagagccccagcagcctgtctgccagcgtgggcgacagagtgaccatcacctgtagagccagccagagcatcagcagctacctgaactggtatcagcagaagcccggcaaggcccccaaactgctgatctacgacgccagcaacctggaaaccggcgtgcccagcagattttccggcagcggctctggcaccgacttcaccttcaccatcagctccctccagcccgaggacattgccacctactactgccagcagtacgacaacctgcccctgacctttggcggaggcaccaaggtggacatcaagagactcgagatccagaaccctgatcctgccgtgtaccagctgcgggatagcaagagcagcgacaagagcgtgtgtctgttcaccgacttcgacagccagaccaacgtgtcccagagcaaggactccgacgtgtacatcaccgataagtgcgtgctggacatgcggagcatggacttcaagagcaactccgccgtggcctggtccaacaagtccgatttcgcctgcgccaacgccttcaacaacagcattatccccgaggacacattcttcccaagccccgagagcagctgcgacgtgaagctggtggaaaagagcttcgagacagacaccaacctgaacttccagatcctgtacgagatcctgctgggcaaggccaccctgtacgccgtgctggtgtctgccctggtgctgatggctatggtcaagcggaaggacagccggggacgcgccaagagaagcggatctggcgtgaagcagaccctgaatttcgacctgctgaagctggctggcgacgtggaatccaacccaggccctactagtatggactggatttggcgcatccttttccttgtcggcgctgctaccggcgcgcattccttcgaacaggtgcaactggtggaatctggcggcggagtggtgcagcctggcagaagcctgagactgagctgtgccgccagcggcttcacctttagcagctacgccatgcactgggtgcgccaggcccctggaaaaggcctggaatgggtggccgtgatctcctacgacggctccaacaagtattacgccgacagcgtgaagggccggttcaccatctccagagacaacagcaagaacaccctgtacctccagatgaacagcctgcgggccgaggacaccgccgtgtactattgtgccagggctcacaacagcagctcttggagcttcgactactggggccagggcaccctcgtgaccgtgtcatctacgcgtgaggacctgaagaacgtgttcccacctgaggtggccgtgttcgagcctagcgaggccgagatcagccacacccagaaagccaccctcgtgtgcctggctaccggcttctaccccgaccatgtggaactgtcttggtgggtcaacggcaaagaggtgcacagcggcgtgtgtaccgacccccagccactgaaagaacagcccgccctgaacgacagccggtactgcctgagcagcagactgagagtgtccgccaccttctggcagaacccccggaaccacttcagatgccaggtgcagttctacggcctgagcgagaacgacgagtggacccaggacagagccaagcccgtgacccagatcgtgtctgccgaagcctggggcagagccgattgcggctttaccagcgagagctaccagcagggcgtgctgagcgccaccaacctgagcgtgatcggcttcagaatcctgctgctgaaagtggccggctttaacctgctgatgaccctgcggctgtggtccagc

SEQ ID NO: 5543 - DNA, 2310 bp, synthetic construct
  source 1..2310: mol_type = other DNA
atggccttaccagtgaccgccttgctcctgccgctggccttgctgctccacgccgccaggccggaagtgcagctggttgaatctggcggaggactggttcagcctggcggatctctgagactgtcttgtgccgccagcggcttcagcttcagcgacttttggatgagctgggtccgacaggcccctggcaaaggacttgaatgggtcgccacaatcagccaggccggcagcgagaaggactacgtggactctgtgaagggcagattcaccatcagccgggacaacgccaagaagtccctgtacctccagatgaacagcctgagagccgaggacaccgccgtgtactattgtgcctctggcgtgtacagcttcgactacagaggccagggcaccctggtcacagtctcttctggtaccggcggaggcggatctggcggcggaggtagcggtggcggaggatctgaattcgacgacgtcgtgatgacccagagccctctgagcctgcctgtgtccctgggcgatcaggccagcatctcctgcagatccagccagagactggtgcacagcaacggcaacacctacctgcactggtatctgcagaagcccggccagagccccaagctgctgatctaccgggtgtccaacagattccccggcgtgcccgatagattcagcggctctggcagcggcaccgacttcaccctgaagatcagccgggtggaagccgaggacctgggcatctatttctgcagccagagcacccacgtgccctacacctttggcggaggcaccaagctggaaatcaagcggctcgagatccagaaccctgatcctgccgtgtaccagctgcgggatagcaagagcagcgacaagagcgtgtgtctgttcaccgacttcgacagccagaccaacgtgtcccagagcaaggactccgacgtgtacatcaccgataagtgcgtgctggacatgcggagcatggacttcaagagcaactccgccgtggcctggtccaacaagtccgatttcgcctgcgccaacgccttcaacaacagcattatccccgaggacacattcttcccaagccccgagagcagctgcgacgtgaagctggtggaaaagagcttcgagacagacaccaacctgaacttccagatcctgtacgagatcctgctgggcaaggccaccctgtacgccgtgctggtgtctgccctggtgctgatggctatggtcaagcggaaggacagccggggacgcgccaagagaagcggatctggcgtgaagcagaccctgaatttcgacctgctgaagctggctggcgacgtggaatccaacccaggccctactagtatggactggatttggcgcatccttttccttgtcggcgctgctaccggcgcgcattccttcgaagaagtgcggctgcagcagtctggccccgacctgattaagcctggggccagcgtgaagatgagctgcaaggccagcggctacaccttcaccggctacgtgatgcactgggtcaagcagaggccaggccagggcctggaatggatcggcttcatcaacccctacaacgacgacatccagagcaacgagcggttccggggcaaggccaccctgaccagcgataagagcagcaccaccgcctacatggaactgagcagcctgacctccgaggacagcgccgtgtactactgtgctaggggagccggctacaacttcgacggggcctacagattcttcgacttttggggccagggcaccacactgaccgtgtcctctacgcgtgaggacctgaagaacgtgttcccacctgaggtggccgtgttcgagcctagcgaggccgagatcagccacacccagaaagccaccctcgtgtgcctggctaccggcttctaccccgaccatgtggaactgtcttggtgggtcaacggcaaagaggtgcacagcggcgtgtgtaccgacccccagccactgaaagaacagcccgccctgaacgacagccggtactgcctgagcagcagactgagagtgtccgccaccttctggcagaacccccggaaccacttcagatgccaggtgcagttctacggcctgagcgagaacgacgagtggacccaggacagagccaagcccgtgacccagatcgtgtctgccgaagcctggggcagagccgattgcggctttaccagcgagagctaccagcagggcgtgctgagcgccaccaacctgagcgtgatcggcttcagaatcctgctgctgaaagtggccggctttaacctgctgatgaccctgcggctgtggtccagc

SEQ ID NO: 5544 - DNA, 2283 bp, synthetic construct
  source 1..2283: mol_type = other DNA
atggccttaccagtgaccgccttgctcctgccgctggccttgctgctccacgccgccaggccggaagtgcagctggttgaatctggcggaggactggttcagcctggcggatctctgagactgtcttgtgccgccagcggcttcagcttcagcgacttttggatgagctgggtccgacaggcccctggcaaaggacttgaatgggtcgccacaatcagccaggccggcagcgagaaggactacgtggactctgtgaagggcagattcaccatcagccgggacaacgccaagaagtccctgtacctccagatgaacagcctgagagccgaggacaccgccgtgtactattgtgcctctggcgtgtacagcttcgactacagaggccagggcaccctggtcacagtctcttctggtaccggcggaggcggatctggcggcggaggtagcggtggcggaggatctgaattcgacagctacgagctgacccagcctcctagcgtgtccgtgtctcctggacagaccgccaccatctcttgcagcggcgatcaactgggcgggaagtacggccactggtatcagaagaagcccggccagagccccgtgctggtgctgtaccaggacagaaaacggcctgccggcatccccgagagattcagcggaagcagcagcggcaacaccatcaccctgaccatcagcggcacccaggccgtggatgaggccgactactactgccaggcttgggacaccaatctgggcggcgtgttcggcggaggcaccaaagtgacagtgctgggacagctcgagatccagaaccctgatcctgccgtgtaccagctgcgggatagcaagagcagcgacaagagcgtgtgtctgttcaccgacttcgacagccagaccaacgtgtcccagagcaaggactccgacgtgtacatcaccgataagtgcgtgctggacatgcggagcatggacttcaagagcaactccgccgtggcctggtccaacaagtccgatttcgcctgcgccaacgccttcaacaacagcattatccccgaggacacattcttcccaagccccgagagcagctgcgacgtgaagctggtggaaaagagcttcgagacagacaccaacctgaacttccagatcctgtacgagatcctgctgggcaaggccaccctgtacgccgtgctggtgtctgccctggtgctgatggctatggtcaagcggaaggacagccggggacgcgccaagagaagcggatctggcgtgaagcagaccctgaatttcgacctgctgaagctggctggcgacgtggaatccaacccaggccctactagtatggactggatttggcgcatccttttccttgtcggcgctgctaccggcgcgcattccttcgaacaggtgcaactggtggaaagcggagccgaagtgaagaaacctggggccagcgtgaaggtgtcctgcaaggccagcggctacacctttaccggctactacatgcactgggtgcgccaggctccaggccagggactggaatggatgggccggatcaaccccaatagcggcggcaccaactacgcccagaaattccagggcagagtgaccatgaccagagacaccagcatcagcaccgcctacatggaactgagccggctgagaagcgacgacaccgccgtgtactactgcgccagccctagaggcagaggcagcgccttcgatatttggggccagggcacactcgtgaccgtgtcctctacgcgtgaggacctgaagaacgtgttcccacctgaggtggccgtgttcgagcctagcgaggccgagatcagccacacccagaaagccaccctcgtgtgcctggctaccggcttctaccccgaccatgtggaactgtcttggtgggtcaacggcaaagaggtgcacagcggcgtgtgtaccgacccccagccactgaaagaacagcccgccctgaacgacagccggtactgcctgagcagcagactgagagtgtccgccaccttctggcagaacccccggaaccacttcagatgccaggtgcagttctacggcctgagcgagaacgacgagtggacccaggacagagccaagcccgtgacccagatcgtgtctgccgaagcctggggcagagccgattgcggctttaccagcgagagctaccagcagggcgtgctgagcgccaccaacctgagcgtgatcggcttcagaatcctgctgctgaaagtggccggctttaacctgctgatgaccctgcggctgtggtccagc

SEQ ID NO: 5545 - DNA, 2292 bp, synthetic construct
  source 1..2292: mol_type = other DNA
atggccttaccagtgaccgccttgctcctgccgctggccttgctgctccacgccgccaggccggaagtgcagctggttgaatctggcggaggactggttcagcctggcggatctctgagactgtcttgtgccgccagcggcttcagcttcagcgacttttggatgagctgggtccgacaggcccctggcaaaggacttgaatgggtcgccacaatcagccaggccggcagcgagaaggactacgtggactctgtgaagggcagattcaccatcagccgggacaacgccaagaagtccctgtacctccagatgaacagcctgagagccgaggacaccgccgtgtactattgtgcctctggcgtgtacagcttcgactacagaggccagggcaccctggtcacagtctcttctggtaccggcggaggcggatctggcggcggaggtagcggtggcggaggatctgaattcgacaacttcatgctgacccagccccacagcgtgtccgagagccctggcaagaccgtgaccatctcctgcaccagaagcagcggctctatcgccagcaaatacgtgcagtggtatcagcagaggcccggcagcagccctaccaccgtgatctacgaggacaaccagaggcctagcggcgtgcccgatagattcagcggcagcatcgacaccagcagcaacagcgccagcctgaccatcagcggcctgagaacagaggacgaggccgactactactgccacagctacgacagcaacaaccactccgtgttcggcggaggcaccaaagtgacagtgctgggacagctcgagatccagaaccctgatcctgccgtgtaccagctgcgggatagcaagagcagcgacaagagcgtgtgtctgttcaccgacttcgacagccagaccaacgtgtcccagagcaaggactccgacgtgtacatcaccgataagtgcgtgctggacatgcggagcatggacttcaagagcaactccgccgtggcctggtccaacaagtccgatttcgcctgcgccaacgccttcaacaacagcattatccccgaggacacattcttcccaagccccgagagcagctgcgacgtgaagctggtggaaaagagcttcgagacagacaccaacctgaacttccagatcctgtacgagatcctgctgggcaaggccaccctgtacgccgtgctggtgtctgccctggtgctgatggctatggtcaagcggaaggacagccggggacgcgccaagagaagcggatctggcgtgaagcagaccctgaatttcgacctgctgaagctggctggcgacgtggaatccaacccaggccctactagtatggactggatttggcgcatccttttccttgtcggcgctgctaccggcgcgcattccttcgaagaagtgcaactggtggaaagcgggggaggcgtggtgcagccaggcggatctctgagactgagctgtgccgccagcggcttcaccttcagcagctacgccatgagctgggtgcgccaggcccctggaaaaggcctggaatgggtgtccgccatctctggctctggcggcagcacctactacgccgatagcgtgaagggccggttcagcatcagccgggacaacagcaagaacaccctgtacctccagatgaacagcctgcgggccgaggacaccgccgtgtactactgtgccagaaccagaagctccggggccttcgacatctggggccagggaacactcgtgaccgtgtcctctacgcgtgaggacctgaagaacgtgttcccacctgaggtggccgtgttcgagcctagcgaggccgagatcagccacacccagaaagccaccctcgtgtgcctggctaccggcttctaccccgaccatgtggaactgtcttggtgggtcaacggcaaagaggtgcacagcggcgtgtgtaccgacccccagccactgaaagaacagcccgccctgaacgacagccggtactgcctgagcagcagactgagagtgtccgccaccttctggcagaacccccggaaccacttcagatgccaggtgcagttctacggcctgagcgagaacgacgagtggacccaggacagagccaagcccgtgacccagatcgtgtctgccgaagcctggggcagagccgattgcggctttaccagcgagagctaccagcagggcgtgctgagcgccaccaacctgagcgtgatcggcttcagaatcctgctgctgaaagtggccggctttaacctgctgatgaccctgcggctgtggtccagc

SEQ ID NO: 5546 - DNA, 2277 bp, synthetic construct
  source 1..2277: mol_type = other DNA
atggccttaccagtgaccgccttgctcctgccgctggccttgctgctccacgccgccaggccggaagtgcagctggttgaatctggcggaggactggttcagcctggcggatctctgagactgtcttgtgccgccagcggcttcagcttcagcgacttttggatgagctgggtccgacaggcccctggcaaaggacttgaatgggtcgccacaatcagccaggccggcagcgagaaggactacgtggactctgtgaagggcagattcaccatcagccgggacaacgccaagaagtccctgtacctccagatgaacagcctgagagccgaggacaccgccgtgtactattgtgcctctggcgtgtacagcttcgactacagaggccagggcaccctggtcacagtctcttctggtaccggcggaggcggatctggcggcggaggtagcggtggcggaggatctgaattcgacatccagatgaaccagagccccagcagcctgagcgccagcctgggcgataccatcaccatcacctgtcacgccagccagaacatcaacgtgtggctgagctggtatcagcagaagcccggcaacatccccaagctgctgatctacaaggccagcaacctgcacaccggcgtgcccagcagattttctggcagcggctctggcaccggcttcaccattaccatcagctccctccagcccgaggacattgccacctactactgccagcagggccagagctacccctggacatttggcggaggcaccaagctggaaatcaagagactcgagatccagaaccctgatcctgccgtgtaccagctgcgggatagcaagagcagcgacaagagcgtgtgtctgttcaccgacttcgacagccagaccaacgtgtcccagagcaaggactccgacgtgtacatcaccgataagtgcgtgctggacatgcggagcatggacttcaagagcaactccgccgtggcctggtccaacaagtccgatttcgcctgcgccaacgccttcaacaacagcattatccccgaggacacattcttcccaagccccgagagcagctgcgacgtgaagctggtggaaaagagcttcgagacagacaccaacctgaacttccagatcctgtacgagatcctgctgggcaaggccaccctgtacgccgtgctggtgtctgccctggtgctgatggctatggtcaagcggaaggacagccggggacgcgccaagagaagcggatctggcgtgaagcagaccctgaatttcgacctgctgaagctggctggcgacgtggaatccaacccaggccctactagtatggactggatttggcgcatccttttccttgtcggcgctgctaccggcgcgcattccttcgaagaagtgcaactccagcagagcggcccagagcttgtgaagcctggcgcttccgtgaagattagctgcaaagccagcggctacagcttcaccggctacttcatgaactgggtcaagcagagccacggcaagagcctggagtacatcggcagattcaacccctacaacggcgagacactgtacaaccagaagttcaagggcaaggccaccctgaccgtggacaagagcagcagcaccgtgcacatggaactgctgagcgtgaccagcgaggacagcgccgtgtactactgtggcagaagcggcaacgacgacgctatggactattggggccagggcaccagcgtgaccgtgtctagtgctacgcgtgaggacctgaagaacgtgttcccacctgaggtggccgtgttcgagcctagcgaggccgagatcagccacacccagaaagccaccctcgtgtgcctggctaccggcttctaccccgaccatgtggaactgtcttggtgggtcaacggcaaagaggtgcacagcggcgtgtgtaccgacccccagccactgaaagaacagcccgccctgaacgacagccggtactgcctgagcagcagactgagagtgtccgccaccttctggcagaacccccggaaccacttcagatgccaggtgcagttctacggcctgagcgagaacgacgagtggacccaggacagagccaagcccgtgacccagatcgtgtctgccgaagcctggggcagagccgattgcggctttaccagcgagagctaccagcagggcgtgctgagcgccaccaacctgagcgtgatcggcttcagaatcctgctgctgaaagtggccggctttaacctgctgatgaccctgcggctgtggtccagc

SEQ ID NO: 5547 - DNA, 2280 bp, synthetic construct
  source 1..2280: mol_type = other DNA
atggccttaccagtgaccgccttgctcctgccgctggccttgctgctccacgccgccaggccggaagtgcagctggttgaatctggcggaggactggttcagcctggcggatctctgagactgtcttgtgccgccagcggcttcagcttcagcgacttttggatgagctgggtccgacaggcccctggcaaaggacttgaatgggtcgccacaatcagccaggccggcagcgagaaggactacgtggactctgtgaagggcagattcaccatcagccgggacaacgccaagaagtccctgtacctccagatgaacagcctgagagccgaggacaccgccgtgtactattgtgcctctggcgtgtacagcttcgactacagaggccagggcaccctggtcacagtctcttctggtaccggcggaggcggatctggcggcggaggtagcggtggcggaggatctgaattcgagatcgtgctgacacagagccctgccaccctgtctctgagccctggcgaaagagccaccctgagctgtagagccagccagagcgtgcggagctacctggcctggtatcagcagaagcctggacaggcccccagactgctgatctacgacgccagcaatcgggccacaggcatccccgccagattttctggctctggcagcggcaccgacttcaccctgacaatcagcagcctggaacccgaggacttcgccgtgtactactgccagcagcggagcaactggccccctacctttggacagggcaccaaggtggaaatcaagctcgagatccagaaccctgatcctgccgtgtaccagctgcgggatagcaagagcagcgacaagagcgtgtgtctgttcaccgacttcgacagccagaccaacgtgtcccagagcaaggactccgacgtgtacatcaccgataagtgcgtgctggacatgcggagcatggacttcaagagcaactccgccgtggcctggtccaacaagtccgatttcgcctgcgccaacgccttcaacaacagcattatccccgaggacacattcttcccaagccccgagagcagctgcgacgtgaagctggtggaaaagagcttcgagacagacaccaacctgaacttccagatcctgtacgagatcctgctgggcaaggccaccctgtacgccgtgctggtgtctgccctggtgctgatggctatggtcaagcggaaggacagccggggacgcgccaagagaagcggatctggcgtgaagcagaccctgaatttcgacctgctgaagctggctggcgacgtggaatccaacccaggccctactagtatggactggatttggcgcatccttttccttgtcggcgctgctaccggcgcgcattccttcgaacaactccaggtgcaggaatctggccccggactcgtgaagcccagcgagacactgagcctgacctgtaccgtgtccggcggcagcatcagcaacagctacttctcctggggctggatcagacagccccctggcaagggcctggaatggatcggcagcttctactacggcgagaaaacctactacaaccccagcctgaagtccagagccaccatcagcatcgacaccagcaagagccagttctccctgaagctgagcagcgtgacagccgccgacaccgccgtgtattattgccccagaggccccaccatgatccggggcgtgatcgactcttggggccagggaacactcgtgaccgtgtcctctacgcgtgaggacctgaagaacgtgttcccacctgaggtggccgtgttcgagcctagcgaggccgagatcagccacacccagaaagccaccctcgtgtgcctggctaccggcttctaccccgaccatgtggaactgtcttggtgggtcaacggcaaagaggtgcacagcggcgtgtgtaccgacccccagccactgaaagaacagcccgccctgaacgacagccggtactgcctgagcagcagactgagagtgtccgccaccttctggcagaacccccggaaccacttcagatgccaggtgcagttctacggcctgagcgagaacgacgagtggacccaggacagagccaagcccgtgacccagatcgtgtctgccgaagcctggggcagagccgattgcggctttaccagcgagagctaccagcagggcgtgctgagcgccaccaacctgagcgtgatcggcttcagaatcctgctgctgaaagtggccggctttaacctgctgatgaccctgcggctgtggtccagc

SEQ ID NO: 5548 - DNA, 2307 bp, synthetic construct
  source 1..2307: mol_type = other DNA
atggccttaccagtgaccgccttgctcctgccgctggccttgctgctccacgccgccaggccggaagtgcagctggttgaatctggcggaggactggttcagcctggcggatctctgagactgtcttgtgccgccagcggcttcagcttcagcgacttttggatgagctgggtccgacaggcccctggcaaaggacttgaatgggtcgccacaatcagccaggccggcagcgagaaggactacgtggactctgtgaagggcagattcaccatcagccgggacaacgccaagaagtccctgtacctccagatgaacagcctgagagccgaggacaccgccgtgtactattgtgcctctggcgtgtacagcttcgactacagaggccagggcaccctggtcacagtctcttctggtaccggcggaggcggatctggcggcggaggtagcggtggcggaggatctgaattcgacatcgtgatgacccagacccccctgagcctgcctgtgacacctggcgagcctgccagcatctcctgcagaagcagcagaagcctgctggacagcgacgacggcaacacctacctggactggtatctgcagaaacccggccagagcccccaactgctgatctacaccctgagctacagagccagcggcgtgcccgatagattttccggctctggcagcggcaccgacttcaccctgaagatcagccgggtggaagccgaggacgtgggcgtgtactactgtatgcagcgggtggaatttcccatcaccttcggccagggcaccagactggaaatcaagagactcgagatccagaaccctgatcctgccgtgtaccagctgcgggatagcaagagcagcgacaagagcgtgtgtctgttcaccgacttcgacagccagaccaacgtgtcccagagcaaggactccgacgtgtacatcaccgataagtgcgtgctggacatgcggagcatggacttcaagagcaactccgccgtggcctggtccaacaagtccgatttcgcctgcgccaacgccttcaacaacagcattatccccgaggacacattcttcccaagccccgagagcagctgcgacgtgaagctggtggaaaagagcttcgagacagacaccaacctgaacttccagatcctgtacgagatcctgctgggcaaggccaccctgtacgccgtgctggtgtctgccctggtgctgatggctatggtcaagcggaaggacagccggggacgcgccaagagaagcggatctggcgtgaagcagaccctgaatttcgacctgctgaagctggctggcgacgtggaatccaacccaggccctactagtatggactggatttggcgcatccttttccttgtcggcgctgctaccggcgcgcattccttcgaacaggtgcaactggtggaatctggcgggggagtggtgcagcctggcagatccctgagactgagctgtgccgccagcggcttcatcttcagcagatacggaatgcactgggtgcgccaggcccctggcaagggactgaaatgggtggccgtgatttggtacgacggcagcaacaagctgtacgccgacagcgtgaagggccggttcaccatcagcagagacaacagcaagaacaccctgtacctgcagatgaacagcctgcgggccgaggacaccgccgtgtactattgcgccagagactactacgacaacagccggcaccactggggcttcgactattggggccagggaacccttgtgaccgtgtcctctacgcgtgaggacctgaagaacgtgttcccacctgaggtggccgtgttcgagcctagcgaggccgagatcagccacacccagaaagccaccctcgtgtgcctggctaccggcttctaccccgaccatgtggaactgtcttggtgggtcaacggcaaagaggtgcacagcggcgtgtgtaccgacccccagccactgaaagaacagcccgccctgaacgacagccggtactgcctgagcagcagactgagagtgtccgccaccttctggcagaacccccggaaccacttcagatgccaggtgcagttctacggcctgagcgagaacgacgagtggacccaggacagagccaagcccgtgacccagatcgtgtctgccgaagcctggggcagagccgattgcggctttaccagcgagagctaccagcagggcgtgctgagcgccaccaacctgagcgtgatcggcttcagaatcctgctgctgaaagtggccggctttaacctgctgatgaccctgcggctgtggtccagc

SEQ ID NO: 5549 - DNA, 2277 bp, synthetic construct
  source 1..2277: mol_type = other DNA
atggccttaccagtgaccgccttgctcctgccgctggccttgctgctccacgccgccaggccggaagtgcagctggttgaatctggcggaggactggttcagcctggcggatctctgagactgtcttgtgccgccagcggcttcagcttcagcgacttttggatgagctgggtccgacaggcccctggcaaaggacttgaatgggtcgccacaatcagccaggccggcagcgagaaggactacgtggactctgtgaagggcagattcaccatcagccgggacaacgccaagaagtccctgtacctccagatgaacagcctgagagccgaggacaccgccgtgtactattgtgcctctggcgtgtacagcttcgactacagaggccagggcaccctggtcacagtctcttctggtaccggcggaggcggatctggcggcggaggtagcggtggcggaggatctgaattcgagatccagatgacccagagccccagcagcatgtctgccagcctgggcgacaccatcaccatcacatgccaggccacccaggacatcttcaagaacctgaactggtatcagcagaagcccggcaagccccccagcctgctgatctactatgccaccgaactggccgagggcgtgcccagcagattttctggcagcggcagcggctccgactacagcctgaccatcagcaacctggaaagcgaggacttcgccgcctactactgcctccagttcttcgagttcccattcaccttcggctccggcaccaagctggaaatgaagctcgagatccagaaccctgatcctgccgtgtaccagctgcgggatagcaagagcagcgacaagagcgtgtgtctgttcaccgacttcgacagccagaccaacgtgtcccagagcaaggactccgacgtgtacatcaccgataagtgcgtgctggacatgcggagcatggacttcaagagcaactccgccgtggcctggtccaacaagtccgatttcgcctgcgccaacgccttcaacaacagcattatccccgaggacacattcttcccaagccccgagagcagctgcgacgtgaagctggtggaaaagagcttcgagacagacaccaacctgaacttccagatcctgtacgagatcctgctgggcaaggccaccctgtacgccgtgctggtgtctgccctggtgctgatggctatggtcaagcggaaggacagccggggacgcgccaagagaagcggatctggcgtgaagcagaccctgaatttcgacctgctgaagctggctggcgacgtggaatccaacccaggccctactagtatggactggatttggcgcatccttttccttgtcggcgctgctaccggcgcgcattccttcgaacaggtgcaactccagcagtctggcgctgagcttgtgcggcctggcacctctgtgaaggtgtcctgtaaagccagcggctacgtgttcaccaactactggatcgagtggatcaagcagcggccaggccagggcctggaatggatcggcgtgatgaatccaggcagcggcgagacaacctacaacgagaagttcaagggcaaggccaccctgaccgccgacaagagcagcagcacagcctacatgcaactgtcctccctgaccagcgtggacagcgccgtgtacttctgcgccagggaccacgaccgggactactacgctatggactactggggccagggcaccagcgtgaccgtgtcatctacgcgtgaggacctgaagaacgtgttcccacctgaggtggccgtgttcgagcctagcgaggccgagatcagccacacccagaaagccaccctcgtgtgcctggctaccggcttctaccccgaccatgtggaactgtcttggtgggtcaacggcaaagaggtgcacagcggcgtgtgtaccgacccccagccactgaaagaacagcccgccctgaacgacagccggtactgcctgagcagcagactgagagtgtccgccaccttctggcagaacccccggaaccacttcagatgccaggtgcagttctacggcctgagcgagaacgacgagtggacccaggacagagccaagcccgtgacccagatcgtgtctgccgaagcctggggcagagccgattgcggctttaccagcgagagctaccagcagggcgtgctgagcgccaccaacctgagcgtgatcggcttcagaatcctgctgctgaaagtggccggctttaacctgctgatgaccctgcggctgtggtccagc

SEQ ID NO: 5550 - DNA, 2268 bp, synthetic construct
  source 1..2268: mol_type = other DNA
atggccttaccagtgaccgccttgctcctgccgctggccttgctgctccacgccgccaggccggaagtgcagctggttgaatctggcggaggactggttcagcctggcggatctctgagactgtcttgtgccgccagcggcttcagcttcagcgacttttggatgagctgggtccgacaggcccctggcaaaggacttgaatgggtcgccacaatcagccaggccggcagcgagaaggactacgtggactctgtgaagggcagattcaccatcagccgggacaacgccaagaagtccctgtacctccagatgaacagcctgagagccgaggacaccgccgtgtactattgtgcctctggcgtgtacagcttcgactacagaggccagggcaccctggtcacagtctcttctggtaccggcggaggcggatctggcggcggaggtagcggtggcggaggatctgaattcgacatcctgctgacacagagccccgccatcctgtccgtgtctccaggcgagagagtgtcctttagctgccgggccagccagaacatcggcaccagcatccactggtatcagcagcggaccaacggcagccccagactgctgattaagtacgccagcgagtccgtgtccggcatccccagcagattttctggcagcggctccggcaccgacttcaccctgagcatcaacagcgtggaaagcgaggacattgccgactactactgccagcacaccaatagctggcccaccacctttggcggaggcaccaagctggaaatcaagagactcgagatccagaaccctgatcctgccgtgtaccagctgcgggatagcaagagcagcgacaagagcgtgtgtctgttcaccgacttcgacagccagaccaacgtgtcccagagcaaggactccgacgtgtacatcaccgataagtgcgtgctggacatgcggagcatggacttcaagagcaactccgccgtggcctggtccaacaagtccgatttcgcctgcgccaacgccttcaacaacagcattatccccgaggacacattcttcccaagccccgagagcagctgcgacgtgaagctggtggaaaagagcttcgagacagacaccaacctgaacttccagatcctgtacgagatcctgctgggcaaggccaccctgtacgccgtgctggtgtctgccctggtgctgatggctatggtcaagcggaaggacagccggggacgcgccaagagaagcggatctggcgtgaagcagaccctgaatttcgacctgctgaagctggctggcgacgtggaatccaacccaggccctactagtatggactggatttggcgcatccttttccttgtcggcgctgctaccggcgcgcattccttcgaacaggtgcaactccagcagtccgacgccgagcttgtgaagcctggcgcttccgtgaagattagctgcaaggccagcggctacaccttcaccgaccacgccattcactgggtcaagcagaagcccgagcagggcctggaatggatcggctacttcagccccggcaacggcgacatcaagtacaacgagaagttcaagggcaaggccaccctgaccgccgacaagagcagcagcacagcctacatgcaactgaacagcctgaccagcgaggactccgccgtgtacttctgcaagcggagctacggcaactacgactactggggccagggcaccacactgaccgtgtctagtacgcgtgaggacctgaagaacgtgttcccacctgaggtggccgtgttcgagcctagcgaggccgagatcagccacacccagaaagccaccctcgtgtgcctggctaccggcttctaccccgaccatgtggaactgtcttggtgggtcaacggcaaagaggtgcacagcggcgtgtgtaccgacccccagccactgaaagaacagcccgccctgaacgacagccggtactgcctgagcagcagactgagagtgtccgccaccttctggcagaacccccggaaccacttcagatgccaggtgcagttctacggcctgagcgagaacgacgagtggacccaggacagagccaagcccgtgacccagatcgtgtctgccgaagcctggggcagagccgattgcggctttaccagcgagagctaccagcagggcgtgctgagcgccaccaacctgagcgtgatcggcttcagaatcctgctgctgaaagtggccggctttaacctgctgatgaccctgcggctgtggtccagc

SEQ ID NO: 5551 - DNA, 2283 bp, synthetic construct
  source 1..2283: mol_type = other DNA
atggccttaccagtgaccgccttgctcctgccgctggccttgctgctccacgccgccaggccggaagtgcagctggttgaatctggcggaggactggttcagcctggcggatctctgagactgtcttgtgccgccagcggcttcagcttcagcgacttttggatgagctgggtccgacaggcccctggcaaaggacttgaatgggtcgccacaatcagccaggccggcagcgagaaggactacgtggactctgtgaagggcagattcaccatcagccgggacaacgccaagaagtccctgtacctccagatgaacagcctgagagccgaggacaccgccgtgtactattgtgcctctggcgtgtacagcttcgactacagaggccagggcaccctggtcacagtctcttctggtaccggcggaggcggatctggcggcggaggtagcggtggcggaggatctgaattcgacatcgtgatgacccagagccccgatagcctggccgtgtctctgggagagagagccaccatcaactgcaagagcagccagagcctgctgaacagcggcgaccagaagaactacctgacctggtatcagcagaagcccggccagccccccaagctgctgatctactgggccagcaccagagaaagcggcgtgcccgatagattcagcggcagcggaagtggcaccgacttcaccctgaccatcagttctcttcaggccgaggacgtggccgtgtactactgccagaacgactacagctaccccctgaccttcggccagggcaccaaggtggaaatcaagctcgagatccagaaccctgatcctgccgtgtaccagctgcgggatagcaagagcagcgacaagagcgtgtgtctgttcaccgacttcgacagccagaccaacgtgtcccagagcaaggactccgacgtgtacatcaccgataagtgcgtgctggacatgcggagcatggacttcaagagcaactccgccgtggcctggtccaacaagtccgatttcgcctgcgccaacgccttcaacaacagcattatccccgaggacacattcttcccaagccccgagagcagctgcgacgtgaagctggtggaaaagagcttcgagacagacaccaacctgaacttccagatcctgtacgagatcctgctgggcaaggccaccctgtacgccgtgctggtgtctgccctggtgctgatggctatggtcaagcggaaggacagccggggacgcgccaagagaagcggatctggcgtgaagcagaccctgaatttcgacctgctgaagctggctggcgacgtggaatccaacccaggccctactagtatggactggatttggcgcatccttttccttgtcggcgctgctaccggcgcgcattccttcgaacaggtgcagctggtgcagtctggggccgaagtgaagaaaaccggcagcagcgtgaaggtgtcctgcaaggccagcggctacacctttaccgaccacgccattcacgtgtggcggcaggctccaggacaggccctggaatggatgggccacttcagccccggcaacaccgacatcaagtacaacgacaagttcaagggcagagtgaccctgaccgtggaccgcagcatgagcaccgcctacatggaactgagcagcctgcggagcgaggacaccgccatgtactattgcaagaccagcaccttctttttcgactactggggccagggaacaatggtcaccgtgtccagcacgcgtgaggacctgaagaacgtgttcccacctgaggtggccgtgttcgagcctagcgaggccgagatcagccacacccagaaagccaccctcgtgtgcctggctaccggcttctaccccgaccatgtggaactgtcttggtgggtcaacggcaaagaggtgcacagcggcgtgtgtaccgacccccagccactgaaagaacagcccgccctgaacgacagccggtactgcctgagcagcagactgagagtgtccgccaccttctggcagaacccccggaaccacttcagatgccaggtgcagttctacggcctgagcgagaacgacgagtggacccaggacagagccaagcccgtgacccagatcgtgtctgccgaagcctggggcagagccgattgcggctttaccagcgagagctaccagcagggcgtgctgagcgccaccaacctgagcgtgatcggcttcagaatcctgctgctgaaagtggccggctttaacctgctgatgaccctgcggctgtggtccagc

SEQ ID NO: 5552 - DNA, 2280 bp, synthetic construct
  source 1..2280: mol_type = other DNA
atggccttaccagtgaccgccttgctcctgccgctggccttgctgctccacgccgccaggccggaagtgcagctggttgaatctggcggaggactggttcagcctggcggatctctgagactgtcttgtgccgccagcggcttcagcttcagcgacttttggatgagctgggtccgacaggcccctggcaaaggacttgaatgggtcgccacaatcagccaggccggcagcgagaaggactacgtggactctgtgaagggcagattcaccatcagccgggacaacgccaagaagtccctgtacctccagatgaacagcctgagagccgaggacaccgccgtgtactattgtgcctctggcgtgtacagcttcgactacagaggccagggcaccctggtcacagtctcttctggtaccggcggaggcggatctggcggcggaggtagcggtggcggaggatctgaattcgacatccagatgacccagagccccagcagcctgtctgccagcgtgggcgacagagtgaccatcacatgcaaggccagccaggacgtgtccattgccgtggcctggtatcagcagaagcccggcaaggcccccaaggtgctgatctacagcgccagctacagatacaccggcgtgcccgacagattcagcggctctggcagcggcaccgacttcaccttcaccatcagctccctccagcccgaggatattgccgtgtactactgccagcagcactacatcacccccctgacctttggcggaggcaccaaggtggaaatcaagctcgagatccagaaccctgatcctgccgtgtaccagctgcgggatagcaagagcagcgacaagagcgtgtgtctgttcaccgacttcgacagccagaccaacgtgtcccagagcaaggactccgacgtgtacatcaccgataagtgcgtgctggacatgcggagcatggacttcaagagcaactccgccgtggcctggtccaacaagtccgatttcgcctgcgccaacgccttcaacaacagcattatccccgaggacacattcttcccaagccccgagagcagctgcgacgtgaagctggtggaaaagagcttcgagacagacaccaacctgaacttccagatcctgtacgagatcctgctgggcaaggccaccctgtacgccgtgctggtgtctgccctggtgctgatggctatggtcaagcggaaggacagccggggacgcgccaagagaagcggatctggcgtgaagcagaccctgaatttcgacctgctgaagctggctggcgacgtggaatccaacccaggccctactagtatggactggatttggcgcatccttttccttgtcggcgctgctaccggcgcgcattccttcgaacagatccaactggtgcagagcggccacgaagtgaagaaacctggggccagcgtgaaggtgtcctgcaaagccagcggctacacctttaccaactacggcatgaactgggtgcgccaggcccctggacagggcctggaatggatgggctggatcaacaccaagaccggcgagcccacctacgccgaagagttcaagggcagattcgtgttcagcctggaaaccagcgcctccaccgcctacctccagatcagctctctgaaggccgaggacaccgccatgtacttttgcggcagaggcggctacggcagcagctactggtacttcgatgtgtggggccagggcaccaccgtgaccgtgtcatctacgcgtgaggacctgaagaacgtgttcccacctgaggtggccgtgttcgagcctagcgaggccgagatcagccacacccagaaagccaccctcgtgtgcctggctaccggcttctaccccgaccatgtggaactgtcttggtgggtcaacggcaaagaggtgcacagcggcgtgtgtaccgacccccagccactgaaagaacagcccgccctgaacgacagccggtactgcctgagcagcagactgagagtgtccgccaccttctggcagaacccccggaaccacttcagatgccaggtgcagttctacggcctgagcgagaacgacgagtggacccaggacagagccaagcccgtgacccagatcgtgtctgccgaagcctggggcagagccgattgcggctttaccagcgagagctaccagcagggcgtgctgagcgccaccaacctgagcgtgatcggcttcagaatcctgctgctgaaagtggccggctttaacctgctgatgaccctgcggctgtggtccagc

SEQ ID NO: 5553 - DNA, 2286 bp, synthetic construct
  source 1..2286: mol_type = other DNA
atggccttaccagtgaccgccttgctcctgccgctggccttgctgctccacgccgccaggccggaagtgcagctggttgaatctggcggaggactggttcagcctggcggatctctgagactgtcttgtgccgccagcggcttcagcttcagcgacttttggatgagctgggtccgacaggcccctggcaaaggacttgaatgggtcgccacaatcagccaggccggcagcgagaaggactacgtggactctgtgaagggcagattcaccatcagccgggacaacgccaagaagtccctgtacctccagatgaacagcctgagagccgaggacaccgccgtgtactattgtgcctctggcgtgtacagcttcgactacagaggccagggcaccctggtcacagtctcttctggtaccggcggaggcggatctggcggcggaggtagcggtggcggaggatctgaattcgacatcgtgatgacccagagccccgatagcctggccgtgtctctgggagagagagccaccatcaactgccgggccagcaagagcgtgtccaccagcggctacagctacatgcactggtatcagcagaagcccggccagccccccaagctgctgatctacctggcctccaacctggaaagcggcgtgcccgatagattcagcggcagcggctctggcaccgacttcaccctgaccatcagttctcttcaggccgaggacgtggccgtgtactactgccagcacagcagagagctgccctacaccttcggccagggcaccaagctggaaatcaagctcgagatccagaaccctgatcctgccgtgtaccagctgcgggatagcaagagcagcgacaagagcgtgtgtctgttcaccgacttcgacagccagaccaacgtgtcccagagcaaggactccgacgtgtacatcaccgataagtgcgtgctggacatgcggagcatggacttcaagagcaactccgccgtggcctggtccaacaagtccgatttcgcctgcgccaacgccttcaacaacagcattatccccgaggacacattcttcccaagccccgagagcagctgcgacgtgaagctggtggaaaagagcttcgagacagacaccaacctgaacttccagatcctgtacgagatcctgctgggcaaggccaccctgtacgccgtgctggtgtctgccctggtgctgatggctatggtcaagcggaaggacagccggggacgcgccaagagaagcggatctggcgtgaagcagaccctgaatttcgacctgctgaagctggctggcgacgtggaatccaacccaggccctactagtatggactggatttggcgcatccttttccttgtcggcgctgctaccggcgcgcattccttcgaacaggtgcaactccaggaatctggccctggccttgtgaagcccagcgagacactgagcctgacctgtaccgtgtccggcggcagcatcagctcttacggcgtgcactggattcggcagcctccaggcaagggcctggaatggatcggcgtgatctggacctccggcgtgaccgactacaacagcgccctgatgggcagagtgaccatctccgtggacaccagcaagaaccagttcagcctgaagctgagcagcgtgacagccgccgataccgccgtgtattattgcgccagagatggcgactacgaccgctacacaatggactactggggccagggaacccttgtgaccgtgtcctctacgcgtgaggacctgaagaacgtgttcccacctgaggtggccgtgttcgagcctagcgaggccgagatcagccacacccagaaagccaccctcgtgtgcctggctaccggcttctaccccgaccatgtggaactgtcttggtgggtcaacggcaaagaggtgcacagcggcgtgtgtaccgacccccagccactgaaagaacagcccgccctgaacgacagccggtactgcctgagcagcagactgagagtgtccgccaccttctggcagaacccccggaaccacttcagatgccaggtgcagttctacggcctgagcgagaacgacgagtggacccaggacagagccaagcccgtgacccagatcgtgtctgccgaagcctggggcagagccgattgcggctttaccagcgagagctaccagcagggcgtgctgagcgccaccaacctgagcgtgatcggcttcagaatcctgctgctgaaagtggccggctttaacctgctgatgaccctgcggctgtggtccagc

SEQ ID NO: 5554 - DNA, 2286 bp, synthetic construct
  source 1..2286: mol_type = other DNA
atggccttaccagtgaccgccttgctcctgccgctggccttgctgctccacgccgccaggccggaagtgcagctggttgaatctggcggaggactggttcagcctggcggatctctgagactgtcttgtgccgccagcggcttcagcttcagcgacttttggatgagctgggtccgacaggcccctggcaaaggacttgaatgggtcgccacaatcagccaggccggcagcgagaaggactacgtggactctgtgaagggcagattcaccatcagccgggacaacgccaagaagtccctgtacctccagatgaacagcctgagagccgaggacaccgccgtgtactattgtgcctctggcgtgtacagcttcgactacagaggccagggcaccctggtcacagtctcttctggtaccggcggaggcggatctggcggcggaggtagcggtggcggaggatctgaattcgacatccagatgacccagagccccagcagcctgtctgccagcgtgggcgacagagtgaccatcacctgtagagccagccagagcatcggcaccagcctgcactggtatcagcagaagcctggcaaggcccccaagctgctgattaagttcgccagcagactgcagagcggcgtgcccagcagattttctggcagcggctccggcaccgacttcaccctgacaatcagctccctgcagcccgaggacttcgccacctactactgccagcagagccccggcttccctccaacctttggacagggcaccaagctggaaatcaagcggctcgagatccagaaccctgatcctgccgtgtaccagctgcgggatagcaagagcagcgacaagagcgtgtgtctgttcaccgacttcgacagccagaccaacgtgtcccagagcaaggactccgacgtgtacatcaccgataagtgcgtgctggacatgcggagcatggacttcaagagcaactccgccgtggcctggtccaacaagtccgatttcgcctgcgccaacgccttcaacaacagcattatccccgaggacacattcttcccaagccccgagagcagctgcgacgtgaagctggtggaaaagagcttcgagacagacaccaacctgaacttccagatcctgtacgagatcctgctgggcaaggccaccctgtacgccgtgctggtgtctgccctggtgctgatggctatggtcaagcggaaggacagccggggacgcgccaagagaagcggatctggcgtgaagcagaccctgaatttcgacctgctgaagctggctggcgacgtggaatccaacccaggccctactagtatggactggatttggcgcatccttttccttgtcggcgctgctaccggcgcgcattccttcgaacaggtgcaactggtggaatctggcggcggacttgtgaagccaggcggcagcctgagactgagctgtgccgccagcggcttcagcatcaccaccagcggctactactggacctggatcagacagttccccggcaagggcctggaatggatgggctacatcggctacaacagcaagacctactacaaccccgccctgaagtcccggatcaccatcagcagagacaacgccaagaacagcctgtacctgcagatgaactccctgagagccgaggataccgccgtgtactactgcgccagatccctgtacggcggctacaaggacgccttcgatagctggggccagggaacccttgtgaccgtgtctagcacgcgtgaggacctgaagaacgtgttcccacctgaggtggccgtgttcgagcctagcgaggccgagatcagccacacccagaaagccaccctcgtgtgcctggctaccggcttctaccccgaccatgtggaactgtcttggtgggtcaacggcaaagaggtgcacagcggcgtgtgtaccgacccccagccactgaaagaacagcccgccctgaacgacagccggtactgcctgagcagcagactgagagtgtccgccaccttctggcagaacccccggaaccacttcagatgccaggtgcagttctacggcctgagcgagaacgacgagtggacccaggacagagccaagcccgtgacccagatcgtgtctgccgaagcctggggcagagccgattgcggctttaccagcgagagctaccagcagggcgtgctgagcgccaccaacctgagcgtgatcggcttcagaatcctgctgctgaaagtggccggctttaacctgctgatgaccctgcggctgtggtccagc

SEQ ID NO: 5555 - DNA, 2301 bp, synthetic construct
  source 1..2301: mol_type = other DNA
atggccttaccagtgaccgccttgctcctgccgctggccttgctgctccacgccgccaggccggaagtgcagctggttgaatctggcggaggactggttcagcctggcggatctctgagactgtcttgtgccgccagcggcttcagcttcagcgacttttggatgagctgggtccgacaggcccctggcaaaggacttgaatgggtcgccacaatcagccaggccggcagcgagaaggactacgtggactctgtgaagggcagattcaccatcagccgggacaacgccaagaagtccctgtacctccagatgaacagcctgagagccgaggacaccgccgtgtactattgtgcctctggcgtgtacagcttcgactacagaggccagggcaccctggtcacagtctcttctggtaccggcggaggcggatctggcggcggaggtagcggtggcggaggatctgaattcgacgagatcgtgctgacccagagccctctgagcctgcctgtgacacctggcgagcctgccagcatctcctgtagaagcagccagagcctgctgcacagcatcggctacaactacctggactggtatctccagaagcccggccagagcccccaactgctgatctacctgggcagcaacagagccagcggcgtgcccgatagattttccggcagcggctccggcaccgacttcaccctgaagatcagccgggtggaagccgaggacgtgggcgtgtactactgtatgcaggccctccagacccccctgacctttggcggaggcaccaaggtggaaatcaagcggctcgagatccagaaccctgatcctgccgtgtaccagctgcgggatagcaagagcagcgacaagagcgtgtgtctgttcaccgacttcgacagccagaccaacgtgtcccagagcaaggactccgacgtgtacatcaccgataagtgcgtgctggacatgcggagcatggacttcaagagcaactccgccgtggcctggtccaacaagtccgatttcgcctgcgccaacgccttcaacaacagcattatccccgaggacacattcttcccaagccccgagagcagctgcgacgtgaagctggtggaaaagagcttcgagacagacaccaacctgaacttccagatcctgtacgagatcctgctgggcaaggccaccctgtacgccgtgctggtgtctgccctggtgctgatggctatggtcaagcggaaggacagccggggacgcgccaagagaagcggatctggcgtgaagcagaccctgaatttcgacctgctgaagctggctggcgacgtggaatccaacccaggccctactagtatggactggatttggcgcatccttttccttgtcggcgctgctaccggcgcgcattccttcgaagaagtgcaactggtggaaagcggaggcggcgtggtgcagcctggaagaagcctgagactgagctgtgccgccagcggcttcaccttccggtcctacggaatgcactgggtgcgccaggcccctggcaaaggactggaatgggtggccgtgatctcctacgacggctccaacaagtactacaccgacagcgtgaacggcagattcaccatcagcagagacaacagcaagaacaccctgtacctccagatgaacagcctgcgggccgaggacaccgccgtgtactattgtgctagaggcggaggctactacgagacaagcggccctgattactggggccagggcacactcgtgaccgtgtctagtacgcgtgaggacctgaagaacgtgttcccacctgaggtggccgtgttcgagcctagcgaggccgagatcagccacacccagaaagccaccctcgtgtgcctggctaccggcttctaccccgaccatgtggaactgtcttggtgggtcaacggcaaagaggtgcacagcggcgtgtgtaccgacccccagccactgaaagaacagcccgccctgaacgacagccggtactgcctgagcagcagactgagagtgtccgccaccttctggcagaacccccggaaccacttcagatgccaggtgcagttctacggcctgagcgagaacgacgagtggacccaggacagagccaagcccgtgacccagatcgtgtctgccgaagcctggggcagagccgattgcggctttaccagcgagagctaccagcagggcgtgctgagcgccaccaacctgagcgtgatcggcttcagaatcctgctgctgaaagtggccggctttaacctgctgatgaccctgcggctgtggtccagc

SEQ ID NO: 5556 - DNA, 2295 bp, synthetic construct
  source 1..2295: mol_type = other DNA
atggccttaccagtgaccgccttgctcctgccgctggccttgctgctccacgccgccaggccggaagtgcagctggttgaatctggcggaggactggttcagcctggcggatctctgagactgtcttgtgccgccagcggcttcagcttcagcgacttttggatgagctgggtccgacaggcccctggcaaaggacttgaatgggtcgccacaatcagccaggccggcagcgagaaggactacgtggactctgtgaagggcagattcaccatcagccgggacaacgccaagaagtccctgtacctccagatgaacagcctgagagccgaggacaccgccgtgtactattgtgcctctggcgtgtacagcttcgactacagaggccagggcaccctggtcacagtctcttctggtaccggcggaggcggatctggcggcggaggtagcggtggcggaggatctgaattcgacgacgtcgtgatgacccagagccctctgagcctgcctgtgacacctggcgagcctgccagcatctcctgtagaagcagccagagcctgctgcacagcatcggctacaactacctgcactggtttctccagaagcccggccagagcccccaactgctgatctacctgggcagcaacagagccagcggcgtgcccgatagattttccggcagcggctccggcaccgacttcaccctgaagatcagccgggtggaagccgaggacgtgggcgtgtactactgtatgcaggccctccagacccctcccacctttggacagggcaccagactggaaatcaagcggctcgagatccagaaccctgatcctgccgtgtaccagctgcgggatagcaagagcagcgacaagagcgtgtgtctgttcaccgacttcgacagccagaccaacgtgtcccagagcaaggactccgacgtgtacatcaccgataagtgcgtgctggacatgcggagcatggacttcaagagcaactccgccgtggcctggtccaacaagtccgatttcgcctgcgccaacgccttcaacaacagcattatccccgaggacacattcttcccaagccccgagagcagctgcgacgtgaagctggtggaaaagagcttcgagacagacaccaacctgaacttccagatcctgtacgagatcctgctgggcaaggccaccctgtacgccgtgctggtgtctgccctggtgctgatggctatggtcaagcggaaggacagccggggacgcgccaagagaagcggatctggcgtgaagcagaccctgaatttcgacctgctgaagctggctggcgacgtggaatccaacccaggccctactagtatggactggatttggcgcatccttttccttgtcggcgctgctaccggcgcgcattccttcgaacaactccaactccaggaaagcggccctggcctcgtgaagcctagcggcacactgagcctgacatgtgccgtgtctggcggcagcatcagcagcagcaactggtggtcttgggtgcgccagcctcctggcaagggcctggaatggatcggcgaaatctaccacagcggcagcaccaactacaaccccagcctgaagtccagagtgaccatcagcgtggacaagagcaagaaccagttctccctgaagctgagcagcgtgacagccgccgataccgccgtgtactattgcgtgggcagcccctacggcgactacgtgctggattattggggccagggcaccctcgtgaccgtgtctagtacgcgtgaggacctgaagaacgtgttcccacctgaggtggccgtgttcgagcctagcgaggccgagatcagccacacccagaaagccaccctcgtgtgcctggctaccggcttctaccccgaccatgtggaactgtcttggtgggtcaacggcaaagaggtgcacagcggcgtgtgtaccgacccccagccactgaaagaacagcccgccctgaacgacagccggtactgcctgagcagcagactgagagtgtccgccaccttctggcagaacccccggaaccacttcagatgccaggtgcagttctacggcctgagcgagaacgacgagtggacccaggacagagccaagcccgtgacccagatcgtgtctgccgaagcctggggcagagccgattgcggctttaccagcgagagctaccagcagggcgtgctgagcgccaccaacctgagcgtgatcggcttcagaatcctgctgctgaaagtggccggctttaacctgctgatgaccctgcggctgtggtccagc

SEQ ID NO: 5557 - DNA, 2289 bp, synthetic construct
  source 1..2289: mol_type = other DNA
atggccttaccagtgaccgccttgctcctgccgctggccttgctgctccacgccgccaggccggaagtgcagctggttgaatctggcggaggactggttcagcctggcggatctctgagactgtcttgtgccgccagcggcttcagcttcagcgacttttggatgagctgggtccgacaggcccctggcaaaggacttgaatgggtcgccacaatcagccaggccggcagcgagaaggactacgtggactctgtgaagggcagattcaccatcagccgggacaacgccaagaagtccctgtacctccagatgaacagcctgagagccgaggacaccgccgtgtactattgtgcctctggcgtgtacagcttcgactacagaggccagggcaccctggtcacagtctcttctggtaccggcggaggcggatctggcggcggaggtagcggtggcggaggatctgaattcgacgagatcgtgctgacacagagccctggcaccctgagcctgtctctgggagagagagccacactgagctgtcgggccagccagtctatcagcagcagcttcctggcctggtatcagcagaagcccggccaggcccctaagctgctgatctacgccgccagcacaagagccaccggcatccccgatagattcagcggctctggcagcggcaccgacttcaccctgaccatcagcagactggaacccgaggacttcgccgtgtactactgccagcagtacggcagaagcctgagcttcggcggaggcaccaaggtggaagtgaagctcgagatccagaaccctgatcctgccgtgtaccagctgcgggatagcaagagcagcgacaagagcgtgtgtctgttcaccgacttcgacagccagaccaacgtgtcccagagcaaggactccgacgtgtacatcaccgataagtgcgtgctggacatgcggagcatggacttcaagagcaactccgccgtggcctggtccaacaagtccgatttcgcctgcgccaacgccttcaacaacagcattatccccgaggacacattcttcccaagccccgagagcagctgcgacgtgaagctggtggaaaagagcttcgagacagacaccaacctgaacttccagatcctgtacgagatcctgctgggcaaggccaccctgtacgccgtgctggtgtctgccctggtgctgatggctatggtcaagcggaaggacagccggggacgcgccaagagaagcggatctggcgtgaagcagaccctgaatttcgacctgctgaagctggctggcgacgtggaatccaacccaggccctactagtatggactggatttggcgcatccttttccttgtcggcgctgctaccggcgcgcattccttcgaacaggtgcaactccagcagtctggccccggactcgtgaagcctagccagacactgagcctgacctgcgccatcagcggcgatagcgtgtccggcaatagcgccacctggaactggatcagacagagcccatctcggggcctggaatggctgggccggacctactaccgcagcaagtggaaccacgactacgccgagagcgtgaagtcccggatcaccatcaaccccgacaccagcaagaaccagttctccttgcaactgaacagcgtgacccccgaggacacagccgtgtattattgcgccagaggcgacagcagctcttggtacgccttcgactattggggccagggcaccctcgtgaccgtgtctagtacgcgtgaggacctgaagaacgtgttcccacctgaggtggccgtgttcgagcctagcgaggccgagatcagccacacccagaaagccaccctcgtgtgcctggctaccggcttctaccccgaccatgtggaactgtcttggtgggtcaacggcaaagaggtgcacagcggcgtgtgtaccgacccccagccactgaaagaacagcccgccctgaacgacagccggtactgcctgagcagcagactgagagtgtccgccaccttctggcagaacccccggaaccacttcagatgccaggtgcagttctacggcctgagcgagaacgacgagtggacccaggacagagccaagcccgtgacccagatcgtgtctgccgaagcctggggcagagccgattgcggctttaccagcgagagctaccagcagggcgtgctgagcgccaccaacctgagcgtgatcggcttcagaatcctgctgctgaaagtggccggctttaacctgctgatgaccctgcggctgtggtccagc

SEQ ID NO: 5558 - DNA, 2286 bp, synthetic construct
  source 1..2286: mol_type = other DNA
atggccttaccagtgaccgccttgctcctgccgctggccttgctgctccacgccgccaggccggaagtgcagctggttgaatctggcggaggactggttcagcctggcggatctctgagactgtcttgtgccgccagcggcttcagcttcagcgacttttggatgagctgggtccgacaggcccctggcaaaggacttgaatgggtcgccacaatcagccaggccggcagcgagaaggactacgtggactctgtgaagggcagattcaccatcagccgggacaacgccaagaagtccctgtacctccagatgaacagcctgagagccgaggacaccgccgtgtactattgtgcctctggcgtgtacagcttcgactacagaggccagggcaccctggtcacagtctcttctggtaccggcggaggcggatctggcggcggaggtagcggtggcggaggatctgaattcgaccagagcgtcgtgacacagcctcctagcgtgtcagtggcccctggcaagaccgccagaatcacctgtggccggaacaacatcggcagcaagagcgtgcactggtatcagcagaagcccggccaggctcctgtgctggtggtgtacgacgacagcgacagacccagcggcatccccgagagattcagcggcagcaactccggcaataccgccaccctgaccatcagcagagtggaagccggcgacgaggccgactactactgccaagtgtgggacagcagcagcgatcacgtggtgtttggcggaggcaccaagctgacagtgctgggtctcgagatccagaaccctgatcctgccgtgtaccagctgcgggatagcaagagcagcgacaagagcgtgtgtctgttcaccgacttcgacagccagaccaacgtgtcccagagcaaggactccgacgtgtacatcaccgataagtgcgtgctggacatgcggagcatggacttcaagagcaactccgccgtggcctggtccaacaagtccgatttcgcctgcgccaacgccttcaacaacagcattatccccgaggacacattcttcccaagccccgagagcagctgcgacgtgaagctggtggaaaagagcttcgagacagacaccaacctgaacttccagatcctgtacgagatcctgctgggcaaggccaccctgtacgccgtgctggtgtctgccctggtgctgatggctatggtcaagcggaaggacagccggggacgcgccaagagaagcggatctggcgtgaagcagaccctgaatttcgacctgctgaagctggctggcgacgtggaatccaacccaggccctactagtatggactggatttggcgcatccttttccttgtcggcgctgctaccggcgcgcattccttcgaagtgcaactggtgcagtctggcggaggggtcatgcggcctggcggatctctgagactgtcttgtgccgccagcggcttcaccttcgacgactacggcatgagctgggtgcgccaggcccctggaaaaggcctggaatgggtgtccggcatcaactggaatggcggcagcaccggctacgccgattctgtgcggggcagattcaccatcagccgggacaacgccaagaacagcctgtacctgcagatgaactccctgcgggccgaggacaccgccctgtactattgcgccagagagcggggctacggctaccacgaccctcacgattattggggccagggcacccttgttaccgtgtcctctacgcgtgaggacctgaagaacgtgttcccacctgaggtggccgtgttcgagcctagcgaggccgagatcagccacacccagaaagccaccctcgtgtgcctggctaccggcttctaccccgaccatgtggaactgtcttggtgggtcaacggcaaagaggtgcacagcggcgtgtgtaccgacccccagccactgaaagaacagcccgccctgaacgacagccggtactgcctgagcagcagactgagagtgtccgccaccttctggcagaacccccggaaccacttcagatgccaggtgcagttctacggcctgagcgagaacgacgagtggacccaggacagagccaagcccgtgacccagatcgtgtctgccgaagcctggggcagagccgattgcggctttaccagcgagagctaccagcagggcgtgctgagcgccaccaacctgagcgtgatcggcttcagaatcctgctgctgaaagtggccggctttaacctgctgatgaccctgcggctgtggtccagc

SEQ ID NO: 5559 - DNA, 2325 bp, synthetic construct
  source 1..2325: mol_type = other DNA
atggccttaccagtgaccgccttgctcctgccgctggccttgctgctccacgccgccaggccggaagtgcagctggttgaatctggcggaggactggttcagcctggcggatctctgagactgtcttgtgccgccagcggcttcagcttcagcgacttttggatgagctgggtccgacaggcccctggcaaaggacttgaatgggtcgccacaatcagccaggccggcagcgagaaggactacgtggactctgtgaagggcagattcaccatcagccgggacaacgccaagaagtccctgtacctccagatgaacagcctgagagccgaggacaccgccgtgtactattgtgcctctggcgtgtacagcttcgactacagaggccagggcaccctggtcacagtctcttctggtaccggcggaggcggatctggcggcggaggtagcggtggcggaggatctgaattcgaacagaaactcatcagtgaagaagacctggaattccaggctgtcgtgacacagcctcctagcgcctctggcacaccaggccagagagtgaccatctcctgtagcggcagcagcagcaacatcggcagcaacaccgtgaactggtatcagcaggtgcccggcaccgctcccaagctgctgatctacagcaacaaccagcggcccagcggcgtgcccgatagattttctggcagcaagagcggcaccagcgccagcctggctatctctggactccagtccgaggacgaggccgactactattgcgccgcctgggacgatagcctgaacggctgggtgttcggcggaggcaccaagctgacagtgctgctcgagatccagaaccctgatcctgccgtgtaccagctgcgggatagcaagagcagcgacaagagcgtgtgtctgttcaccgacttcgacagccagaccaacgtgtcccagagcaaggactccgacgtgtacatcaccgataagtgcgtgctggacatgcggagcatggacttcaagagcaactccgccgtggcctggtccaacaagtccgatttcgcctgcgccaacgccttcaacaacagcattatccccgaggacacattcttcccaagccccgagagcagctgcgacgtgaagctggtggaaaagagcttcgagacagacaccaacctgaacttccagatcctgtacgagatcctgctgggcaaggccaccctgtacgccgtgctggtgtctgccctggtgctgatggctatggtcaagcggaaggacagccggggacgcgccaagagaagcggatctggcgtgaagcagaccctgaatttcgacctgctgaagctggctggcgacgtggaatccaacccaggccctactagtatggactggatttggcgcatccttttccttgtcggcgctgctaccggcgcgcattccttcgaacagatgcaactggtgcagagcggagccgaagtgaaagagcctggcgagagcctgcggatctcctgcaagggcagcggctacagcttcaccaatttctggatctcttgggtgcgccagatgcccggcaagggcctggaatggatgggcagagtggaccccggctactcctacagcacctacagccctagcttccagggccacgtgaccatcagcgccgacaagagcaccagcaccgcctacctccagtggaacagcctgaaggccagcgacaccgccatgtactactgcgccagagtgcagtacagcggctattacgattggttcgacccctggggccagggcacactcgtgacagtgtcaagcacgcgtgaggacctgaagaacgtgttcccacctgaggtggccgtgttcgagcctagcgaggccgagatcagccacacccagaaagccaccctcgtgtgcctggctaccggcttctaccccgaccatgtggaactgtcttggtgggtcaacggcaaagaggtgcacagcggcgtgtgtaccgacccccagccactgaaagaacagcccgccctgaacgacagccggtactgcctgagcagcagactgagagtgtccgccaccttctggcagaacccccggaaccacttcagatgccaggtgcagttctacggcctgagcgagaacgacgagtggacccaggacagagccaagcccgtgacccagatcgtgtctgccgaagcctggggcagagccgattgcggctttaccagcgagagctaccagcagggcgtgctgagcgccaccaacctgagcgtgatcggcttcagaatcctgctgctgaaagtggccggctttaacctgctgatgaccctgcggctgtggtccagc

SEQ ID NO: 5560 - DNA, 2307 bp, synthetic construct
  source 1..2307: mol_type = other DNA
atggccttaccagtgaccgccttgctcctgccgctggccttgctgctccacgccgccaggccggaagtgcagctggttgaatctggcggaggactggttcagcctggcggatctctgagactgtcttgtgccgccagcggcttcagcttcagcgacttttggatgagctgggtccgacaggcccctggcaaaggacttgaatgggtcgccacaatcagccaggccggcagcgagaaggactacgtggactctgtgaagggcagattcaccatcagccgggacaacgccaagaagtccctgtacctccagatgaacagcctgagagccgaggacaccgccgtgtactattgtgcctctggcgtgtacagcttcgactacagaggccagggcaccctggtcacagtctcttctggtaccggcggaggcggatctggcggcggaggtagcggtggcggaggatctgaattcgaacagaaactcatcagtgaagaagacctggaattcgacatccagatgacccagagccccagcacactgagcgccagcgtgggcgacagagtgaccatcacctgtcgggccagccagaacatcaacaagtggctggcctggtatcagcagaggcccggaaaagccccccagctgctgatctacaaggccagcagcctggaaagcggcgtgcccagcagattttctggcagcggctctggcaccgagtacaccctgaccatcagctccctccagcccgacgacttcgccacctactactgccagcagtacaacagctacgccaccttcggccagggcaccaaggtggaaatcaagagactcgagatccagaaccctgatcctgccgtgtaccagctgcgggatagcaagagcagcgacaagagcgtgtgtctgttcaccgacttcgacagccagaccaacgtgtcccagagcaaggactccgacgtgtacatcaccgataagtgcgtgctggacatgcggagcatggacttcaagagcaactccgccgtggcctggtccaacaagtccgatttcgcctgcgccaacgccttcaacaacagcattatccccgaggacacattcttcccaagccccgagagcagctgcgacgtgaagctggtggaaaagagcttcgagacagacaccaacctgaacttccagatcctgtacgagatcctgctgggcaaggccaccctgtacgccgtgctggtgtctgccctggtgctgatggctatggtcaagcggaaggacagccggggacgcgccaagagaagcggatctggcgtgaagcagaccctgaatttcgacctgctgaagctggctggcgacgtggaatccaacccaggccctactagtatggactggatttggcgcatccttttccttgtcggcgctgctaccggcgcgcattccttcgaacaggtgcagctggtgcagtctggggccgaagtgaagaagcctggcgagagcctgaagatcagctgcaagggctccggctacaacttctctaacaagtggatcggctgggtgcgccagctgcctggcagaggactggaatggatcgccatcatctaccccggctacagcgacatcacctacagccccagcttccagggccgcgtgacaatcagcgccgacaccagcatcaacaccgcctacctgcactggcacagcctgaaggccagcgacaccgccatgtactactgcgtgcggcatacagccctggctggcttcgattattggggcctgggcaccctcgtgaccgtgtctagtacgcgtgaggacctgaagaacgtgttcccacctgaggtggccgtgttcgagcctagcgaggccgagatcagccacacccagaaagccaccctcgtgtgcctggctaccggcttctaccccgaccatgtggaactgtcttggtgggtcaacggcaaagaggtgcacagcggcgtgtgtaccgacccccagccactgaaagaacagcccgccctgaacgacagccggtactgcctgagcagcagactgagagtgtccgccaccttctggcagaacccccggaaccacttcagatgccaggtgcagttctacggcctgagcgagaacgacgagtggacccaggacagagccaagcccgtgacccagatcgtgtctgccgaagcctggggcagagccgattgcggctttaccagcgagagctaccagcagggcgtgctgagcgccaccaacctgagcgtgatcggcttcagaatcctgctgctgaaagtggccggctttaacctgctgatgaccctgcggctgtggtccagc

SEQ ID NO: 5561 - DNA, 2283 bp, synthetic construct
  source 1..2283: mol_type = other DNA
atggccttaccagtgaccgccttgctcctgccgctggccttgctgctccacgccgccaggccggaagtgcagctggttgaatctggcggaggactggttcagcctggcggatctctgagactgtcttgtgccgccagcggcttcagcttcagcgacttttggatgagctgggtccgacaggcccctggcaaaggacttgaatgggtcgccacaatcagccaggccggcagcgagaaggactacgtggactctgtgaagggcagattcaccatcagccgggacaacgccaagaagtccctgtacctccagatgaacagcctgagagccgaggacaccgccgtgtactattgtgcctctggcgtgtacagcttcgactacagaggccagggcaccctggtcacagtctcttctggtaccggcggaggcggatctggcggcggaggtagcggtggcggaggatctgaattcgacatcgtgctgacacagagccctgcttctctggccgtgtctctgggacagagagccaccatcagctgtagagccagcgagagcgtggacaactacggcaacaccttcatgcactggtatcagcagaagcccggccagcctcctaagctgctgatctacagagccagcaacctggaaagcggcatccccgccagattttctggcagcggcagcagaaccgacttcaccctgaccatcaatcccgtggaagccgacgacgtggcaacctactactgccagcagagcaacgaggaccctcctacatttggagccggcaccaagctggaactgaaactcgagatccagaaccctgatcctgccgtgtaccagctgcgggatagcaagagcagcgacaagagcgtgtgtctgttcaccgacttcgacagccagaccaacgtgtcccagagcaaggactccgacgtgtacatcaccgataagtgcgtgctggacatgcggagcatggacttcaagagcaactccgccgtggcctggtccaacaagtccgatttcgcctgcgccaacgccttcaacaacagcattatccccgaggacacattcttcccaagccccgagagcagctgcgacgtgaagctggtggaaaagagcttcgagacagacaccaacctgaacttccagatcctgtacgagatcctgctgggcaaggccaccctgtacgccgtgctggtgtctgccctggtgctgatggctatggtcaagcggaaggacagccggggacgcgccaagagaagcggatctggcgtgaagcagaccctgaatttcgacctgctgaagctggctggcgacgtggaatccaacccaggccctactagtatggactggatttggcgcatccttttccttgtcggcgctgctaccggcgcgcattccttcgaacagattcagctggtgcagtctggccccgagctgaagaaacctggcgagacagtgaagatcagctgcaaggccagcggctacatcttcaccaattacggcatgaactgggtcaagcaggcccctggcaagagcttcaagtggatgggctggatcaacacctacaccggcgagagcacatacagcgccgacttcaagggcagattcgccttcagcctggaaaccagcgccagcacagcctacctgcacatcaacgacctgaagaacgaggacaccgccacctacttttgcgccagaagcggcggctacgaccctatggattattggggccagggcaccagcgtgaccgtttcttctacgcgtgaggacctgaagaacgtgttcccacctgaggtggccgtgttcgagcctagcgaggccgagatcagccacacccagaaagccaccctcgtgtgcctggctaccggcttctaccccgaccatgtggaactgtcttggtgggtcaacggcaaagaggtgcacagcggcgtgtgtaccgacccccagccactgaaagaacagcccgccctgaacgacagccggtactgcctgagcagcagactgagagtgtccgccaccttctggcagaacccccggaaccacttcagatgccaggtgcagttctacggcctgagcgagaacgacgagtggacccaggacagagccaagcccgtgacccagatcgtgtctgccgaagcctggggcagagccgattgcggctttaccagcgagagctaccagcagggcgtgctgagcgccaccaacctgagcgtgatcggcttcagaatcctgctgctgaaagtggccggctttaacctgctgatgaccctgcggctgtggtccagc

SEQ ID NO: 5562 - DNA, 2280 bp, synthetic construct
  source 1..2280: mol_type = other DNA
atggccttaccagtgaccgccttgctcctgccgctggccttgctgctccacgccgccaggccggaagtgcagctggttgaatctggcggaggactggttcagcctggcggatctctgagactgtcttgtgccgccagcggcttcagcttcagcgacttttggatgagctgggtccgacaggcccctggcaaaggacttgaatgggtcgccacaatcagccaggccggcagcgagaaggactacgtggactctgtgaagggcagattcaccatcagccgggacaacgccaagaagtccctgtacctccagatgaacagcctgagagccgaggacaccgccgtgtactattgtgcctctggcgtgtacagcttcgactacagaggccagggcaccctggtcacagtctcttctggtaccggcggaggcggatctggcggcggaggtagcggtggcggaggatctgaattcgacgagatcgtgctgacacagagccctggcaccctgagcctgtctccaggcgaaagagccacactgagctgtcgggccagccagagcgtgtccaatacctacctggcctggtatcaccagaggcccggacaggctccccggctgctgatctatggcgcttctagcagagccaccggcatccccgatagattcagcggctctggcagcggcaccgacttcgccctgacaatcagctccctggaacccgaggacttcgccgtgtactactgccagcagtacagcaactcctggaccttcggccagggcaccaaggtggaaatcaagagactcgagatccagaaccctgatcctgccgtgtaccagctgcgggatagcaagagcagcgacaagagcgtgtgtctgttcaccgacttcgacagccagaccaacgtgtcccagagcaaggactccgacgtgtacatcaccgataagtgcgtgctggacatgcggagcatggacttcaagagcaactccgccgtggcctggtccaacaagtccgatttcgcctgcgccaacgccttcaacaacagcattatccccgaggacacattcttcccaagccccgagagcagctgcgacgtgaagctggtggaaaagagcttcgagacagacaccaacctgaacttccagatcctgtacgagatcctgctgggcaaggccaccctgtacgccgtgctggtgtctgccctggtgctgatggctatggtcaagcggaaggacagccggggacgcgccaagagaagcggatctggcgtgaagcagaccctgaatttcgacctgctgaagctggctggcgacgtggaatccaacccaggccctactagtatggactggatttggcgcatccttttccttgtcggcgctgctaccggcgcgcattccttcgaacaggtgcaactggtggaatctggcgggggagtggtgcagcctggcagaagcctgagactgtcttgtgccgccagcggcttcaccttcagcagctacgacatgcactgggtgcgccaggcccctggcaaaggactggaatgggtggccgtgatctcctacgacggcaccaacgagtattacgccgacagcgtgaagggccggttcaccatctccagagacaccagcaagaacaccctgtacctccagatgaacagcctgcgggccgaggacacagccgtgtattattgcgccagagagcggtacttcgactggtccttcgactactggggccagggaaccctggtgtccgtgtctagtacgcgtgaggacctgaagaacgtgttcccacctgaggtggccgtgttcgagcctagcgaggccgagatcagccacacccagaaagccaccctcgtgtgcctggctaccggcttctaccccgaccatgtggaactgtcttggtgggtcaacggcaaagaggtgcacagcggcgtgtgtaccgacccccagccactgaaagaacagcccgccctgaacgacagccggtactgcctgagcagcagactgagagtgtccgccaccttctggcagaacccccggaaccacttcagatgccaggtgcagttctacggcctgagcgagaacgacgagtggacccaggacagagccaagcccgtgacccagatcgtgtctgccgaagcctggggcagagccgattgcggctttaccagcgagagctaccagcagggcgtgctgagcgccaccaacctgagcgtgatcggcttcagaatcctgctgctgaaagtggccggctttaacctgctgatgaccctgcggctgtggtccagc

SEQ ID NO: 5563 - DNA, 2277 bp, synthetic construct
  source 1..2277: mol_type = other DNA
atggccttaccagtgaccgccttgctcctgccgctggccttgctgctccacgccgccaggccggaagtgcagctggttgaatctggcggaggactggttcagcctggcggatctctgagactgtcttgtgccgccagcggcttcagcttcagcgacttttggatgagctgggtccgacaggcccctggcaaaggacttgaatgggtcgccacaatcagccaggccggcagcgagaaggactacgtggactctgtgaagggcagattcaccatcagccgggacaacgccaagaagtccctgtacctccagatgaacagcctgagagccgaggacaccgccgtgtactattgtgcctctggcgtgtacagcttcgactacagaggccagggcaccctggtcacagtctcttctggtaccggcggaggcggatctggcggcggaggtagcggtggcggaggatctgaattcgacgagctgacacaggaccctgctgtgtctgttgccctgggccagacagtgcggattacctgtcaaggcgacagcctgagaagcaactacgccaactggtatcagcagaagcccggacaggctcccgtgctggttatctacggccagaacaacagacccagcggcatccccgatagattcagcggctctagctctggcaataccgccagcctgacaatcactggcgctcaggctgccgatgaggccgactactactgcgatagcagagtgtccaccggcaatcacgtggtgtttggcggcggaacaaagctgacagtgctcggacaactcgagatccagaaccctgatcctgccgtgtaccagctgcgggatagcaagagcagcgacaagagcgtgtgtctgttcaccgacttcgacagccagaccaacgtgtcccagagcaaggactccgacgtgtacatcaccgataagtgcgtgctggacatgcggagcatggacttcaagagcaactccgccgtggcctggtccaacaagtccgatttcgcctgcgccaacgccttcaacaacagcattatccccgaggacacattcttcccaagccccgagagcagctgcgacgtgaagctggtggaaaagagcttcgagacagacaccaacctgaacttccagatcctgtacgagatcctgctgggcaaggccaccctgtacgccgtgctggtgtctgccctggtgctgatggctatggtcaagcggaaggacagccggggacgcgccaagagaagcggatctggcgtgaagcagaccctgaatttcgacctgctgaagctggctggcgacgtggaatccaacccaggccctactagtatggactggatttggcgcatccttttccttgtcggcgctgctaccggcgcgcattccttcgaagaagttcagctggtgcagagcggagccgaagtgaagaaacctggggcctctgtgaaggtgtcctgcaaggcttccggctacacctttaccagctacgccatgcactgggtccgacaggcacctggacaacggcttgaatggatgggctggatcaacgccggcaacggcaacaccaagtacagccagaaattccagggccgcgtgaccatcaccagagatacaagcgccagcaccgcctacatggaactgtctagcctgagatccgaggacaccgccgtgtactactgtgccagagacatcagctacggcagcttcgactattggggccagggcacactggtcaccgttagctctacgcgtgaggacctgaagaacgtgttcccacctgaggtggccgtgttcgagcctagcgaggccgagatcagccacacccagaaagccaccctcgtgtgcctggctaccggcttctaccccgaccatgtggaactgtcttggtgggtcaacggcaaagaggtgcacagcggcgtgtgtaccgacccccagccactgaaagaacagcccgccctgaacgacagccggtactgcctgagcagcagactgagagtgtccgccaccttctggcagaacccccggaaccacttcagatgccaggtgcagttctacggcctgagcgagaacgacgagtggacccaggacagagccaagcccgtgacccagatcgtgtctgccgaagcctggggcagagccgattgcggctttaccagcgagagctaccagcagggcgtgctgagcgccaccaacctgagcgtgatcggcttcagaatcctgctgctgaaagtggccggctttaacctgctgatgaccctgcggctgtggtccagc

SEQ ID NO: 5564 - DNA, 2283 bp, synthetic construct
  source 1..2283: mol_type = other DNA
atggccttaccagtgaccgccttgctcctgccgctggccttgctgctccacgccgccaggccggaagtgcagctggttgaatctggcggaggactggttcagcctggcggatctctgagactgtcttgtgccgccagcggcttcagcttcagcgacttttggatgagctgggtccgacaggcccctggcaaaggacttgaatgggtcgccacaatcagccaggccggcagcgagaaggactacgtggactctgtgaagggcagattcaccatcagccgggacaacgccaagaagtccctgtacctccagatgaacagcctgagagccgaggacaccgccgtgtactattgtgcctctggcgtgtacagcttcgactacagaggccagggcaccctggtcacagtctcttctggtaccggcggaggcggatctggcggcggaggtagcggtggcggaggatctgaattcgacgacatcgtgctgacacagacaccagccacactgagcgtgacacctggcgattctgtgtccctgagctgtagagccagccagagcatcagcaacaacctgcactggtatcagcagaagtcccacgagagccccagactgctgattaagaacgccagccagtctatcagcggcatccccagcaagtttagcggctctggcagcggcaccgacttcaccctgagaatcaacagcgtggaaaccgaggacttcgggatgtacttctgccagcagagcaatagctggccctacacatttggctccggcaccaagctggaaatcaaactcgagatccagaaccctgatcctgccgtgtaccagctgcgggatagcaagagcagcgacaagagcgtgtgtctgttcaccgacttcgacagccagaccaacgtgtcccagagcaaggactccgacgtgtacatcaccgataagtgcgtgctggacatgcggagcatggacttcaagagcaactccgccgtggcctggtccaacaagtccgatttcgcctgcgccaacgccttcaacaacagcattatccccgaggacacattcttcccaagccccgagagcagctgcgacgtgaagctggtggaaaagagcttcgagacagacaccaacctgaacttccagatcctgtacgagatcctgctgggcaaggccaccctgtacgccgtgctggtgtctgccctggtgctgatggctatggtcaagcggaaggacagccggggacgcgccaagagaagcggatctggcgtgaagcagaccctgaatttcgacctgctgaagctggctggcgacgtggaatccaacccaggccctactagtatggactggatttggcgcatccttttccttgtcggcgctgctaccggcgcgcattccttcgaacaagtgaagctgcaacagagcggacccgagctggttaagccaggcgcttccgtgaagattagctgcaaggccagcggctacagcttcaccggctactacatgcactgggtcaagcagagccacggcaacatcctggactggatcggctacatctacccctacaacggcgtgtccagctacaaccagaagttcaagggcaaagccactctgaccgtggacaagagcagcagcaccgcctacatggaactgagaagcctgaccagcgaggacagcgccgtgtactattgtgccagagagcggggcctgtaccagctcagagcaatggattattggggccagggcaccagcgtgaccgtttcttctacgcgtgaggacctgaagaacgtgttcccacctgaggtggccgtgttcgagcctagcgaggccgagatcagccacacccagaaagccaccctcgtgtgcctggctaccggcttctaccccgaccatgtggaactgtcttggtgggtcaacggcaaagaggtgcacagcggcgtgtgtaccgacccccagccactgaaagaacagcccgccctgaacgacagccggtactgcctgagcagcagactgagagtgtccgccaccttctggcagaacccccggaaccacttcagatgccaggtgcagttctacggcctgagcgagaacgacgagtggacccaggacagagccaagcccgtgacccagatcgtgtctgccgaagcctggggcagagccgattgcggctttaccagcgagagctaccagcagggcgtgctgagcgccaccaacctgagcgtgatcggcttcagaatcctgctgctgaaagtggccggctttaacctgctgatgaccctgcggctgtggtccagc

SEQ ID NO: 5565 - DNA, 2256 bp, synthetic construct
  source 1..2256: mol_type = other DNA
atggccttaccagtgaccgccttgctcctgccgctggccttgctgctccacgccgccaggccggaagtgcagctggttgaatctggcggaggactggttcagcctggcggatctctgagactgtcttgtgccgccagcggcttcagcttcagcgacttttggatgagctgggtccgacaggcccctggcaaaggacttgaatgggtcgccacaatcagccaggccggcagcgagaaggactacgtggactctgtgaagggcagattcaccatcagccgggacaacgccaagaagtccctgtacctccagatgaacagcctgagagccgaggacaccgccgtgtactattgtgcctctggcgtgtacagcttcgactacagaggccagggcaccctggtcacagtctcttctggtaccggcggaggcggatctggcggcggaggtagcggtggcggaggatctgaattcgacgacatcgtgatgacacagacccctgccatcatgagcgcctctccaggccagaaagtgaccatcacatgtagcgccagcagcagcgtgaactacatgcactggtatcagcagaagctgggcagcagccccaagctgtggatctacgataccagcaaactggcccctggcgtgccagccagattttctggttctggcagcggcaccagctacagcctgacaatcagcagcatggaagccgaggatgccgccagctacttctgccatcagtggtctagctacccctacacctttggctccggcaccaagctggaaatcaaactcgagatccagaaccctgatcctgccgtgtaccagctgcgggatagcaagagcagcgacaagagcgtgtgtctgttcaccgacttcgacagccagaccaacgtgtcccagagcaaggactccgacgtgtacatcaccgataagtgcgtgctggacatgcggagcatggacttcaagagcaactccgccgtggcctggtccaacaagtccgatttcgcctgcgccaacgccttcaacaacagcattatccccgaggacacattcttcccaagccccgagagcagctgcgacgtgaagctggtggaaaagagcttcgagacagacaccaacctgaacttccagatcctgtacgagatcctgctgggcaaggccaccctgtacgccgtgctggtgtctgccctggtgctgatggctatggtcaagcggaaggacagccggggacgcgccaagagaagcggatctggcgtgaagcagaccctgaatttcgacctgctgaagctggctggcgacgtggaatccaacccaggccctactagtatggactggatttggcgcatccttttccttgtcggcgctgctaccggcgcgcattccttcgaagaagttcagctccaagagtctggccccgacctggtcaagcctagccaaagcctgagcctgacctgtaccgtgaccggctacagcatcacaagcggctatggatggcactggatcagacagttccccggcaacaaactggaatggatgggctacatccactacagcggcagcaccacctacaatcccagcctgaagtcccggatcagcatcagcagagacaccagcaagaaccagttcttcctgcaactgaacagcgtgaccaccgaggacaccgccacctactattgtgctcggagcctgagatattggggccagggcacaaccctgaccgtgtcatctacgcgtgaggacctgaagaacgtgttcccacctgaggtggccgtgttcgagcctagcgaggccgagatcagccacacccagaaagccaccctcgtgtgcctggctaccggcttctaccccgaccatgtggaactgtcttggtgggtcaacggcaaagaggtgcacagcggcgtgtgtaccgacccccagccactgaaagaacagcccgccctgaacgacagccggtactgcctgagcagcagactgagagtgtccgccaccttctggcagaacccccggaaccacttcagatgccaggtgcagttctacggcctgagcgagaacgacgagtggacccaggacagagccaagcccgtgacccagatcgtgtctgccgaagcctggggcagagccgattgcggctttaccagcgagagctaccagcagggcgtgctgagcgccaccaacctgagcgtgatcggcttcagaatcctgctgctgaaagtggccggctttaacctgctgatgaccctgcggctgtggtccagc

SEQ ID NO: 5566 - DNA, 2265 bp, synthetic construct
  source 1..2265: mol_type = other DNA
atggccttaccagtgaccgccttgctcctgccgctggccttgctgctccacgccgccaggccggaagtgcagctggttgaatctggcggaggactggttcagcctggcggatctctgagactgtcttgtgccgccagcggcttcagcttcagcgacttttggatgagctgggtccgacaggcccctggcaaaggacttgaatgggtcgccacaatcagccaggccggcagcgagaaggactacgtggactctgtgaagggcagattcaccatcagccgggacaacgccaagaagtccctgtacctccagatgaacagcctgagagccgaggacaccgccgtgtactattgtgcctctggcgtgtacagcttcgactacagaggccagggcaccctggtcacagtctcttctggtaccggcggaggcggatctggcggcggaggtagcggtggcggaggatctgaattcgacgacatccagatgacacagagccctagcagcctgtctgccagcgtgggagacagagtgaccatcacctgtagcgccaccagcagcatcagctacatgcactggtatcagcagaagcccggcaaggcccctaaaggctggatctacgataccagcaaactggcccacggcgtgcccagcagattttctggttctggcagcggcaccgacttcaccctgacaatatctagcctccagcctgaggacttcgccacctactactgccaccagagaagaagctaccccttcaccttcggccagggcaccaaggtggaaatcaaactcgagatccagaaccctgatcctgccgtgtaccagctgcgggatagcaagagcagcgacaagagcgtgtgtctgttcaccgacttcgacagccagaccaacgtgtcccagagcaaggactccgacgtgtacatcaccgataagtgcgtgctggacatgcggagcatggacttcaagagcaactccgccgtggcctggtccaacaagtccgatttcgcctgcgccaacgccttcaacaacagcattatccccgaggacacattcttcccaagccccgagagcagctgcgacgtgaagctggtggaaaagagcttcgagacagacaccaacctgaacttccagatcctgtacgagatcctgctgggcaaggccaccctgtacgccgtgctggtgtctgccctggtgctgatggctatggtcaagcggaaggacagccggggacgcgccaagagaagcggatctggcgtgaagcagaccctgaatttcgacctgctgaagctggctggcgacgtggaatccaacccaggccctactagtatggactggatttggcgcatccttttccttgtcggcgctgctaccggcgcgcattccttcgaagaagtgcaactggttcagagcggagccgaagtgaagaaacctggggcctctgtgaaggtgtcctgcaaggcttccggctacacctttaccaatttctggattcactgggtccgacaggctccaggccaaggactggaatggatcggagagatcgaccccagcgacagctacaccaactacaaccagaaattcaaaggccgggtcaccatcaccagagacaccagcacaagcaccgcctacctggaactgagcagcctgagaagcgaggacaccgccgtgtactactgcgccagggaaatcaccaccgtggattattggggccagggaaccctggtcaccgtgtcatctacgcgtgaggacctgaagaacgtgttcccacctgaggtggccgtgttcgagcctagcgaggccgagatcagccacacccagaaagccaccctcgtgtgcctggctaccggcttctaccccgaccatgtggaactgtcttggtgggtcaacggcaaagaggtgcacagcggcgtgtgtaccgacccccagccactgaaagaacagcccgccctgaacgacagccggtactgcctgagcagcagactgagagtgtccgccaccttctggcagaacccccggaaccacttcagatgccaggtgcagttctacggcctgagcgagaacgacgagtggacccaggacagagccaagcccgtgacccagatcgtgtctgccgaagcctggggcagagccgattgcggctttaccagcgagagctaccagcagggcgtgctgagcgccaccaacctgagcgtgatcggcttcagaatcctgctgctgaaagtggccggctttaacctgctgatgaccctgcggctgtggtccagc

SEQ ID NO: 5567 - DNA, 2286 bp, synthetic construct
  source 1..2286: mol_type = other DNA
atggccttaccagtgaccgccttgctcctgccgctggccttgctgctccacgccgccaggccggaagtgcagctggttgaatctggcggaggactggttcagcctggcggatctctgagactgtcttgtgccgccagcggcttcagcttcagcgacttttggatgagctgggtccgacaggcccctggcaaaggacttgaatgggtcgccacaatcagccaggccggcagcgagaaggactacgtggactctgtgaagggcagattcaccatcagccgggacaacgccaagaagtccctgtacctccagatgaacagcctgagagccgaggacaccgccgtgtactattgtgcctctggcgtgtacagcttcgactacagaggccagggcaccctggtcacagtctcttctggtaccggcggaggcggatctggcggcggaggtagcggtggcggaggatctgaattcgacgacatccagatgacacagagccctagcagcctgtctgccagcgtgggagacagagtgaccatcacatgcaaggccagccagggcttcaacaaatacgtggcctggtatcagcagaagcccggcaaggctcctaagctgctgatctactacaccagcacactccagcctggcgtgcccagcagattttctggctctggcagcggcagagactacaccctgacaatatccagcctccagccagaggacttcgccacctactactgtctccagtacggcaacctgctgtacgcctttggacagggcaccaaggtggaaatcaagagactcgagatccagaaccctgatcctgccgtgtaccagctgcgggatagcaagagcagcgacaagagcgtgtgtctgttcaccgacttcgacagccagaccaacgtgtcccagagcaaggactccgacgtgtacatcaccgataagtgcgtgctggacatgcggagcatggacttcaagagcaactccgccgtggcctggtccaacaagtccgatttcgcctgcgccaacgccttcaacaacagcattatccccgaggacacattcttcccaagccccgagagcagctgcgacgtgaagctggtggaaaagagcttcgagacagacaccaacctgaacttccagatcctgtacgagatcctgctgggcaaggccaccctgtacgccgtgctggtgtctgccctggtgctgatggctatggtcaagcggaaggacagccggggacgcgccaagagaagcggatctggcgtgaagcagaccctgaatttcgacctgctgaagctggctggcgacgtggaatccaacccaggccctactagtatggactggatttggcgcatccttttccttgtcggcgctgctaccggcgcgcattccttcgaagaagttcagcttgtgcagagcggagccgaagtgaagaaacctggggcctctgtgaaggtgtcctgcaaagccagcggctacacctttaccagctactggatcggctgggtccgacaggctcctggacaaggactggaatggatcggcgacatctatcccggcggaggctacaccaactacaacgagaagttcaagggccgcgtgacaatcaccagagacacctctacaagcaccgcctacctggaactgagcagcctgagaagcgaggacaccgccgtgtactactgcgccagactggatggcagcagctacagaggcgctatggattcttggggccagggcacactggtcaccgtttcttctacgcgtgaggacctgaagaacgtgttcccacctgaggtggccgtgttcgagcctagcgaggccgagatcagccacacccagaaagccaccctcgtgtgcctggctaccggcttctaccccgaccatgtggaactgtcttggtgggtcaacggcaaagaggtgcacagcggcgtgtgtaccgacccccagccactgaaagaacagcccgccctgaacgacagccggtactgcctgagcagcagactgagagtgtccgccaccttctggcagaacccccggaaccacttcagatgccaggtgcagttctacggcctgagcgagaacgacgagtggacccaggacagagccaagcccgtgacccagatcgtgtctgccgaagcctggggcagagccgattgcggctttaccagcgagagctaccagcagggcgtgctgagcgccaccaacctgagcgtgatcggcttcagaatcctgctgctgaaagtggccggctttaacctgctgatgaccctgcggctgtggtccagc

SEQ ID NO: 5568 - DNA, 2274 bp, synthetic construct
  source 1..2274: mol_type = other DNA
atggccttaccagtgaccgccttgctcctgccgctggccttgctgctccacgccgccaggccggaagtgcagctggttgaatctggcggaggactggttcagcctggcggatctctgagactgtcttgtgccgccagcggcttcagcttcagcgacttttggatgagctgggtccgacaggcccctggcaaaggacttgaatgggtcgccacaatcagccaggccggcagcgagaaggactacgtggactctgtgaagggcagattcaccatcagccgggacaacgccaagaagtccctgtacctccagatgaacagcctgagagccgaggacaccgccgtgtactattgtgcctctggcgtgtacagcttcgactacagaggccagggcaccctggtcacagtctcttctggtaccggcggaggcggatctggcggcggaggtagcggtggcggaggatctgaattcgacgacatccagatgacacagagccctagcagcctgtctgccagcgtgggagacagagtgaccatcacctgtagagccagccaggacatccggtactacctgaactggtatcagcagaagcccggcaaggcccctaagctgctgatctatgtggcctccagcctccagagcggagtgccttctagattttctggcagcggctccggcaccgagtttaccctgacagtgtctagcttgcagcccgaggacttcgccacctactactgcctgcaagtgtacagcacccctcggacctttggacagggcaccaaggtggaaatcaaactcgagatccagaaccctgatcctgccgtgtaccagctgcgggatagcaagagcagcgacaagagcgtgtgtctgttcaccgacttcgacagccagaccaacgtgtcccagagcaaggactccgacgtgtacatcaccgataagtgcgtgctggacatgcggagcatggacttcaagagcaactccgccgtggcctggtccaacaagtccgatttcgcctgcgccaacgccttcaacaacagcattatccccgaggacacattcttcccaagccccgagagcagctgcgacgtgaagctggtggaaaagagcttcgagacagacaccaacctgaacttccagatcctgtacgagatcctgctgggcaaggccaccctgtacgccgtgctggtgtctgccctggtgctgatggctatggtcaagcggaaggacagccggggacgcgccaagagaagcggatctggcgtgaagcagaccctgaatttcgacctgctgaagctggctggcgacgtggaatccaacccaggccctactagtatggactggatttggcgcatccttttccttgtcggcgctgctaccggcgcgcattccttcgaagaagtgcagcttgttgaatctggcggcggactggctaagcctggcggatctctgagactgtcttgtgccgccagcggcttccggttcaccttcaacaactactacatggactgggtccgacaggcccctggacaaggacttgaatgggtgtccagaatcagcagcagcggcgaccctacttggtacgccgattctgtgaagggcagattcaccatcagcagagagaacgccaagaacaccctgttcctccagatgaactccctgagagccgaggacaccgccgtgtactattgtgcctctctgaccaccggcagcgattcttggggacagggcgtgctggttaccgtgtcatctacgcgtgaggacctgaagaacgtgttcccacctgaggtggccgtgttcgagcctagcgaggccgagatcagccacacccagaaagccaccctcgtgtgcctggctaccggcttctaccccgaccatgtggaactgtcttggtgggtcaacggcaaagaggtgcacagcggcgtgtgtaccgacccccagccactgaaagaacagcccgccctgaacgacagccggtactgcctgagcagcagactgagagtgtccgccaccttctggcagaacccccggaaccacttcagatgccaggtgcagttctacggcctgagcgagaacgacgagtggacccaggacagagccaagcccgtgacccagatcgtgtctgccgaagcctggggcagagccgattgcggctttaccagcgagagctaccagcagggcgtgctgagcgccaccaacctgagcgtgatcggcttcagaatcctgctgctgaaagtggccggctttaacctgctgatgaccctgcggctgtggtccagc

SEQ ID NO: 5569 - DNA, 2274 bp, synthetic construct
  source 1..2274: mol_type = other DNA
atggccttaccagtgaccgccttgctcctgccgctggccttgctgctccacgccgccaggccggaagtgcagctggttgaatctggcggaggactggttcagcctggcggatctctgagactgtcttgtgccgccagcggcttcagcttcagcgacttttggatgagctgggtccgacaggcccctggcaaaggacttgaatgggtcgccacaatcagccaggccggcagcgagaaggactacgtggactctgtgaagggcagattcaccatcagccgggacaacgccaagaagtccctgtacctccagatgaacagcctgagagccgaggacaccgccgtgtactattgtgcctctggcgtgtacagcttcgactacagaggccagggcaccctggtcacagtctcttctggtaccggcggaggcggatctggcggcggaggtagcggtggcggaggatctgaattcgagatcgtgatgacacagagccccgccacactgagtgtgtctccaggcgaaagagccacactgtcctgtagagccagccagagcgtgtccagaaacctggcctggtatcagcagaagcctggacaggctccccggctgttgatctacggcgcttctacaagagccaccggcattcccgccagattttctggctctggcagcggcaccgagttcaccctgacaatcggaagcctccagagcgaggacttcgccgtgtactactgccagcagtacaagacctggcctcggacctttggacagggcaccaacgtggaaatcaaactcgagatccagaaccctgatcctgccgtgtaccagctgcgggatagcaagagcagcgacaagagcgtgtgtctgttcaccgacttcgacagccagaccaacgtgtcccagagcaaggactccgacgtgtacatcaccgataagtgcgtgctggacatgcggagcatggacttcaagagcaactccgccgtggcctggtccaacaagtccgatttcgcctgcgccaacgccttcaacaacagcattatccccgaggacacattcttcccaagccccgagagcagctgcgacgtgaagctggtggaaaagagcttcgagacagacaccaacctgaacttccagatcctgtacgagatcctgctgggcaaggccaccctgtacgccgtgctggtgtctgccctggtgctgatggctatggtcaagcggaaggacagccggggacgcgccaagagaagcggatctggcgtgaagcagaccctgaatttcgacctgctgaagctggctggcgacgtggaatccaacccaggccctactagtatggactggatttggcgcatccttttccttgtcggcgctgctaccggcgcgcattccttcgaacaagttcagctgcaacaatggggagccggcctgctgaagcctagcgaaacactgtctctgacctgcgccgtgttcggcggctctttcagcggctactactggtcctggatcagacagcctcctggcaaaggactggaatggatcggcgagatcaaccaccggggcaacaccaacgacaaccccagcctgaaaagcagagtgaccatcagcgtggacaccagcaagaaccagttcgccctgaagctgagcagcgtgacagccgctgataccgccgtgtattattgcgccagagagcggggctacacctacggcaatttcgatcactggggccagggcaccctggtcacagtttcttctacgcgtgaggacctgaagaacgtgttcccacctgaggtggccgtgttcgagcctagcgaggccgagatcagccacacccagaaagccaccctcgtgtgcctggctaccggcttctaccccgaccatgtggaactgtcttggtgggtcaacggcaaagaggtgcacagcggcgtgtgtaccgacccccagccactgaaagaacagcccgccctgaacgacagccggtactgcctgagcagcagactgagagtgtccgccaccttctggcagaacccccggaaccacttcagatgccaggtgcagttctacggcctgagcgagaacgacgagtggacccaggacagagccaagcccgtgacccagatcgtgtctgccgaagcctggggcagagccgattgcggctttaccagcgagagctaccagcagggcgtgctgagcgccaccaacctgagcgtgatcggcttcagaatcctgctgctgaaagtggccggctttaacctgctgatgaccctgcggctgtggtccagc

SEQ ID NO: 5570 - DNA, 2277 bp, synthetic construct
  source 1..2277: mol_type = other DNA
atggccttaccagtgaccgccttgctcctgccgctggccttgctgctccacgccgccaggccggaagtgcagctggttgaatctggcggaggactggttcagcctggcggatctctgagactgtcttgtgccgccagcggcttcagcttcagcgacttttggatgagctgggtccgacaggcccctggcaaaggacttgaatgggtcgccacaatcagccaggccggcagcgagaaggactacgtggactctgtgaagggcagattcaccatcagccgggacaacgccaagaagtccctgtacctccagatgaacagcctgagagccgaggacaccgccgtgtactattgtgcctctggcgtgtacagcttcgactacagaggccagggcaccctggtcacagtctcttctggtaccggcggaggcggatctggcggcggaggtagcggtggcggaggatctgaattcgagatcgtgatgacccctagcagcgccacactgagtgtgtctccaggcgaaagagccacactgtcctgtagagccagccagagcgtgtccagaaacctggcctggtatcagcagaagcctggacaggctccccggctgttgatctacggcgcttctacaagagccaccggcattcccgccagattttctggctctggcagcggcaccgagttcaccctgacaatctctagcctccagagcgaggacttcgccgtgtactactgccaccagtacagcaactggatgtgcagcttcggccagggcaccaagctggaaatcaaactcgagatccagaaccctgatcctgccgtgtaccagctgcgggatagcaagagcagcgacaagagcgtgtgtctgttcaccgacttcgacagccagaccaacgtgtcccagagcaaggactccgacgtgtacatcaccgataagtgcgtgctggacatgcggagcatggacttcaagagcaactccgccgtggcctggtccaacaagtccgatttcgcctgcgccaacgccttcaacaacagcattatccccgaggacacattcttcccaagccccgagagcagctgcgacgtgaagctggtggaaaagagcttcgagacagacaccaacctgaacttccagatcctgtacgagatcctgctgggcaaggccaccctgtacgccgtgctggtgtctgccctggtgctgatggctatggtcaagcggaaggacagccggggacgcgccaagagaagcggatctggcgtgaagcagaccctgaatttcgacctgctgaagctggctggcgacgtggaatccaacccaggccctactagtatggactggatttggcgcatccttttccttgtcggcgctgctaccggcgcgcattccttcgaagaagttcagctccttgagtcaggtggcggcctggttcaacctggcggatctctgagactgagctgtgccgccagcggcttcacctttagcagatacgccatgaactgggtccgacaggcccctggcaaaggactggaatgggtgtccggcatctctggaagcggcggcagaacctactacgccgattctgtgaagggcagattcaccatcagccgggacaacagcaagaacaccctgtacctccagatgaacagcctgagagccgaggacacagccgtgtattattgcgccaaggaccgggacttttggagcggcccttttgactattggggccagggaaccctggtcaccgttagctctacgcgtgaggacctgaagaacgtgttcccacctgaggtggccgtgttcgagcctagcgaggccgagatcagccacacccagaaagccaccctcgtgtgcctggctaccggcttctaccccgaccatgtggaactgtcttggtgggtcaacggcaaagaggtgcacagcggcgtgtgtaccgacccccagccactgaaagaacagcccgccctgaacgacagccggtactgcctgagcagcagactgagagtgtccgccaccttctggcagaacccccggaaccacttcagatgccaggtgcagttctacggcctgagcgagaacgacgagtggacccaggacagagccaagcccgtgacccagatcgtgtctgccgaagcctggggcagagccgattgcggctttaccagcgagagctaccagcagggcgtgctgagcgccaccaacctgagcgtgatcggcttcagaatcctgctgctgaaagtggccggctttaacctgctgatgaccctgcggctgtggtccagc

SEQ ID NO: 5571 - DNA, 2292 bp, synthetic construct
  source 1..2292: mol_type = other DNA
atggccttaccagtgaccgccttgctcctgccgctggccttgctgctccacgccgccaggccggaagtgcagctggttgaatctggcggaggactggttcagcctggcggatctctgagactgtcttgtgccgccagcggcttcagcttcagcgacttttggatgagctgggtccgacaggcccctggcaaaggacttgaatgggtcgccacaatcagccaggccggcagcgagaaggactacgtggactctgtgaagggcagattcaccatcagccgggacaacgccaagaagtccctgtacctccagatgaacagcctgagagccgaggacaccgccgtgtactattgtgcctctggcgtgtacagcttcgactacagaggccagggcaccctggtcacagtctcttctggtaccggcggaggcggatctggcggcggaggtagcggtggcggaggatctgaattcgacatccagatgacccagagccccagcagcctgtctgccagcgtgggcgacagagtgaccatcacatgcaaggccagcaagaacatcagaagctacctggcctggtatcagcagaagcccggcaaggcccccaagctgctgatctacagcggcagcacactgcacagcggcgtgcccagcagattttccggctctggcagcggcaccgacttcaccctgaccatctctagcctccagcccgaggacttcgccacctactactgccagcagcaccacgagtaccccctgacattcggccagggcaccaaggtggaaatcaagagactcgagatccagaaccctgatcctgccgtgtaccagctgcgggatagcaagagcagcgacaagagcgtgtgtctgttcaccgacttcgacagccagaccaacgtgtcccagagcaaggactccgacgtgtacatcaccgataagtgcgtgctggacatgcggagcatggacttcaagagcaactccgccgtggcctggtccaacaagtccgatttcgcctgcgccaacgccttcaacaacagcattatccccgaggacacattcttcccaagccccgagagcagctgcgacgtgaagctggtggaaaagagcttcgagacagacaccaacctgaacttccagatcctgtacgagatcctgctgggcaaggccaccctgtacgccgtgctggtgtctgccctggtgctgatggctatggtcaagcggaaggacagccggggacgcgccaagagaagcggatctggcgtgaagcagaccctgaatttcgacctgctgaagctggctggcgacgtggaatccaacccaggccctactagtatggactggatttggcgcatccttttccttgtcggcgctgctaccggcgcgcattccttcgaacaggtgcaactccaggaatctggccccggactcgtgaagcccagcgagacactgagcctgacctgtaccgtgtccggctacaccatcaccagcggctacgactggtcctggatcagacagcctcctggcaagggcctggaatggatcggctacatcaactacggcggctccaccaactacaagcccagcctgggaagccgcgtgacaatcagcgtggacacctccaagaaccagttcagcctgaagctgagcagcgtgacagccgccgataccgccgtgtactactgcgcccggtacaacgagtacaagagctacatctacgattggtacttcgacttctggggccagggaaccctcgtgaccgtgtctagtacgcgtgaggacctgaagaacgtgttcccacctgaggtggccgtgttcgagcctagcgaggccgagatcagccacacccagaaagccaccctcgtgtgcctggctaccggcttctaccccgaccatgtggaactgtcttggtgggtcaacggcaaagaggtgcacagcggcgtgtgtaccgacccccagccactgaaagaacagcccgccctgaacgacagccggtactgcctgagcagcagactgagagtgtccgccaccttctggcagaacccccggaaccacttcagatgccaggtgcagttctacggcctgagcgagaacgacgagtggacccaggacagagccaagcccgtgacccagatcgtgtctgccgaagcctggggcagagccgattgcggctttaccagcgagagctaccagcagggcgtgctgagcgccaccaacctgagcgtgatcggcttcagaatcctgctgctgaaagtggccggctttaacctgctgatgaccctgcggctgtggtccagc

SEQ ID NO: 5572 - DNA, 2298 bp, synthetic construct
  source 1..2298: mol_type = other DNA
atggccttaccagtgaccgccttgctcctgccgctggccttgctgctccacgccgccaggccggaagtgcagctggttgaatctggcggaggactggttcagcctggcggatctctgagactgtcttgtgccgccagcggcttcagcttcagcgacttttggatgagctgggtccgacaggcccctggcaaaggacttgaatgggtcgccacaatcagccaggccggcagcgagaaggactacgtggactctgtgaagggcagattcaccatcagccgggacaacgccaagaagtccctgtacctccagatgaacagcctgagagccgaggacaccgccgtgtactattgtgcctctggcgtgtacagcttcgactacagaggccagggcaccctggtcacagtctcttctggtaccggcggaggcggatctggcggcggaggtagcggtggcggaggatctgaattccagtctgtggtcacacagcctccatccgtgtctgctgcccctggacagaaagtgaccatctcctgtagcggcagcagcagcaacatcggcaacaactacgtgtcctggtatcagcagctccccggcacagctcccaaactgctgatctacgacaacaacaagcggcccagcggcatccccgatagattttctggcagcaagagcggcaccagcgccacactgggaattaccggacttcagacaggcgacgaggccgactactactgtggcacatgggatggcagcctgtacaccatgcttttcggcggaggcaccaagctgacagtgcttctcgagatccagaaccctgatcctgccgtgtaccagctgcgggatagcaagagcagcgacaagagcgtgtgtctgttcaccgacttcgacagccagaccaacgtgtcccagagcaaggactccgacgtgtacatcaccgataagtgcgtgctggacatgcggagcatggacttcaagagcaactccgccgtggcctggtccaacaagtccgatttcgcctgcgccaacgccttcaacaacagcattatccccgaggacacattcttcccaagccccgagagcagctgcgacgtgaagctggtggaaaagagcttcgagacagacaccaacctgaacttccagatcctgtacgagatcctgctgggcaaggccaccctgtacgccgtgctggtgtctgccctggtgctgatggctatggtcaagcggaaggacagccggggacgcgccaagagaagcggatctggcgtgaagcagaccctgaatttcgacctgctgaagctggctggcgacgtggaatccaacccaggccctactagtatggactggatttggcgcatccttttccttgtcggcgctgctaccggcgcgcattccttcgaagaagtgcaactggtggaatctggcggcggactggttaagcctggcggatctctgagactgtcttgtgccgccagcggcttcaccttcagcaatgcctggatgagctgggttcgacaggcccctggaaaaggactggaatgggtcggattcatccggtccaaagcctacggcggcaccacagaatatgccgcctctgtgaagggcagattcaccatcagccgggacgacagcaagtctatcgcctacctccagatgaacaacctgaaaaccgaggacaccgccgtgtactactgcgccagagatggcctgtacagcagctcttggtacgacagcgattactggggccagggcacactggtcacagtgtcatctacgcgtgaggacctgaagaacgtgttcccacctgaggtggccgtgttcgagcctagcgaggccgagatcagccacacccagaaagccaccctcgtgtgcctggctaccggcttctaccccgaccatgtggaactgtcttggtgggtcaacggcaaagaggtgcacagcggcgtgtgtaccgacccccagccactgaaagaacagcccgccctgaacgacagccggtactgcctgagcagcagactgagagtgtccgccaccttctggcagaacccccggaaccacttcagatgccaggtgcagttctacggcctgagcgagaacgacgagtggacccaggacagagccaagcccgtgacccagatcgtgtctgccgaagcctggggcagagccgattgcggctttaccagcgagagctaccagcagggcgtgctgagcgccaccaacctgagcgtgatcggcttcagaatcctgctgctgaaagtggccggctttaacctgctgatgaccctgcggctgtggtccagc

SEQ ID NO: 5573 - DNA, 2313 bp, synthetic construct
  source 1..2313: mol_type = other DNA
atggccttaccagtgaccgccttgctcctgccgctggccttgctgctccacgccgccaggccggaagtgcagctggttgaatctggcggaggactggttcagcctggcggatctctgagactgtcttgtgccgccagcggcttcagcttcagcgacttttggatgagctgggtccgacaggcccctggcaaaggacttgaatgggtcgccacaatcagccaggccggcagcgagaaggactacgtggactctgtgaagggcagattcaccatcagccgggacaacgccaagaagtccctgtacctccagatgaacagcctgagagccgaggacaccgccgtgtactattgtgcctctggcgtgtacagcttcgactacagaggccagggcaccctggtcacagtctcttctggtaccggcggaggcggatctggcggcggaggtagcggtggcggaggatctgaattccagtctgtgctgacacagcctcctagtgtgtctggcgctcctggacagagagtgaccatctcttgtaccggcagcagcagcaatatcggagccggctatgacgtgcactggtatcagcagctccctggcacagcccctaaactgctgatcttcggcaacagcaacagacccagcggcgtgcccgatagattcagcggctttaagagcggcacaagcgccagcctggctatcactggactgcaagccgaggacgaggccgactacttctgccagagctacgatagcagcctgagcggcagcggagtgtttggcacaggcaccaaagtgacagtgcttggcctcgagatccagaaccctgatcctgccgtgtaccagctgcgggatagcaagagcagcgacaagagcgtgtgtctgttcaccgacttcgacagccagaccaacgtgtcccagagcaaggactccgacgtgtacatcaccgataagtgcgtgctggacatgcggagcatggacttcaagagcaactccgccgtggcctggtccaacaagtccgatttcgcctgcgccaacgccttcaacaacagcattatccccgaggacacattcttcccaagccccgagagcagctgcgacgtgaagctggtggaaaagagcttcgagacagacaccaacctgaacttccagatcctgtacgagatcctgctgggcaaggccaccctgtacgccgtgctggtgtctgccctggtgctgatggctatggtcaagcggaaggacagccggggacgcgccaagagaagcggatctggcgtgaagcagaccctgaatttcgacctgctgaagctggctggcgacgtggaatccaacccaggccctactagtatggactggatttggcgcatccttttccttgtcggcgctgctaccggcgcgcattccttcgaacaaatgcaactggttcaaagcggcggtggcctggtgcaacctggaagaagtctgagactgagctgtgccgccagcggcttcaccttcgatgattacgccatgcactgggtccgacaggcccctggaaaaggactggaatgggtgtccggcatctcctggaatagcggctctatcggctacgccgacagcgtgaagggcagattcaccatcagccgggacaacgccaagaacagcctgtacctccagatgaactccctgagagccgaggatacagccctgtactactgcgccaaggacatccacagcggcagctactacggcctgctgtactacgctatggacgtgtggggccagggcacaaccgtgacagtttcttctacgcgtgaggacctgaagaacgtgttcccacctgaggtggccgtgttcgagcctagcgaggccgagatcagccacacccagaaagccaccctcgtgtgcctggctaccggcttctaccccgaccatgtggaactgtcttggtgggtcaacggcaaagaggtgcacagcggcgtgtgtaccgacccccagccactgaaagaacagcccgccctgaacgacagccggtactgcctgagcagcagactgagagtgtccgccaccttctggcagaacccccggaaccacttcagatgccaggtgcagttctacggcctgagcgagaacgacgagtggacccaggacagagccaagcccgtgacccagatcgtgtctgccgaagcctggggcagagccgattgcggctttaccagcgagagctaccagcagggcgtgctgagcgccaccaacctgagcgtgatcggcttcagaatcctgctgctgaaagtggccggctttaacctgctgatgaccctgcggctgtggtccagc

SEQ ID NO: 5574 - DNA, 2313 bp, synthetic construct
  source 1..2313: mol_type = other DNA
atggccttaccagtgaccgccttgctcctgccgctggccttgctgctccacgccgccaggccggaagtgcagctggttgaatctggcggaggactggttcagcctggcggatctctgagactgtcttgtgccgccagcggcttcagcttcagcgacttttggatgagctgggtccgacaggcccctggcaaaggacttgaatgggtcgccacaatcagccaggccggcagcgagaaggactacgtggactctgtgaagggcagattcaccatcagccgggacaacgccaagaagtccctgtacctccagatgaacagcctgagagccgaggacaccgccgtgtactattgtgcctctggcgtgtacagcttcgactacagaggccagggcaccctggtcacagtctcttctggtaccggcggaggcggatctggcggcggaggtagcggtggcggaggatctgaattcctgcctgttctgacacagcctccatctgcctctggcacacctggacagagagtgaccatcagctgtagcggcagaagcagcaacatcggcagcaacagcgtgaactggtacagacagcttcctggcgctgcccctaagctgctgatctacagcaacaaccagcggcctcctggcgtgccagtcagattttctggcagcaagagcggcacaagcgccagcctggctatttctggactccagtctgaggacgaggccacctactactgtgccacctgggacgacaacctgaacgtgcactacgtgttcggcaccggcaccaaagtgacagtgcttggaagtagactcgagatccagaaccctgatcctgccgtgtaccagctgcgggatagcaagagcagcgacaagagcgtgtgtctgttcaccgacttcgacagccagaccaacgtgtcccagagcaaggactccgacgtgtacatcaccgataagtgcgtgctggacatgcggagcatggacttcaagagcaactccgccgtggcctggtccaacaagtccgatttcgcctgcgccaacgccttcaacaacagcattatccccgaggacacattcttcccaagccccgagagcagctgcgacgtgaagctggtggaaaagagcttcgagacagacaccaacctgaacttccagatcctgtacgagatcctgctgggcaaggccaccctgtacgccgtgctggtgtctgccctggtgctgatggctatggtcaagcggaaggacagccggggacgcgccaagagaagcggatctggcgtgaagcagaccctgaatttcgacctgctgaagctggctggcgacgtggaatccaacccaggccctactagtatggactggatttggcgcatccttttccttgtcggcgctgctaccggcgcgcattccttcgaacttgaaatggctcaggtgcagctggtgcagagcggagccgaagtgaagaaacctggcagcagcgtgaaggtgtcctgcaaagcttctggcggcaccttcagcagctacgccatctcttgggttcgacaggcccctggacaaggactggaatggatgggcagaatcatccccatcctgggaatcgccaactacgcccagaaattccagggcagagtgacaatcaccgccgacaagagcaccagcaccgcctacatggaactgagcagcctgagaagcgaggacaccgccgtgtactattgtgcaagaggcggctactacagccacgacatgtggagcgaagattggggccagggcacactggtcacagtgtcatctacgcgtgaggacctgaagaacgtgttcccacctgaggtggccgtgttcgagcctagcgaggccgagatcagccacacccagaaagccaccctcgtgtgcctggctaccggcttctaccccgaccatgtggaactgtcttggtgggtcaacggcaaagaggtgcacagcggcgtgtgtaccgacccccagccactgaaagaacagcccgccctgaacgacagccggtactgcctgagcagcagactgagagtgtccgccaccttctggcagaacccccggaaccacttcagatgccaggtgcagttctacggcctgagcgagaacgacgagtggacccaggacagagccaagcccgtgacccagatcgtgtctgccgaagcctggggcagagccgattgcggctttaccagcgagagctaccagcagggcgtgctgagcgccaccaacctgagcgtgatcggcttcagaatcctgctgctgaaagtggccggctttaacctgctgatgaccctgcggctgtggtccagc

SEQ ID NO: 5575 - DNA, 2295 bp, synthetic construct
  source 1..2295: mol_type = other DNA
atggccttaccagtgaccgccttgctcctgccgctggccttgctgctccacgccgccaggccggaagtgcagctggttgaatctggcggaggactggttcagcctggcggatctctgagactgtcttgtgccgccagcggcttcagcttcagcgacttttggatgagctgggtccgacaggcccctggcaaaggacttgaatgggtcgccacaatcagccaggccggcagcgagaaggactacgtggactctgtgaagggcagattcaccatcagccgggacaacgccaagaagtccctgtacctccagatgaacagcctgagagccgaggacaccgccgtgtactattgtgcctctggcgtgtacagcttcgactacagaggccagggcaccctggtcacagtctcttctggtaccggcggaggcggatctggcggcggaggtagcggtggcggaggatctgaattcgacttcgtgatgacacagagccctgatagcctggccgtgtctctcggcgagcgagtgaccatgagctgcaagtctagccagagcctgctgaacagcggcaaccagaagaactacctgacctggtatcagcagaagcccggccagcctcctaagctgctgatctactgggccagcaccagagaaagcggcgtgcccgatagattttctggctctggcagcggcaccgacttcaccctgacaatttctagcctgcaagccgaggacgtggccgtgtactactgccagaacgactacagctacccctacaccttcggccagggcaccaagctggaaatcaaactcgagatccagaaccctgatcctgccgtgtaccagctgcgggatagcaagagcagcgacaagagcgtgtgtctgttcaccgacttcgacagccagaccaacgtgtcccagagcaaggactccgacgtgtacatcaccgataagtgcgtgctggacatgcggagcatggacttcaagagcaactccgccgtggcctggtccaacaagtccgatttcgcctgcgccaacgccttcaacaacagcattatccccgaggacacattcttcccaagccccgagagcagctgcgacgtgaagctggtggaaaagagcttcgagacagacaccaacctgaacttccagatcctgtacgagatcctgctgggcaaggccaccctgtacgccgtgctggtgtctgccctggtgctgatggctatggtcaagcggaaggacagccggggacgcgccaagagaagcggatctggcgtgaagcagaccctgaatttcgacctgctgaagctggctggcgacgtggaatccaacccaggccctactagtatggactggatttggcgcatccttttccttgtcggcgctgctaccggcgcgcattccttcgaagaagtgcaactggttcagagcggagccgagctgaagaaacctggggccagcgtgaaggtgtcctgtaaagccagcggctacacctttaccgactactacatgaaatgggtccgacaggccccaggccagggactcgaatggatcggcgatattatccccagcaacggggccaccttctacaaccagaaattcaagggccgcgtgaccatcaccgtggacaagagcacaagcaccgcctacatggaactgagcagcctgagaagcgaggacaccgccgtgtattattgcgccagaagccatctgctgcgggccagttggttcgcctattggggacagggaaccctggtcaccgttagctctacgcgtgaggacctgaagaacgtgttcccacctgaggtggccgtgttcgagcctagcgaggccgagatcagccacacccagaaagccaccctcgtgtgcctggctaccggcttctaccccgaccatgtggaactgtcttggtgggtcaacggcaaagaggtgcacagcggcgtgtgtaccgacccccagccactgaaagaacagcccgccctgaacgacagccggtactgcctgagcagcagactgagagtgtccgccaccttctggcagaacccccggaaccacttcagatgccaggtgcagttctacggcctgagcgagaacgacgagtggacccaggacagagccaagcccgtgacccagatcgtgtctgccgaagcctggggcagagccgattgcggctttaccagcgagagctaccagcagggcgtgctgagcgccaccaacctgagcgtgatcggcttcagaatcctgctgctgaaagtggccggctttaacctgctgatgaccctgcggctgtggtccagc

SEQ ID NO: 5576 - DNA, 2295 bp, synthetic construct
  source 1..2295: mol_type = other DNA
atggccttaccagtgaccgccttgctcctgccgctggccttgctgctccacgccgccaggccggaagtgcagctggttgaatctggcggaggactggttcagcctggcggatctctgagactgtcttgtgccgccagcggcttcagcttcagcgacttttggatgagctgggtccgacaggcccctggcaaaggacttgaatgggtcgccacaatcagccaggccggcagcgagaaggactacgtggactctgtgaagggcagattcaccatcagccgggacaacgccaagaagtccctgtacctccagatgaacagcctgagagccgaggacaccgccgtgtactattgtgcctctggcgtgtacagcttcgactacagaggccagggcaccctggtcacagtctcttctggtaccggcggaggcggatctggcggcggaggtagcggtggcggaggatctgaattcgacttcgtgatgacacagagccctgatagcctggccgtgtctctcggcgagcgagtgaccatgagctgcaagtctagccagagcctgctgaacagcggcaaccagaagaactacctgacctggtatcagcagaagcccggccagcctcctaagctgctgatctactgggccagcaccagagaaagcggcgtgcccgatagattttctggctctggcagcggcaccgacttcaccctgacaatttctagcctgcaagccgaggacgtggccgtgtactactgccagaacgactacagctacccctacaccttcggccagggcaccaagctggaaatcaaactcgagatccagaaccctgatcctgccgtgtaccagctgcgggatagcaagagcagcgacaagagcgtgtgtctgttcaccgacttcgacagccagaccaacgtgtcccagagcaaggactccgacgtgtacatcaccgataagtgcgtgctggacatgcggagcatggacttcaagagcaactccgccgtggcctggtccaacaagtccgatttcgcctgcgccaacgccttcaacaacagcattatccccgaggacacattcttcccaagccccgagagcagctgcgacgtgaagctggtggaaaagagcttcgagacagacaccaacctgaacttccagatcctgtacgagatcctgctgggcaaggccaccctgtacgccgtgctggtgtctgccctggtgctgatggctatggtcaagcggaaggacagccggggacgcgccaagagaagcggatctggcgtgaagcagaccctgaatttcgacctgctgaagctggctggcgacgtggaatccaacccaggccctactagtatggactggatttggcgcatccttttccttgtcggcgctgctaccggcgcgcattccttcgaacaagtgcaactggttcagagcggagccgagctgaagaaacctggggccagcgtgaaggtgtcctgtaaagccagcggctacacctttaccgactactacatgaaatgggtccgacaggccccaggccagggactcgaatggatcggcgatattatccccagcaacggggccaccttctacaaccagaaattcaagggccgcgtgaccatcaccgtggacaagagcacaagcaccgcctacatggaactgagcagcctgagaagcgaggacaccgccgtgtattattgcgccagaagccatctgctgcgggccagttggttcgcctattggggacagggaaccctggtcaccgttagctctacgcgtgaggacctgaagaacgtgttcccacctgaggtggccgtgttcgagcctagcgaggccgagatcagccacacccagaaagccaccctcgtgtgcctggctaccggcttctaccccgaccatgtggaactgtcttggtgggtcaacggcaaagaggtgcacagcggcgtgtgtaccgacccccagccactgaaagaacagcccgccctgaacgacagccggtactgcctgagcagcagactgagagtgtccgccaccttctggcagaacccccggaaccacttcagatgccaggtgcagttctacggcctgagcgagaacgacgagtggacccaggacagagccaagcccgtgacccagatcgtgtctgccgaagcctggggcagagccgattgcggctttaccagcgagagctaccagcagggcgtgctgagcgccaccaacctgagcgtgatcggcttcagaatcctgctgctgaaagtggccggctttaacctgctgatgaccctgcggctgtggtccagc

SEQ ID NO: 5577 - DNA, 2265 bp, synthetic construct
  source 1..2265: mol_type = other DNA
atggccttaccagtgaccgccttgctcctgccgctggccttgctgctccacgccgccaggccggaagtgcagctggttgaatctggcggaggactggttcagcctggcggatctctgagactgtcttgtgccgccagcggcttcagcttcagcgacttttggatgagctgggtccgacaggcccctggcaaaggacttgaatgggtcgccacaatcagccaggccggcagcgagaaggactacgtggactctgtgaagggcagattcaccatcagccgggacaacgccaagaagtccctgtacctccagatgaacagcctgagagccgaggacaccgccgtgtactattgtgcctctggcgtgtacagcttcgactacagaggccagggcaccctggtcacagtctcttctggtaccggcggaggcggatctggcggcggaggtagcggtggcggaggatctgaattcgacgtgcagatcacacagagccctagctacctggctgcctctcctggcgagacaatcaccatcaactgtcgggccagcaagagcatcagcaaggacctggcctggtatcaagagaagcccggcaagaccaacaagctgctgatctacagcggcagcacactccagtctggcatccccagcagattttccggctctggcagcggcaccgatttcaccctgaccataagcagcctggaacctgaggacttcgccatgtactactgccagcagcacaacaagtacccctacacctttggcggaggcaccaagctggaaatcaagagactcgagatccagaaccctgatcctgccgtgtaccagctgcgggatagcaagagcagcgacaagagcgtgtgtctgttcaccgacttcgacagccagaccaacgtgtcccagagcaaggactccgacgtgtacatcaccgataagtgcgtgctggacatgcggagcatggacttcaagagcaactccgccgtggcctggtccaacaagtccgatttcgcctgcgccaacgccttcaacaacagcattatccccgaggacacattcttcccaagccccgagagcagctgcgacgtgaagctggtggaaaagagcttcgagacagacaccaacctgaacttccagatcctgtacgagatcctgctgggcaaggccaccctgtacgccgtgctggtgtctgccctggtgctgatggctatggtcaagcggaaggacagccggggacgcgccaagagaagcggatctggcgtgaagcagaccctgaatttcgacctgctgaagctggctggcgacgtggaatccaacccaggccctactagtatggactggatttggcgcatccttttccttgtcggcgctgctaccggcgcgcattccttcgaacaagttcaactgcaacagcctggggccgagcttgttagacctggcgcttctgtgaagctgagctgcaaggccagcggctacaccttcaccagctactggatgaactgggtcaagcagcggcctgaccagggcctcgaatggatcggcagaatcgacccctacgacagcgagacacactacaaccagaagttcaaggacaaggccatcctgaccgtggacaagagcagctccaccgcctacatgcaactgagcagcctgacctctgaggatagcgccgtgtactattgcgccagaggcaactgggacgactattggggccagggcacaaccctgacagtgtctagtacgcgtgaggacctgaagaacgtgttcccacctgaggtggccgtgttcgagcctagcgaggccgagatcagccacacccagaaagccaccctcgtgtgcctggctaccggcttctaccccgaccatgtggaactgtcttggtgggtcaacggcaaagaggtgcacagcggcgtgtgtaccgacccccagccactgaaagaacagcccgccctgaacgacagccggtactgcctgagcagcagactgagagtgtccgccaccttctggcagaacccccggaaccacttcagatgccaggtgcagttctacggcctgagcgagaacgacgagtggacccaggacagagccaagcccgtgacccagatcgtgtctgccgaagcctggggcagagccgattgcggctttaccagcgagagctaccagcagggcgtgctgagcgccaccaacctgagcgtgatcggcttcagaatcctgctgctgaaagtggccggctttaacctgctgatgaccctgcggctgtggtccagc

SEQ ID NO: 5578 - DNA, 2271 bp, synthetic construct
  source 1..2271: mol_type = other DNA
atggccttaccagtgaccgccttgctcctgccgctggccttgctgctccacgccgccaggccggaagtgcagctggttgaatctggcggaggactggttcagcctggcggatctctgagactgtcttgtgccgccagcggcttcagcttcagcgacttttggatgagctgggtccgacaggcccctggcaaaggacttgaatgggtcgccacaatcagccaggccggcagcgagaaggactacgtggactctgtgaagggcagattcaccatcagccgggacaacgccaagaagtccctgtacctccagatgaacagcctgagagccgaggacaccgccgtgtactattgtgcctctggcgtgtacagcttcgactacagaggccagggcaccctggtcacagtctcttctggtaccggcggaggcggatctggcggcggaggtagcggtggcggaggatctgaattcgagatcgtgctgacacagagccctaccagcatgacagcctctccaggcgagcaagtgaccatcacctgtagagccagcagcagcatcaactacatgcactggtatcagcagaagcctggcgcaagccccagaccttggatctacgagacaagcaagctggcctccggcgtgcccgatagattttctggatctgccagcggcaccagctacagcctgaccatcaacaacatggaagccgaggacgccgccacctactactgccagcagtggaattacccctcctggacctttggcggaggcaccaagctggaacttaaactcgagatccagaaccctgatcctgccgtgtaccagctgcgggatagcaagagcagcgacaagagcgtgtgtctgttcaccgacttcgacagccagaccaacgtgtcccagagcaaggactccgacgtgtacatcaccgataagtgcgtgctggacatgcggagcatggacttcaagagcaactccgccgtggcctggtccaacaagtccgatttcgcctgcgccaacgccttcaacaacagcattatccccgaggacacattcttcccaagccccgagagcagctgcgacgtgaagctggtggaaaagagcttcgagacagacaccaacctgaacttccagatcctgtacgagatcctgctgggcaaggccaccctgtacgccgtgctggtgtctgccctggtgctgatggctatggtcaagcggaaggacagccggggacgcgccaagagaagcggatctggcgtgaagcagaccctgaatttcgacctgctgaagctggctggcgacgtggaatccaacccaggccctactagtatggactggatttggcgcatccttttccttgtcggcgctgctaccggcgcgcattccttcgaagaagtgcagctcgttgagtctggtggcggactggttcagcctggaagaagcctgaagctgagctgtgccgccagcggcttcaccttcagcgactacaatatggcctgggtccgacaggcccctaagaaaggactggaatgggtcgccaccatcctgtacgatggcggcagaacctactaccggggcagcgtgaagggcagattcaccatcagcagagacaacgccaagagcaccctgtacctgcggatggactctctgagaagcgaggataccgccacatattactgtgccacacacagccggggcaccgactactttgattattggggccagggcgtgatggttaccgtgtctagtacgcgtgaggacctgaagaacgtgttcccacctgaggtggccgtgttcgagcctagcgaggccgagatcagccacacccagaaagccaccctcgtgtgcctggctaccggcttctaccccgaccatgtggaactgtcttggtgggtcaacggcaaagaggtgcacagcggcgtgtgtaccgacccccagccactgaaagaacagcccgccctgaacgacagccggtactgcctgagcagcagactgagagtgtccgccaccttctggcagaacccccggaaccacttcagatgccaggtgcagttctacggcctgagcgagaacgacgagtggacccaggacagagccaagcccgtgacccagatcgtgtctgccgaagcctggggcagagccgattgcggctttaccagcgagagctaccagcagggcgtgctgagcgccaccaacctgagcgtgatcggcttcagaatcctgctgctgaaagtggccggctttaacctgctgatgaccctgcggctgtggtccagc

SEQ ID NO: 5579 - DNA, 2298 bp, synthetic construct
  source 1..2298: mol_type = other DNA
atggccttaccagtgaccgccttgctcctgccgctggccttgctgctccacgccgccaggccggaagtgcagctggttgaatctggcggaggactggttcagcctggcggatctctgagactgtcttgtgccgccagcggcttcagcttcagcgacttttggatgagctgggtccgacaggcccctggcaaaggacttgaatgggtcgccacaatcagccaggccggcagcgagaaggactacgtggactctgtgaagggcagattcaccatcagccgggacaacgccaagaagtccctgtacctccagatgaacagcctgagagccgaggacaccgccgtgtactattgtgcctctggcgtgtacagcttcgactacagaggccagggcaccctggtcacagtctcttctggtaccggcggaggcggatctggcggcggaggtagcggtggcggaggatctgaattcgacatcgtgatgacacagagcccttctagcctggccgtgtctgagggcgagacagtgaccatcaactgcaagagcagccagagcttcctgtctagcggcgacggcaagaattacgtggcctggtatcagtacaagcccggacagagccccaagctgctgatctactgggccagcacaagacagagcggcgtgcccgatagattcatcggctctggcagcggcaccgacttcaccctgacaatctctacagtgcaggccgaggacctggctatctactactgccagcagtattacgacacccctctgacctttggctccggcaccaagctggaaatcaaactcgagatccagaaccctgatcctgccgtgtaccagctgcgggatagcaagagcagcgacaagagcgtgtgtctgttcaccgacttcgacagccagaccaacgtgtcccagagcaaggactccgacgtgtacatcaccgataagtgcgtgctggacatgcggagcatggacttcaagagcaactccgccgtggcctggtccaacaagtccgatttcgcctgcgccaacgccttcaacaacagcattatccccgaggacacattcttcccaagccccgagagcagctgcgacgtgaagctggtggaaaagagcttcgagacagacaccaacctgaacttccagatcctgtacgagatcctgctgggcaaggccaccctgtacgccgtgctggtgtctgccctggtgctgatggctatggtcaagcggaaggacagccggggacgcgccaagagaagcggatctggcgtgaagcagaccctgaatttcgacctgctgaagctggctggcgacgtggaatccaacccaggccctactagtatggactggatttggcgcatccttttccttgtcggcgctgctaccggcgcgcattccttcgaagaagtgaagctgcaagagtctggccccagcctggtgcagagtagccaaacactgagcctgacctgtaccgtgtccggctttagcctgaccagctaccacatccactgggtccgacagacccctggcaaaggactggaatggatgggcgtgatgtggagcgacggcgacaccagctataacagcgccctgaagtcccggctgagcatcagcagagatacaagccagagccaggtgttcctgaagatgaacagcctccagaccgaggacaccgccacctactattgtgccagaggctactacagcagctacctgtacctttggttcgcctattggggccagggcaccctggttacagtcagctctacgcgtgaggacctgaagaacgtgttcccacctgaggtggccgtgttcgagcctagcgaggccgagatcagccacacccagaaagccaccctcgtgtgcctggctaccggcttctaccccgaccatgtggaactgtcttggtgggtcaacggcaaagaggtgcacagcggcgtgtgtaccgacccccagccactgaaagaacagcccgccctgaacgacagccggtactgcctgagcagcagactgagagtgtccgccaccttctggcagaacccccggaaccacttcagatgccaggtgcagttctacggcctgagcgagaacgacgagtggacccaggacagagccaagcccgtgacccagatcgtgtctgccgaagcctggggcagagccgattgcggctttaccagcgagagctaccagcagggcgtgctgagcgccaccaacctgagcgtgatcggcttcagaatcctgctgctgaaagtggccggctttaacctgctgatgaccctgcggctgtggtccagc

SEQ ID NO: 5580 - DNA, 2310 bp, synthetic construct
  source 1..2310: mol_type = other DNA
atggccttaccagtgaccgccttgctcctgccgctggccttgctgctccacgccgccaggccggaagtgcagctggttgaatctggcggaggactggttcagcctggcggatctctgagactgtcttgtgccgccagcggcttcagcttcagcgacttttggatgagctgggtccgacaggcccctggcaaaggacttgaatgggtcgccacaatcagccaggccggcagcgagaaggactacgtggactctgtgaagggcagattcaccatcagccgggacaacgccaagaagtccctgtacctccagatgaacagcctgagagccgaggacaccgccgtgtactattgtgcctctggcgtgtacagcttcgactacagaggccagggcaccctggtcacagtctcttctggtaccggcggaggcggatctggcggcggaggtagcggtggcggaggatctgaattcgacgtgctgatgacccagacacctgtgtctctgccagtgtctctcggaggccaggtgtccatctcctgtagaagcagccagagcctggtgcactccgacggcgatacctacctgcactggtatctccagaagcctggacagagccctcagctcctgatctaccgggtgtccaacagattcagcggcgtgcccgatagattttccggcagcggctctggcaccgacttcaccctgaagatcagcagagtggaacccgaggacctgggcctgtactactgtctccagaccacacacttcccaccttggacctttggcggaggcaccaagctggaaatgaaactcgagatccagaaccctgatcctgccgtgtaccagctgcgggatagcaagagcagcgacaagagcgtgtgtctgttcaccgacttcgacagccagaccaacgtgtcccagagcaaggactccgacgtgtacatcaccgataagtgcgtgctggacatgcggagcatggacttcaagagcaactccgccgtggcctggtccaacaagtccgatttcgcctgcgccaacgccttcaacaacagcattatccccgaggacacattcttcccaagccccgagagcagctgcgacgtgaagctggtggaaaagagcttcgagacagacaccaacctgaacttccagatcctgtacgagatcctgctgggcaaggccaccctgtacgccgtgctggtgtctgccctggtgctgatggctatggtcaagcggaaggacagccggggacgcgccaagagaagcggatctggcgtgaagcagaccctgaatttcgacctgctgaagctggctggcgacgtggaatccaacccaggccctactagtatggactggatttggcgcatccttttccttgtcggcgctgctaccggcgcgcattccttcgaacaggttcagctccagcagtctggacccgagcttagaaggccaggatctagcgtcagactgagctgcaaggccagcggctaccggatcaaggacttcctgatccactggattaagaacagacccgagcacggcctggaatggatcggatggattgaccctgaggacggcgagactaagtacgcccagaagttccagaccaaggccacactgaccgccgacacctctagcaacaccgcctacatgcaactgagcagcctgaccagcgaggacaccgccacctacttttgtgctagatggggcgacgtgtactacggcctgatgagaggccatgtgatggatgcctggggccagggaacaagcgtgacagtctcttctacgcgtgaggacctgaagaacgtgttcccacctgaggtggccgtgttcgagcctagcgaggccgagatcagccacacccagaaagccaccctcgtgtgcctggctaccggcttctaccccgaccatgtggaactgtcttggtgggtcaacggcaaagaggtgcacagcggcgtgtgtaccgacccccagccactgaaagaacagcccgccctgaacgacagccggtactgcctgagcagcagactgagagtgtccgccaccttctggcagaacccccggaaccacttcagatgccaggtgcagttctacggcctgagcgagaacgacgagtggacccaggacagagccaagcccgtgacccagatcgtgtctgccgaagcctggggcagagccgattgcggctttaccagcgagagctaccagcagggcgtgctgagcgccaccaacctgagcgtgatcggcttcagaatcctgctgctgaaagtggccggctttaacctgctgatgaccctgcggctgtggtccagc

SEQ ID NO: 5581 - DNA, 2295 bp, synthetic construct
  source 1..2295: mol_type = other DNA
atggccttaccagtgaccgccttgctcctgccgctggccttgctgctccacgccgccaggccggaagtgcagctggttgaatctggcggaggactggttcagcctggcggatctctgagactgtcttgtgccgccagcggcttcagcttcagcgacttttggatgagctgggtccgacaggcccctggcaaaggacttgaatgggtcgccacaatcagccaggccggcagcgagaaggactacgtggactctgtgaagggcagattcaccatcagccgggacaacgccaagaagtccctgtacctccagatgaacagcctgagagccgaggacaccgccgtgtactattgtgcctctggcgtgtacagcttcgactacagaggccagggcaccctggtcacagtctcttctggtaccggcggaggcggatctggcggcggaggtagcggtggcggaggatctgaattcgacatcgtgatgacacagagccccgccacactgtcactgtctccaggcgaaagagccacactgagctgtcggagcagcaagagcctccagaacgtgaacggcaacacctacctgtactggttccagcagaagcccggccagtctcctcagctcctgatctacagaatgagcaacctgaacagcggcgtgcccgacagattttctggcagcggaagcggcaccgagttcaccctgaccataagcagcctggaacctgaggacttcgccgtgtactactgtatgcagcacctggaataccccatcaccttcggagccggcaccaagctggaaatcaaactcgagatccagaaccctgatcctgccgtgtaccagctgcgggatagcaagagcagcgacaagagcgtgtgtctgttcaccgacttcgacagccagaccaacgtgtcccagagcaaggactccgacgtgtacatcaccgataagtgcgtgctggacatgcggagcatggacttcaagagcaactccgccgtggcctggtccaacaagtccgatttcgcctgcgccaacgccttcaacaacagcattatccccgaggacacattcttcccaagccccgagagcagctgcgacgtgaagctggtggaaaagagcttcgagacagacaccaacctgaacttccagatcctgtacgagatcctgctgggcaaggccaccctgtacgccgtgctggtgtctgccctggtgctgatggctatggtcaagcggaaggacagccggggacgcgccaagagaagcggatctggcgtgaagcagaccctgaatttcgacctgctgaagctggctggcgacgtggaatccaacccaggccctactagtatggactggatttggcgcatccttttccttgtcggcgctgctaccggcgcgcattccttcgaagaagtgcaactggttgaatctggcggcggactggttaagcctggcggatctctgaagctgagctgtgccgccagcggctacacctttaccagctacgtgatgcactgggtccgacaggcccctggcaaaggacttgagtggatcggctacatcaacccctacaacgatggcaccaagtacaacgagaagttccagggcagagtgaccatcagctccgacaagagcatcagcaccgcctacatggaactgagcagcctgagaagcgaggataccgccatgtactattgcgccagaggcacctactactacggcaccagagtgttcgactactggggccagggaaccctggtcacagtctcttctacgcgtgaggacctgaagaacgtgttcccacctgaggtggccgtgttcgagcctagcgaggccgagatcagccacacccagaaagccaccctcgtgtgcctggctaccggcttctaccccgaccatgtggaactgtcttggtgggtcaacggcaaagaggtgcacagcggcgtgtgtaccgacccccagccactgaaagaacagcccgccctgaacgacagccggtactgcctgagcagcagactgagagtgtccgccaccttctggcagaacccccggaaccacttcagatgccaggtgcagttctacggcctgagcgagaacgacgagtggacccaggacagagccaagcccgtgacccagatcgtgtctgccgaagcctggggcagagccgattgcggctttaccagcgagagctaccagcagggcgtgctgagcgccaccaacctgagcgtgatcggcttcagaatcctgctgctgaaagtggccggctttaacctgctgatgaccctgcggctgtggtccagc

SEQ ID NO: 5582 - DNA, 2283 bp, synthetic construct
  source 1..2283: mol_type = other DNA
atggccttaccagtgaccgccttgctcctgccgctggccttgctgctccacgccgccaggccggaagtgcagctggttgaatctggcggaggactggttcagcctggcggatctctgagactgtcttgtgccgccagcggcttcagcttcagcgacttttggatgagctgggtccgacaggcccctggcaaaggacttgaatgggtcgccacaatcagccaggccggcagcgagaaggactacgtggactctgtgaagggcagattcaccatcagccgggacaacgccaagaagtccctgtacctccagatgaacagcctgagagccgaggacaccgccgtgtactattgtgcctctggcgtgtacagcttcgactacagaggccagggcaccctggtcacagtctcttctggtaccggcggaggcggatctggcggcggaggtagcggtggcggaggatctgaattcgacatccagatgacacagagccctagcagcctgtctgccagcgtgggagacagagtgaccatcacatgcaaggccagcgaccacatcaacaactggctggcctggtatcagcagaagcctggacaggcccctaagctgctgatctacggcgctaccacactggaaacaggcgtgcccagcagattttctggcagcggctctggcaccgactacaccctgacaatatccagcctccagcctgaggacttcgccacctactactgtcagcagagctggaacaccccttggacattcggccagggcaccaagctggaaatcaagagactcgagatccagaaccctgatcctgccgtgtaccagctgcgggatagcaagagcagcgacaagagcgtgtgtctgttcaccgacttcgacagccagaccaacgtgtcccagagcaaggactccgacgtgtacatcaccgataagtgcgtgctggacatgcggagcatggacttcaagagcaactccgccgtggcctggtccaacaagtccgatttcgcctgcgccaacgccttcaacaacagcattatccccgaggacacattcttcccaagccccgagagcagctgcgacgtgaagctggtggaaaagagcttcgagacagacaccaacctgaacttccagatcctgtacgagatcctgctgggcaaggccaccctgtacgccgtgctggtgtctgccctggtgctgatggctatggtcaagcggaaggacagccggggacgcgccaagagaagcggatctggcgtgaagcagaccctgaatttcgacctgctgaagctggctggcgacgtggaatccaacccaggccctactagtatggactggatttggcgcatccttttccttgtcggcgctgctaccggcgcgcattccttcgaacaagttcagcttcaacagcctggcgctgagctggtcaaacctggcgcttctgtgaagatgagctgcaaagccagcggctacgccttcagcagctactggatcaactggatgaagcagaaacccggccagggactcgaatggatcggccaaatctatcccggcgacggcgacaccaactacaacggcaagttcaagggcagagccacactgaccgccgatacctctagcagcacagcctacatgcagctgagcagcctgaccagcgaagatagcgccgtgtacttctgtgcccggtccatcacaacagtcgtgggctgcgctatggactattggggccagggaacaagcgtgaccgtgtctagtacgcgtgaggacctgaagaacgtgttcccacctgaggtggccgtgttcgagcctagcgaggccgagatcagccacacccagaaagccaccctcgtgtgcctggctaccggcttctaccccgaccatgtggaactgtcttggtgggtcaacggcaaagaggtgcacagcggcgtgtgtaccgacccccagccactgaaagaacagcccgccctgaacgacagccggtactgcctgagcagcagactgagagtgtccgccaccttctggcagaacccccggaaccacttcagatgccaggtgcagttctacggcctgagcgagaacgacgagtggacccaggacagagccaagcccgtgacccagatcgtgtctgccgaagcctggggcagagccgattgcggctttaccagcgagagctaccagcagggcgtgctgagcgccaccaacctgagcgtgatcggcttcagaatcctgctgctgaaagtggccggctttaacctgctgatgaccctgcggctgtggtccagc

SEQ ID NO: 5583 - DNA, 2289 bp, synthetic construct
  source 1..2289: mol_type = other DNA
atggccttaccagtgaccgccttgctcctgccgctggccttgctgctccacgccgccaggccggaagtgcagctggttgaatctggcggaggactggttcagcctggcggatctctgagactgtcttgtgccgccagcggcttcagcttcagcgacttttggatgagctgggtccgacaggcccctggcaaaggacttgaatgggtcgccacaatcagccaggccggcagcgagaaggactacgtggactctgtgaagggcagattcaccatcagccgggacaacgccaagaagtccctgtacctccagatgaacagcctgagagccgaggacaccgccgtgtactattgtgcctctggcgtgtacagcttcgactacagaggccagggcaccctggtcacagtctcttctggtaccggcggaggcggatctggcggcggaggtagcggtggcggaggatctgaattccagatcgtgctgtctcagtctcctgccatcctgagcgcttccccaggcgagaaagtgaccatgacctgtagagccagcagcagcgtgtcctacatgcactggtatcagcagaagcccggcagcagccctaagccttggatctacgccaccagcaatctggcctctggcgtgccagccagattttctggctctggcagcggcaccagctacagcttcacaatcagcagagtggaagccgaggacgccgccacctactattgtcagcagtggaccttcaatcctcctaccttcggcggaggcacccggctggaaatcaaaagaacagtggctgctctcgagatccagaaccctgatcctgccgtgtaccagctgcgggatagcaagagcagcgacaagagcgtgtgtctgttcaccgacttcgacagccagaccaacgtgtcccagagcaaggactccgacgtgtacatcaccgataagtgcgtgctggacatgcggagcatggacttcaagagcaactccgccgtggcctggtccaacaagtccgatttcgcctgcgccaacgccttcaacaacagcattatccccgaggacacattcttcccaagccccgagagcagctgcgacgtgaagctggtggaaaagagcttcgagacagacaccaacctgaacttccagatcctgtacgagatcctgctgggcaaggccaccctgtacgccgtgctggtgtctgccctggtgctgatggctatggtcaagcggaaggacagccggggacgcgccaagagaagcggatctggcgtgaagcagaccctgaatttcgacctgctgaagctggctggcgacgtggaatccaacccaggccctactagtatggactggatttggcgcatccttttccttgtcggcgctgctaccggcgcgcattccttcgaacaggcttatctgcaacagagcggagccgaactcgtcagacctggcgcttctgtgaagatgagctgcaaggccagcggctacaccttcaccagctataatatgcactgggtcaagcagacccctcggcagggactcgaatggatcggcggaatctatcccggcaacggcgacacctcctacaaccagaagttcaagggcaaagccacactgaccgtgggcaagagcagcagcaccgcctatatgcagctcagcagcctgaccagcgaggacagcgccgtgtacttctgcgccagatacgactacaactacgctatggactactggggccagggcaccagcgtgacagttagctctgccagcacgcgtgaggacctgaagaacgtgttcccacctgaggtggccgtgttcgagcctagcgaggccgagatcagccacacccagaaagccaccctcgtgtgcctggctaccggcttctaccccgaccatgtggaactgtcttggtgggtcaacggcaaagaggtgcacagcggcgtgtgtaccgacccccagccactgaaagaacagcccgccctgaacgacagccggtactgcctgagcagcagactgagagtgtccgccaccttctggcagaacccccggaaccacttcagatgccaggtgcagttctacggcctgagcgagaacgacgagtggacccaggacagagccaagcccgtgacccagatcgtgtctgccgaagcctggggcagagccgattgcggctttaccagcgagagctaccagcagggcgtgctgagcgccaccaacctgagcgtgatcggcttcagaatcctgctgctgaaagtggccggctttaacctgctgatgaccctgcggctgtggtccagc

SEQ ID NO: 5584 - DNA, 2283 bp, synthetic construct
  source 1..2283: mol_type = other DNA
atggccttaccagtgaccgccttgctcctgccgctggccttgctgctccacgccgccaggccggaagtgcagctggttgaatctggcggaggactggttcagcctggcggatctctgagactgtcttgtgccgccagcggcttcagcttcagcgacttttggatgagctgggtccgacaggcccctggcaaaggacttgaatgggtcgccacaatcagccaggccggcagcgagaaggactacgtggactctgtgaagggcagattcaccatcagccgggacaacgccaagaagtccctgtacctccagatgaacagcctgagagccgaggacaccgccgtgtactattgtgcctctggcgtgtacagcttcgactacagaggccagggcaccctggtcacagtctcttctggtaccggcggaggcggatctggcggcggaggtagcggtggcggaggatctgaattcgagatcgtgctgacacagagccctgccaccctgtctctgagccctggcgaaagagccaccctgagctgtagagccagccagagcgtgtccagctacctggcctggtatcagcagaagcccggccaggctccccggctgctgatctacgatgccagcaatagagccaccggcatccccgccagattttccggctctggcagcggcaccgacttcaccctgaccatcagctccctggaacccgaggacttcgccgtgtactactgccagcagcggagcaactggcccatcacattcggccagggcacccggctggaaatcaaactcgagatccagaaccctgatcctgccgtgtaccagctgcgggatagcaagagcagcgacaagagcgtgtgtctgttcaccgacttcgacagccagaccaacgtgtcccagagcaaggactccgacgtgtacatcaccgataagtgcgtgctggacatgcggagcatggacttcaagagcaactccgccgtggcctggtccaacaagtccgatttcgcctgcgccaacgccttcaacaacagcattatccccgaggacacattcttcccaagccccgagagcagctgcgacgtgaagctggtggaaaagagcttcgagacagacaccaacctgaacttccagatcctgtacgagatcctgctgggcaaggccaccctgtacgccgtgctggtgtctgccctggtgctgatggctatggtcaagcggaaggacagccggggacgcgccaagagaagcggatctggcgtgaagcagaccctgaatttcgacctgctgaagctggctggcgacgtggaatccaacccaggccctactagtatggactggatttggcgcatccttttccttgtcggcgctgctaccggcgcgcattccttcgaagaggtgcagcttgttgagtctggcggaggactggtgcagcccgatagaagcctgagactgtcttgtgccgccagcggcttcaccttccacgattatgccatgcactgggtccgacaggcccctggcaaaggacttgaatgggtgtccaccatctcttggaacagcggcacaatcggctacgccgactctgtgaagggcagattcaccatcagccgggacaacgccaagaacagcctgtacctccagatgaactccctgagagccgaggacacagccctgtactactgcgccaaggacatccagtacggcaactactactacggcatggacgtgtggggccagggcacaacagtgacagtctcttctacgcgtgaggacctgaagaacgtgttcccacctgaggtggccgtgttcgagcctagcgaggccgagatcagccacacccagaaagccaccctcgtgtgcctggctaccggcttctaccccgaccatgtggaactgtcttggtgggtcaacggcaaagaggtgcacagcggcgtgtgtaccgacccccagccactgaaagaacagcccgccctgaacgacagccggtactgcctgagcagcagactgagagtgtccgccaccttctggcagaacccccggaaccacttcagatgccaggtgcagttctacggcctgagcgagaacgacgagtggacccaggacagagccaagcccgtgacccagatcgtgtctgccgaagcctggggcagagccgattgcggctttaccagcgagagctaccagcagggcgtgctgagcgccaccaacctgagcgtgatcggcttcagaatcctgctgctgaaagtggccggctttaacctgctgatgaccctgcggctgtggtccagc

SEQ ID NO: 5585 - DNA, 2268 bp, synthetic construct
  source 1..2268: mol_type = other DNA
atggccttaccagtgaccgccttgctcctgccgctggccttgctgctccacgccgccaggccggaagtgcagctggttgaatctggcggaggactggttcagcctggcggatctctgagactgtcttgtgccgccagcggcttcagcttcagcgacttttggatgagctgggtccgacaggcccctggcaaaggacttgaatgggtcgccacaatcagccaggccggcagcgagaaggactacgtggactctgtgaagggcagattcaccatcagccgggacaacgccaagaagtccctgtacctccagatgaacagcctgagagccgaggacaccgccgtgtactattgtgcctctggcgtgtacagcttcgactacagaggccagggcaccctggtcacagtctcttctggtaccggcggaggcggatctggcggcggaggtagcggtggcggaggatctgaattcgacatccagatgacacagagccctagcagcctgtctgccagcgtgggagatagagtgaccatcaactgcaaggccagccaggacatcaacagctacctgagctggttccagcagaagcctggcaaggcccctaagacactgatctaccgggccaacagactggtggatggcgtgccaagcagattttctggcagcggcagcggccaggattacaccctgacaatatccagcctccagcctgaggacttcgccacctactactgcctccagtacgacgagttccctctgacctttggcggaggcaccaaggtggaaatcaaactcgagatccagaaccctgatcctgccgtgtaccagctgcgggatagcaagagcagcgacaagagcgtgtgtctgttcaccgacttcgacagccagaccaacgtgtcccagagcaaggactccgacgtgtacatcaccgataagtgcgtgctggacatgcggagcatggacttcaagagcaactccgccgtggcctggtccaacaagtccgatttcgcctgcgccaacgccttcaacaacagcattatccccgaggacacattcttcccaagccccgagagcagctgcgacgtgaagctggtggaaaagagcttcgagacagacaccaacctgaacttccagatcctgtacgagatcctgctgggcaaggccaccctgtacgccgtgctggtgtctgccctggtgctgatggctatggtcaagcggaaggacagccggggacgcgccaagagaagcggatctggcgtgaagcagaccctgaatttcgacctgctgaagctggctggcgacgtggaatccaacccaggccctactagtatggactggatttggcgcatccttttccttgtcggcgctgctaccggcgcgcattccttcgaacaggtgcaactggtgcagtctggggccgaagtgaagaaacctggggcctctgtgaaggtgtcctgcaaagccagcggctacacctttaccaactacgacatcaactgggtccgacaggctccaggccaaggactggaatggatcggctggatctatcctggcgacggcagcaccaagtacaacgagaagttcaaggccaaggccacactgaccgccgataccagcacaagcaccgcctacatggaactgcggagcctgagaagcgacgacaccgccgtgtactattgtgcctccggctacgaggacgctatggactattggggccagggcaccaccgtgacagtgtctagtacgcgtgaggacctgaagaacgtgttcccacctgaggtggccgtgttcgagcctagcgaggccgagatcagccacacccagaaagccaccctcgtgtgcctggctaccggcttctaccccgaccatgtggaactgtcttggtgggtcaacggcaaagaggtgcacagcggcgtgtgtaccgacccccagccactgaaagaacagcccgccctgaacgacagccggtactgcctgagcagcagactgagagtgtccgccaccttctggcagaacccccggaaccacttcagatgccaggtgcagttctacggcctgagcgagaacgacgagtggacccaggacagagccaagcccgtgacccagatcgtgtctgccgaagcctggggcagagccgattgcggctttaccagcgagagctaccagcagggcgtgctgagcgccaccaacctgagcgtgatcggcttcagaatcctgctgctgaaagtggccggctttaacctgctgatgaccctgcggctgtggtccagc

SEQ ID NO: 5586 - DNA, 2274 bp, synthetic construct
  source 1..2274: mol_type = other DNA
atggccttaccagtgaccgccttgctcctgccgctggccttgctgctccacgccgccaggccggaagtgcagctggttgaatctggcggaggactggttcagcctggcggatctctgagactgtcttgtgccgccagcggcttcagcttcagcgacttttggatgagctgggtccgacaggcccctggcaaaggacttgaatgggtcgccacaatcagccaggccggcagcgagaaggactacgtggactctgtgaagggcagattcaccatcagccgggacaacgccaagaagtccctgtacctccagatgaacagcctgagagccgaggacaccgccgtgtactattgtgcctctggcgtgtacagcttcgactacagaggccagggcaccctggtcacagtctcttctggtaccggcggaggcggatctggcggcggaggtagcggtggcggaggatctgaattcgacatcgtgatgacccagacacctctgagcctgagcgtgacacctggacagcctgccagcattagctgcaagagcagccagtctctgctggacggcgacggcaagacctacctgaattggctgctccagaagcctggacagagccctcagcggctgatctacctggtgtccaagctggatagcggcgtgcccgatagattttctggcagcggctctggcaccgacttcaccctgaagatcagcagagtggaagccgaggacgtgggcgtgtactactgttggcagggcacacacttccccagaacattcggccagggcacaaagctggaaatcaaactcgagatccagaaccctgatcctgccgtgtaccagctgcgggatagcaagagcagcgacaagagcgtgtgtctgttcaccgacttcgacagccagaccaacgtgtcccagagcaaggactccgacgtgtacatcaccgataagtgcgtgctggacatgcggagcatggacttcaagagcaactccgccgtggcctggtccaacaagtccgatttcgcctgcgccaacgccttcaacaacagcattatccccgaggacacattcttcccaagccccgagagcagctgcgacgtgaagctggtggaaaagagcttcgagacagacaccaacctgaacttccagatcctgtacgagatcctgctgggcaaggccaccctgtacgccgtgctggtgtctgccctggtgctgatggctatggtcaagcggaaggacagccggggacgcgccaagagaagcggatctggcgtgaagcagaccctgaatttcgacctgctgaagctggctggcgacgtggaatccaacccaggccctactagtatggactggatttggcgcatccttttccttgtcggcgctgctaccggcgcgcattccttcgaacaagtgcaactggttcagagcggagccgaagtgaagaaacctggggcctctgtgaaggtgtcctgcaaggccagcggctacaccttcaaggacacctacatccactgggtccgacaggcccctggacaaggacttgagtggatgggcagaatcgaccccgccaacggcaacaccaaatacgaccccaagttccagggcagagtgaccatgaccagagacaccagcatcagcaccgcctacatggaactgagccggctgagatccgatgacaccgccgtgtactattgcgctagaagaggcggagtggattggggccagggaacactggttaccgtgtctagtacgcgtgaggacctgaagaacgtgttcccacctgaggtggccgtgttcgagcctagcgaggccgagatcagccacacccagaaagccaccctcgtgtgcctggctaccggcttctaccccgaccatgtggaactgtcttggtgggtcaacggcaaagaggtgcacagcggcgtgtgtaccgacccccagccactgaaagaacagcccgccctgaacgacagccggtactgcctgagcagcagactgagagtgtccgccaccttctggcagaacccccggaaccacttcagatgccaggtgcagttctacggcctgagcgagaacgacgagtggacccaggacagagccaagcccgtgacccagatcgtgtctgccgaagcctggggcagagccgattgcggctttaccagcgagagctaccagcagggcgtgctgagcgccaccaacctgagcgtgatcggcttcagaatcctgctgctgaaagtggccggctttaacctgctgatgaccctgcggctgtggtccagc

SEQ ID NO: 5587 - DNA, 2277 bp, synthetic construct
  source 1..2277: mol_type = other DNA
atggccttaccagtgaccgccttgctcctgccgctggccttgctgctccacgccgccaggccggaagtgcagctggttgaatctggcggaggactggttcagcctggcggatctctgagactgtcttgtgccgccagcggcttcagcttcagcgacttttggatgagctgggtccgacaggcccctggcaaaggacttgaatgggtcgccacaatcagccaggccggcagcgagaaggactacgtggactctgtgaagggcagattcaccatcagccgggacaacgccaagaagtccctgtacctccagatgaacagcctgagagccgaggacaccgccgtgtactattgtgcctctggcgtgtacagcttcgactacagaggccagggcaccctggtcacagtctcttctggtaccggcggaggcggatctggcggcggaggtagcggtggcggaggatctgaattcgacatccagatgacacagagccctagcagcctgtctgccagcgtgggagacagagtgaccatcacatgcaaggccagccaggatgtgtctacagccgtggcctggttccagcagaagcctggaaaagcccctaagctgctgatctacagccccagctacagatacaccggcgtgcccagcagattttctggcagcggctctggcaccgacttcaccctgacaatatccagcctccagcctgaggacttcacctactactgccagcagctctacagcaccccttacacattcggccagggcaccaaggtggaaatcaaactcgagatccagaaccctgatcctgccgtgtaccagctgcgggatagcaagagcagcgacaagagcgtgtgtctgttcaccgacttcgacagccagaccaacgtgtcccagagcaaggactccgacgtgtacatcaccgataagtgcgtgctggacatgcggagcatggacttcaagagcaactccgccgtggcctggtccaacaagtccgatttcgcctgcgccaacgccttcaacaacagcattatccccgaggacacattcttcccaagccccgagagcagctgcgacgtgaagctggtggaaaagagcttcgagacagacaccaacctgaacttccagatcctgtacgagatcctgctgggcaaggccaccctgtacgccgtgctggtgtctgccctggtgctgatggctatggtcaagcggaaggacagccggggacgcgccaagagaagcggatctggcgtgaagcagaccctgaatttcgacctgctgaagctggctggcgacgtggaatccaacccaggccctactagtatggactggatttggcgcatccttttccttgtcggcgctgctaccggcgcgcattccttcgaagaagtgcaactggttcagagcggagccgaagtgaagaaacctggggcctctgtgaaggtgtcctgcaaagccagcggctacacctttaccgactactacctggacgtggtcgtgcggcaagctcctggacaaggactggaatggatcggcagagtgaacccctacaacggcggcaccatctacaaccagaaattcaagggaagagtgaccctgaccagagacaccagcacctccacagcctacctggaactgagcagcctgagaagcgaagataccgccgtgtactactgcgccagggaccactacagatatgaccctctgctggactactggggccagggaaccctggttacagtgtctagtacgcgtgaggacctgaagaacgtgttcccacctgaggtggccgtgttcgagcctagcgaggccgagatcagccacacccagaaagccaccctcgtgtgcctggctaccggcttctaccccgaccatgtggaactgtcttggtgggtcaacggcaaagaggtgcacagcggcgtgtgtaccgacccccagccactgaaagaacagcccgccctgaacgacagccggtactgcctgagcagcagactgagagtgtccgccaccttctggcagaacccccggaaccacttcagatgccaggtgcagttctacggcctgagcgagaacgacgagtggacccaggacagagccaagcccgtgacccagatcgtgtctgccgaagcctggggcagagccgattgcggctttaccagcgagagctaccagcagggcgtgctgagcgccaccaacctgagcgtgatcggcttcagaatcctgctgctgaaagtggccggctttaacctgctgatgaccctgcggctgtggtccagc

SEQ ID NO: 5588 - DNA, 2295 bp, synthetic construct
  source 1..2295: mol_type = other DNA
atggccttaccagtgaccgccttgctcctgccgctggccttgctgctccacgccgccaggccggaagtgcagctggttgaatctggcggaggactggttcagcctggcggatctctgagactgtcttgtgccgccagcggcttcagcttcagcgacttttggatgagctgggtccgacaggcccctggcaaaggacttgaatgggtcgccacaatcagccaggccggcagcgagaaggactacgtggactctgtgaagggcagattcaccatcagccgggacaacgccaagaagtccctgtacctccagatgaacagcctgagagccgaggacaccgccgtgtactattgtgcctctggcgtgtacagcttcgactacagaggccagggcaccctggtcacagtctcttctggtaccggcggaggcggatctggcggcggaggtagcggtggcggaggatctgaattcgacatccagatgacacagagccctagcagcctgtctgccagcgtgggagacagagtgaccatcacctgtagagccagccagagcgtgtccaccagcagctacaactacatgcactggtatcagcagaagcccggcaagcctcctaagctgctgattaagtacgccagcaacctggaaagcggcgtgcccagcagattttctggcagcggctctggcaccgacttcaccctgacaatatccagcctccagcctgaggacttcgccacctactactgtcagcactcctgggagatccctctgacattcggccagggcaccaaggtggaaatcaaactcgagatccagaaccctgatcctgccgtgtaccagctgcgggatagcaagagcagcgacaagagcgtgtgtctgttcaccgacttcgacagccagaccaacgtgtcccagagcaaggactccgacgtgtacatcaccgataagtgcgtgctggacatgcggagcatggacttcaagagcaactccgccgtggcctggtccaacaagtccgatttcgcctgcgccaacgccttcaacaacagcattatccccgaggacacattcttcccaagccccgagagcagctgcgacgtgaagctggtggaaaagagcttcgagacagacaccaacctgaacttccagatcctgtacgagatcctgctgggcaaggccaccctgtacgccgtgctggtgtctgccctggtgctgatggctatggtcaagcggaaggacagccggggacgcgccaagagaagcggatctggcgtgaagcagaccctgaatttcgacctgctgaagctggctggcgacgtggaatccaacccaggccctactagtatggactggatttggcgcatccttttccttgtcggcgctgctaccggcgcgcattccttcgaagaagtgcaactggttcagagcggagccgaagtgaagaaacctggggcctctgtgaaggtgtcctgcaaggccagcggctacagcttcaccgactattatatgcactgggtccgacaggctccaggccagggacttgagtggatcggcagaatcaacccctacaacggcgctgccttctacagccagaacttcaaggatagagtgaccctgaccgtggacaccagcaccagcacagcctacctggaactgagcagcctgagaagcgaggacaccgccgtgtactactgcgccattgagagaggcgctgacctggaaggctacgctatggattattggggccagggaaccctggtcaccgtgtcatctacgcgtgaggacctgaagaacgtgttcccacctgaggtggccgtgttcgagcctagcgaggccgagatcagccacacccagaaagccaccctcgtgtgcctggctaccggcttctaccccgaccatgtggaactgtcttggtgggtcaacggcaaagaggtgcacagcggcgtgtgtaccgacccccagccactgaaagaacagcccgccctgaacgacagccggtactgcctgagcagcagactgagagtgtccgccaccttctggcagaacccccggaaccacttcagatgccaggtgcagttctacggcctgagcgagaacgacgagtggacccaggacagagccaagcccgtgacccagatcgtgtctgccgaagcctggggcagagccgattgcggctttaccagcgagagctaccagcagggcgtgctgagcgccaccaacctgagcgtgatcggcttcagaatcctgctgctgaaagtggccggctttaacctgctgatgaccctgcggctgtggtccagc

SEQ ID NO: 5589 - DNA, 2289 bp, synthetic construct
  source 1..2289: mol_type = other DNA
atggccttaccagtgaccgccttgctcctgccgctggccttgctgctccacgccgccaggccggaagtgcagctggttgaatctggcggaggactggttcagcctggcggatctctgagactgtcttgtgccgccagcggcttcagcttcagcgacttttggatgagctgggtccgacaggcccctggcaaaggacttgaatgggtcgccacaatcagccaggccggcagcgagaaggactacgtggactctgtgaagggcagattcaccatcagccgggacaacgccaagaagtccctgtacctccagatgaacagcctgagagccgaggacaccgccgtgtactattgtgcctctggcgtgtacagcttcgactacagaggccagggcaccctggtcacagtctcttctggtaccggcggaggcggatctggcggcggaggtagcggtggcggaggatctgaattcgagatcgtgctgacacagtctccagccacactgagcgcttctccaggcgagagagtgaccctgacctgtagagccagcagcaacgtgatctccagctacgtgcactggtatcagcagaagcctggcagcagccccagactgtttctgtacagcaccagcaatctggcctccggcgtgccaagcagattttctggctctggcagcggcaccgacttcacctttaccatctctagcctggaagccgaggacgccgccacctactactgtcagcagtacagcggctaccctctgaccttcggccagggcacaagactggaaatcaaactcgagatccagaaccctgatcctgccgtgtaccagctgcgggatagcaagagcagcgacaagagcgtgtgtctgttcaccgacttcgacagccagaccaacgtgtcccagagcaaggactccgacgtgtacatcaccgataagtgcgtgctggacatgcggagcatggacttcaagagcaactccgccgtggcctggtccaacaagtccgatttcgcctgcgccaacgccttcaacaacagcattatccccgaggacacattcttcccaagccccgagagcagctgcgacgtgaagctggtggaaaagagcttcgagacagacaccaacctgaacttccagatcctgtacgagatcctgctgggcaaggccaccctgtacgccgtgctggtgtctgccctggtgctgatggctatggtcaagcggaaggacagccggggacgcgccaagagaagcggatctggcgtgaagcagaccctgaatttcgacctgctgaagctggctggcgacgtggaatccaacccaggccctactagtatggactggatttggcgcatccttttccttgtcggcgctgctaccggcgcgcattccttcgaacaagttcagctgcaagagtctggccctggcctggtcaagcctagcgaaacactgagcctgacctgcgccgtgtctggctactctatcaccagcgcctactattggaactggatcagacagcctcctggcaaaggactggaatggatcggctacatcagctacgacggcagaaacaactacaaccccagcctgaagaaccggatcaccatcaatcccgacaccagcaagaaccagttcagcctccagctgaacagcgtgacccctgaggataccgccgtgtactactgtgccagagaaggcgactacgacgtgggcaactactacgctatggactactggggccagggaaccctggtcacagtctcttctacgcgtgaggacctgaagaacgtgttcccacctgaggtggccgtgttcgagcctagcgaggccgagatcagccacacccagaaagccaccctcgtgtgcctggctaccggcttctaccccgaccatgtggaactgtcttggtgggtcaacggcaaagaggtgcacagcggcgtgtgtaccgacccccagccactgaaagaacagcccgccctgaacgacagccggtactgcctgagcagcagactgagagtgtccgccaccttctggcagaacccccggaaccacttcagatgccaggtgcagttctacggcctgagcgagaacgacgagtggacccaggacagagccaagcccgtgacccagatcgtgtctgccgaagcctggggcagagccgattgcggctttaccagcgagagctaccagcagggcgtgctgagcgccaccaacctgagcgtgatcggcttcagaatcctgctgctgaaagtggccggctttaacctgctgatgaccctgcggctgtggtccagc

SEQ ID NO: 5590 - DNA, 2289 bp, synthetic construct
  source 1..2289: mol_type = other DNA
atggccttaccagtgaccgccttgctcctgccgctggccttgctgctccacgccgccaggccggaagtgcagctggttgaatctggcggaggactggttcagcctggcggatctctgagactgtcttgtgccgccagcggcttcagcttcagcgacttttggatgagctgggtccgacaggcccctggcaaaggacttgaatgggtcgccacaatcagccaggccggcagcgagaaggactacgtggactctgtgaagggcagattcaccatcagccgggacaacgccaagaagtccctgtacctccagatgaacagcctgagagccgaggacaccgccgtgtactattgtgcctctggcgtgtacagcttcgactacagaggccagggcaccctggtcacagtctcttctggtaccggcggaggcggatctggcggcggaggtagcggtggcggaggatctgaattcgagatcgtgctgacacagtctcccgccacactgtcactgtctccaggcgaaagagccacactgagctgtagagccagcagcaacgtgatctccagctacgtgcactggtatcagcagaagcctggacaggcccctcggctgctgatctacagcacaagcaatctggcctctggcatccccgccagattttctggctctggaagcggcaccgacttcaccctgaccataagcagcctggaacctgaggacttcgccgtgtactactgccagcagtatagcggctaccctctgaccttcggccagggcacaagactggaaatcaaactcgagatccagaaccctgatcctgccgtgtaccagctgcgggatagcaagagcagcgacaagagcgtgtgtctgttcaccgacttcgacagccagaccaacgtgtcccagagcaaggactccgacgtgtacatcaccgataagtgcgtgctggacatgcggagcatggacttcaagagcaactccgccgtggcctggtccaacaagtccgatttcgcctgcgccaacgccttcaacaacagcattatccccgaggacacattcttcccaagccccgagagcagctgcgacgtgaagctggtggaaaagagcttcgagacagacaccaacctgaacttccagatcctgtacgagatcctgctgggcaaggccaccctgtacgccgtgctggtgtctgccctggtgctgatggctatggtcaagcggaaggacagccggggacgcgccaagagaagcggatctggcgtgaagcagaccctgaatttcgacctgctgaagctggctggcgacgtggaatccaacccaggccctactagtatggactggatttggcgcatccttttccttgtcggcgctgctaccggcgcgcattccttcgaagaagtgcaactggtggaaagtggcggcggactggtgcaacctggaagaagcctgagactgtcctgtgccgccagcggctactctatcacaagcgcctactactggaactgggtccgacaggctcctggcaaaggactggaatgggtgtcctacatcagctacgacggcagaaacaactacaaccccagcctgaagaaccgcttcaccatcagccgggacaacgccaagaagtccctgtacctccagatgaacagcctgagagccgaggacacagccctgtactattgcgccaaagagggcgactacgacgtcggcaactactacgctatggactactggggccagggaaccaccgtgactgtctcttctacgcgtgaggacctgaagaacgtgttcccacctgaggtggccgtgttcgagcctagcgaggccgagatcagccacacccagaaagccaccctcgtgtgcctggctaccggcttctaccccgaccatgtggaactgtcttggtgggtcaacggcaaagaggtgcacagcggcgtgtgtaccgacccccagccactgaaagaacagcccgccctgaacgacagccggtactgcctgagcagcagactgagagtgtccgccaccttctggcagaacccccggaaccacttcagatgccaggtgcagttctacggcctgagcgagaacgacgagtggacccaggacagagccaagcccgtgacccagatcgtgtctgccgaagcctggggcagagccgattgcggctttaccagcgagagctaccagcagggcgtgctgagcgccaccaacctgagcgtgatcggcttcagaatcctgctgctgaaagtggccggctttaacctgctgatgaccctgcggctgtggtccagc

SEQ ID NO: 5591 - DNA, 2286 bp, synthetic construct
  source 1..2286: mol_type = other DNA
atggccttaccagtgaccgccttgctcctgccgctggccttgctgctccacgccgccaggccggaagtgcagctggttgaatctggcggaggactggttcagcctggcggatctctgagactgtcttgtgccgccagcggcttcagcttcagcgacttttggatgagctgggtccgacaggcccctggcaaaggacttgaatgggtcgccacaatcagccaggccggcagcgagaaggactacgtggactctgtgaagggcagattcaccatcagccgggacaacgccaagaagtccctgtacctccagatgaacagcctgagagccgaggacaccgccgtgtactattgtgcctctggcgtgtacagcttcgactacagaggccagggcaccctggtcacagtctcttctggtaccggcggaggcggatctggcggcggaggtagcggtggcggaggatctgaattcgacgtggtcatgacacagaccccactgagcctgcctgtgtctctgggagatcaggccagcatctcctgtagaagcagccagagcctggtgcacagcaacggcaacacctacctgcggtggtatctccagaagcctggacagagccccaaggtgctgatctacaaggtgtccaacagagtgtccggcgtgcccgatagattttctggcagcggctctggcaccgacttcaccctgaagatcaatagagtggaagccgaggacctgggcgtgtacttctgtagccagagcacccatgtgccttggacctttggcggaggcaccaagctggaaatcaagctcgagatccagaaccctgatcctgccgtgtaccagctgcgggatagcaagagcagcgacaagagcgtgtgtctgttcaccgacttcgacagccagaccaacgtgtcccagagcaaggactccgacgtgtacatcaccgataagtgcgtgctggacatgcggagcatggacttcaagagcaactccgccgtggcctggtccaacaagtccgatttcgcctgcgccaacgccttcaacaacagcattatccccgaggacacattcttcccaagccccgagagcagctgcgacgtgaagctggtggaaaagagcttcgagacagacaccaacctgaacttccagatcctgtacgagatcctgctgggcaaggccaccctgtacgccgtgctggtgtctgccctggtgctgatggctatggtcaagcggaaggacagccggggacgcgccaagagaagcggatctggcgtgaagcagaccctgaatttcgacctgctgaagctggctggcgacgtggaatccaacccaggccctactagtatggactggatttggcgcatccttttccttgtcggcgctgctaccggcgcgcattccttcgaaggcgtgaagctggacgagacaggcggaggacttgttcaacctggcggagccatgaagctgagctgtgtgaccagcggctttaccttcggccactactggatgaactgggtccgacagtcccctgagaaaggactggaatgggtcgcccagttcagaaacaagccctacaactacgaaacctactacagcgacagcgtgaagggcagattcaccatcagccgggacgacagcaagtccagcgtgtacctccagatgaacaacctgcgcgtggaagataccggcatctactactgtaccggggccagctacggcatggaatatctcggccagggcaccagcgtgaccgtgtctacaacgcgtgaggacctgaagaacgtgttcccacctgaggtggccgtgttcgagcctagcgaggccgagatcagccacacccagaaagccaccctcgtgtgcctggctaccggcttctaccccgaccatgtggaactgtcttggtgggtcaacggcaaagaggtgcacagcggcgtgtgtaccgacccccagccactgaaagaacagcccgccctgaacgacagccggtactgcctgagcagcagactgagagtgtccgccaccttctggcagaacccccggaaccacttcagatgccaggtgcagttctacggcctgagcgagaacgacgagtggacccaggacagagccaagcccgtgacccagatcgtgtctgccgaagcctggggcagagccgattgcggctttaccagcgagagctaccagcagggcgtgctgagcgccaccaacctgagcgtgatcggcttcagaatcctgctgctgaaagtggccggctttaacctgctgatgaccctgcggctgtggtccagc

SEQ ID NO: 5592 - DNA, 2304 bp, synthetic construct
  source 1..2304: mol_type = other DNA
atggccttaccagtgaccgccttgctcctgccgctggccttgctgctccacgccgccaggccggaagtgcagctggttgaatctggcggaggactggttcagcctggcggatctctgagactgtcttgtgccgccagcggcttcagcttcagcgacttttggatgagctgggtccgacaggcccctggcaaaggacttgaatgggtcgccacaatcagccaggccggcagcgagaaggactacgtggactctgtgaagggcagattcaccatcagccgggacaacgccaagaagtccctgtacctccagatgaacagcctgagagccgaggacaccgccgtgtactattgtgcctctggcgtgtacagcttcgactacagaggccagggcaccctggtcacagtctcttctggtaccggcggaggcggatctggcggcggaggtagcggtggcggaggatctgaattccaggtgcaactggtggaatctggcggcaatctggttcagcctggcggctctctgagactgtcttgtgccgccagcggcttcaccttcggcagcttttctatgagctgggtccgacaagctcctggcggaggacttgaatgggtggcaggactgtctgccagaagcagcctgacacactacgccgactctgtgaagggcagattcaccatcagccgggacaacgccaagaacagcgtgtacctccagatgaacagcctgagagtggaagataccgccgtgtactactgcgccagaagaagctacgacagcagcggctactggggccacttctacagctacatggatgtgtggggccagggcaccctggttacagtttctctcgagatccagaaccctgatcctgccgtgtaccagctgcgggatagcaagagcagcgacaagagcgtgtgtctgttcaccgacttcgacagccagaccaacgtgtcccagagcaaggactccgacgtgtacatcaccgataagtgcgtgctggacatgcggagcatggacttcaagagcaactccgccgtggcctggtccaacaagtccgatttcgcctgcgccaacgccttcaacaacagcattatccccgaggacacattcttcccaagccccgagagcagctgcgacgtgaagctggtggaaaagagcttcgagacagacaccaacctgaacttccagatcctgtacgagatcctgctgggcaaggccaccctgtacgccgtgctggtgtctgccctggtgctgatggctatggtcaagcggaaggacagccggggacgcgccaagagaagcggatctggcgtgaagcagaccctgaatttcgacctgctgaagctggctggcgacgtggaatccaacccaggccctactagtatggactggatttggcgcatccttttccttgtcggcgctgctaccggcgcgcattccttcgaatctgtgctgacccagcctagctccgtgtctgctgctcctggacagaaagtgaccatctcctgtagcggcagcaccagcaacatcggcaacaactacgtgtcctggtatcagcagcaccccggcaaggcccctaagctgatgatctacgacgtgtccaagaggcccagcggcgtgccagatagattttccggcagcaagagcggcaacagcgccagcctggatattagcggactccagtctgaggacgaggccgactactattgcgccgcctgggatgatagcctgagcgagtttctgtttggcaccggcaccaagctgacagtgcttggaacgcgtgaggacctgaagaacgtgttcccacctgaggtggccgtgttcgagcctagcgaggccgagatcagccacacccagaaagccaccctcgtgtgcctggctaccggcttctaccccgaccatgtggaactgtcttggtgggtcaacggcaaagaggtgcacagcggcgtgtgtaccgacccccagccactgaaagaacagcccgccctgaacgacagccggtactgcctgagcagcagactgagagtgtccgccaccttctggcagaacccccggaaccacttcagatgccaggtgcagttctacggcctgagcgagaacgacgagtggacccaggacagagccaagcccgtgacccagatcgtgtctgccgaagcctggggcagagccgattgcggctttaccagcgagagctaccagcagggcgtgctgagcgccaccaacctgagcgtgatcggcttcagaatcctgctgctgaaagtggccggctttaacctgctgatgaccctgcggctgtggtccagc

SEQ ID NO: 5593 - DNA, 2289 bp, synthetic construct
  source 1..2289: mol_type = other DNA
atggccttaccagtgaccgccttgctcctgccgctggccttgctgctccacgccgccaggccggaagtgcagctggttgaatctggcggaggactggttcagcctggcggatctctgagactgtcttgtgccgccagcggcttcagcttcagcgacttttggatgagctgggtccgacaggcccctggcaaaggacttgaatgggtcgccacaatcagccaggccggcagcgagaaggactacgtggactctgtgaagggcagattcaccatcagccgggacaacgccaagaagtccctgtacctccagatgaacagcctgagagccgaggacaccgccgtgtactattgtgcctctggcgtgtacagcttcgactacagaggccagggcaccctggtcacagtctcttctggtaccggcggaggcggatctggcggcggaggtagcggtggcggaggatctgaattcgacgtggtcatgacacagagcccttctagcctgtctgccagcgtgggcgacagagtgacaatcacctgtcagagcagcctggacatcagccactacctgaactggtatcagcagaagcccggcaaggcccctaagctgctgatctacgacgccagcaatctggaaaccggcgtgcccagcagattttctggcagcggaagcggcacccacttcaccttcacaatatccagcctccagcctgaggacttcgccacctactactgccagcagtacgacaacctgcctctgacctttggcggaggcaccaagctggaaatcaagagactcgagatccagaaccctgatcctgccgtgtaccagctgcgggatagcaagagcagcgacaagagcgtgtgtctgttcaccgacttcgacagccagaccaacgtgtcccagagcaaggactccgacgtgtacatcaccgataagtgcgtgctggacatgcggagcatggacttcaagagcaactccgccgtggcctggtccaacaagtccgatttcgcctgcgccaacgccttcaacaacagcattatccccgaggacacattcttcccaagccccgagagcagctgcgacgtgaagctggtggaaaagagcttcgagacagacaccaacctgaacttccagatcctgtacgagatcctgctgggcaaggccaccctgtacgccgtgctggtgtctgccctggtgctgatggctatggtcaagcggaaggacagccggggacgcgccaagagaagcggatctggcgtgaagcagaccctgaatttcgacctgctgaagctggctggcgacgtggaatccaacccaggccctactagtatggactggatttggcgcatccttttccttgtcggcgctgctaccggcgcgcattccttcgaacaagttcaactggttcaatcaggcggaggcgtggtgcaacctggtggctctctgagagtgtcttgtgctgcctctggcgtgaccctgagcgactatggaatgcactgggtccgacaggcccctggcaaaggacttgagtgggtcgccttcatcagaaacgacggcagcgacaagtattacgccgacagcgtgaagggcagattcaccatcagccgggacaacagcgagaaaaccgtgtctctccagatgtctagcctgagagccgaggacaccgccgtgtactactgtgccaagaatggcgagagcggccctctggactactggtatctggatctgtggggcagaggcaccctggtcacagtctcttctacgcgtgaggacctgaagaacgtgttcccacctgaggtggccgtgttcgagcctagcgaggccgagatcagccacacccagaaagccaccctcgtgtgcctggctaccggcttctaccccgaccatgtggaactgtcttggtgggtcaacggcaaagaggtgcacagcggcgtgtgtaccgacccccagccactgaaagaacagcccgccctgaacgacagccggtactgcctgagcagcagactgagagtgtccgccaccttctggcagaacccccggaaccacttcagatgccaggtgcagttctacggcctgagcgagaacgacgagtggacccaggacagagccaagcccgtgacccagatcgtgtctgccgaagcctggggcagagccgattgcggctttaccagcgagagctaccagcagggcgtgctgagcgccaccaacctgagcgtgatcggcttcagaatcctgctgctgaaagtggccggctttaacctgctgatgaccctgcggctgtggtccagc

SEQ ID NO: 5594 - DNA, 2301 bp, synthetic construct
  source 1..2301: mol_type = other DNA
atggccttaccagtgaccgccttgctcctgccgctggccttgctgctccacgccgccaggccggaagtgcagctggttgaatctggcggaggactggttcagcctggcggatctctgagactgtcttgtgccgccagcggcttcagcttcagcgacttttggatgagctgggtccgacaggcccctggcaaaggacttgaatgggtcgccacaatcagccaggccggcagcgagaaggactacgtggactctgtgaagggcagattcaccatcagccgggacaacgccaagaagtccctgtacctccagatgaacagcctgagagccgaggacaccgccgtgtactattgtgcctctggcgtgtacagcttcgactacagaggccagggcaccctggtcacagtctcttctggtaccggcggaggcggatctggcggcggaggtagcggtggcggaggatctgaattcagctacgagctgacacagcctccatccgtgtctggcacacctggacagagagtggctatctcctgtagcggcagcagcagcaacatcggcaccagaatggtcacctggtatcagcacgtgccaggcacagcccctaagctgctgatcttcaacaacaaccagcggcctagcggcgtgcccgatagattttctgccagcaagagcggcacaagcgccagcctggctatcatcggactccagtctgacgacgaggccgactactactgtgccacctgggacgacaacgtgaagtcctacgtgttcggcaccggcaccaaagtgacagtgcttggaagtagactcgagatccagaaccctgatcctgccgtgtaccagctgcgggatagcaagagcagcgacaagagcgtgtgtctgttcaccgacttcgacagccagaccaacgtgtcccagagcaaggactccgacgtgtacatcaccgataagtgcgtgctggacatgcggagcatggacttcaagagcaactccgccgtggcctggtccaacaagtccgatttcgcctgcgccaacgccttcaacaacagcattatccccgaggacacattcttcccaagccccgagagcagctgcgacgtgaagctggtggaaaagagcttcgagacagacaccaacctgaacttccagatcctgtacgagatcctgctgggcaaggccaccctgtacgccgtgctggtgtctgccctggtgctgatggctatggtcaagcggaaggacagccggggacgcgccaagagaagcggatctggcgtgaagcagaccctgaatttcgacctgctgaagctggctggcgacgtggaatccaacccaggccctactagtatggactggatttggcgcatccttttccttgtcggcgctgctaccggcgcgcattccttcgaacttgaaatggcccaggttcagctccagcagtggggagctggactgctgaagcctagcgagacactgagcctgacctgtgctgtgtacggcggcagcttcagcggctactactggtcctggatcagacagcctcctggcaaaggactggaatggatcggcgagatcaaccacagcggctccaccaactacaaccccagcctgaagtccagagtgaccatcagcgtggacaccagcaagaaccagttctccctgaagctgagcagcgtgacagccgctgataccgccgtgtactattgcgctagagcccctcagtcttggtacgtgggagatgtgtggggccagggcacactggttacagtgtcatctacgcgtgaggacctgaagaacgtgttcccacctgaggtggccgtgttcgagcctagcgaggccgagatcagccacacccagaaagccaccctcgtgtgcctggctaccggcttctaccccgaccatgtggaactgtcttggtgggtcaacggcaaagaggtgcacagcggcgtgtgtaccgacccccagccactgaaagaacagcccgccctgaacgacagccggtactgcctgagcagcagactgagagtgtccgccaccttctggcagaacccccggaaccacttcagatgccaggtgcagttctacggcctgagcgagaacgacgagtggacccaggacagagccaagcccgtgacccagatcgtgtctgccgaagcctggggcagagccgattgcggctttaccagcgagagctaccagcagggcgtgctgagcgccaccaacctgagcgtgatcggcttcagaatcctgctgctgaaagtggccggctttaacctgctgatgaccctgcggctgtggtccagc

SEQ ID NO: 5595 - DNA, 2292 bp, synthetic construct
  source 1..2292: mol_type = other DNA
atggccttaccagtgaccgccttgctcctgccgctggccttgctgctccacgccgccaggccggaagtgcagctggttgaatctggcggaggactggttcagcctggcggatctctgagactgtcttgtgccgccagcggcttcagcttcagcgacttttggatgagctgggtccgacaggcccctggcaaaggacttgaatgggtcgccacaatcagccaggccggcagcgagaaggactacgtggactctgtgaagggcagattcaccatcagccgggacaacgccaagaagtccctgtacctccagatgaacagcctgagagccgaggacaccgccgtgtactattgtgcctctggcgtgtacagcttcgactacagaggccagggcaccctggtcacagtctcttctggtaccggcggaggcggatctggcggcggaggtagcggtggcggaggatctgaattccagtctgtgctgacacagcctcctagcctgtctgtggcccctggaaagacagccagcatcacatgcggcggcaacaacatcggcatgaagtccgtgcactggtatcagcagaggccaggacaggctcctgtgctggtcatctactacgacagcgacagaccctctggcatccccggcagattttccggcagcaactctggcaataccgccacactgaccatctccagagtggaagctggcgacgaggccgactactactgccaagtgtgggataccaccggcgatcaccctggctatgtgtttggcaccggcaccaaagtgacagtgcttctcgagatccagaaccctgatcctgccgtgtaccagctgcgggatagcaagagcagcgacaagagcgtgtgtctgttcaccgacttcgacagccagaccaacgtgtcccagagcaaggactccgacgtgtacatcaccgataagtgcgtgctggacatgcggagcatggacttcaagagcaactccgccgtggcctggtccaacaagtccgatttcgcctgcgccaacgccttcaacaacagcattatccccgaggacacattcttcccaagccccgagagcagctgcgacgtgaagctggtggaaaagagcttcgagacagacaccaacctgaacttccagatcctgtacgagatcctgctgggcaaggccaccctgtacgccgtgctggtgtctgccctggtgctgatggctatggtcaagcggaaggacagccggggacgcgccaagagaagcggatctggcgtgaagcagaccctgaatttcgacctgctgaagctggctggcgacgtggaatccaacccaggccctactagtatggactggatttggcgcatccttttccttgtcggcgctgctaccggcgcgcattccttcgaacaagttcaactggttcagagcggagccgaagtgaagaaacctggcagcagcgtgaaggtgtcctgcaaagcaagcggcggcacctttagcagctacgccatctcttgggtccgacaggcacctggacaaggactggaatggatgggcggcatcatccccatcttcggcacagccaattacgcccagaaattccagggcagagtgaccatcaccgccgacgagtctacaagcaccgcctacatggaactgagcagcctgagaagcgaggacaccgccgtgtactattgtgccagaggcgtgtacggctacagcggctctgccccttatgatgagtggggccagggaaccctggtcaccgtttcttctacgcgtgaggacctgaagaacgtgttcccacctgaggtggccgtgttcgagcctagcgaggccgagatcagccacacccagaaagccaccctcgtgtgcctggctaccggcttctaccccgaccatgtggaactgtcttggtgggtcaacggcaaagaggtgcacagcggcgtgtgtaccgacccccagccactgaaagaacagcccgccctgaacgacagccggtactgcctgagcagcagactgagagtgtccgccaccttctggcagaacccccggaaccacttcagatgccaggtgcagttctacggcctgagcgagaacgacgagtggacccaggacagagccaagcccgtgacccagatcgtgtctgccgaagcctggggcagagccgattgcggctttaccagcgagagctaccagcagggcgtgctgagcgccaccaacctgagcgtgatcggcttcagaatcctgctgctgaaagtggccggctttaacctgctgatgaccctgcggctgtggtccagc

SEQ ID NO: 5596 - DNA, 2286 bp, synthetic construct
  source 1..2286: mol_type = other DNA
atggccttaccagtgaccgccttgctcctgccgctggccttgctgctccacgccgccaggccggaagtgcagctggttgaatctggcggaggactggttcagcctggcggatctctgagactgtcttgtgccgccagcggcttcagcttcagcgacttttggatgagctgggtccgacaggcccctggcaaaggacttgaatgggtcgccacaatcagccaggccggcagcgagaaggactacgtggactctgtgaagggcagattcaccatcagccgggacaacgccaagaagtccctgtacctccagatgaacagcctgagagccgaggacaccgccgtgtactattgtgcctctggcgtgtacagcttcgactacagaggccagggcaccctggtcacagtctcttctggtaccggcggaggcggatctggcggcggaggtagcggtggcggaggatctgaattcgaggtgcaactggttgagtctggcggaggactggtgcagcctggaagaagcctgagactgtcttgtgccgccagcggcttcaccttcgacgattatgccatgcactgggtccgacaggcccctggcaaaggacttgaatgggtgtccggcatctcctggaacagcggctctatcggctacgccgattccgtgaagggcagattcaccatcagccgggacaacgccaagaacagcctgtacctccagatgaactccctgagagccgaggacacagccctgtactactgcgccaaagacaaaggcggaggctactacgacttttggagcggcagcgattattggggccagggcacactggtcacagtgtctagcctcgagatccagaaccctgatcctgccgtgtaccagctgcgggatagcaagagcagcgacaagagcgtgtgtctgttcaccgacttcgacagccagaccaacgtgtcccagagcaaggactccgacgtgtacatcaccgataagtgcgtgctggacatgcggagcatggacttcaagagcaactccgccgtggcctggtccaacaagtccgatttcgcctgcgccaacgccttcaacaacagcattatccccgaggacacattcttcccaagccccgagagcagctgcgacgtgaagctggtggaaaagagcttcgagacagacaccaacctgaacttccagatcctgtacgagatcctgctgggcaaggccaccctgtacgccgtgctggtgtctgccctggtgctgatggctatggtcaagcggaaggacagccggggacgcgccaagagaagcggatctggcgtgaagcagaccctgaatttcgacctgctgaagctggctggcgacgtggaatccaacccaggccctactagtatggactggatttggcgcatccttttccttgtcggcgctgctaccggcgcgcattccttcgaatcttctgagctgacacaggaccctgccgtgtctgttgctctgggccagacagtgcggattacctgtcagggcgatagcctgagaagctactacgcctcctggtatcagcagaagccaggccaggctcctgtgctggtcatctacggcaagaacaacagacccagcggcatccccgatagattcagcggaagcagctctggcaataccgccagcctgacaattactggcgctcaggccgaggacgaggccgactactactgcaacagcagagatagcagcggctgggttttcggcggaggcacaaaactgacagtgctgacgcgtgaggacctgaagaacgtgttcccacctgaggtggccgtgttcgagcctagcgaggccgagatcagccacacccagaaagccaccctcgtgtgcctggctaccggcttctaccccgaccatgtggaactgtcttggtgggtcaacggcaaagaggtgcacagcggcgtgtgtaccgacccccagccactgaaagaacagcccgccctgaacgacagccggtactgcctgagcagcagactgagagtgtccgccaccttctggcagaacccccggaaccacttcagatgccaggtgcagttctacggcctgagcgagaacgacgagtggacccaggacagagccaagcccgtgacccagatcgtgtctgccgaagcctggggcagagccgattgcggctttaccagcgagagctaccagcagggcgtgctgagcgccaccaacctgagcgtgatcggcttcagaatcctgctgctgaaagtggccggctttaacctgctgatgaccctgcggctgtggtccagc

SEQ ID NO: 5597 - DNA, 2313 bp, synthetic construct
  source 1..2313: mol_type = other DNA
atggccttaccagtgaccgccttgctcctgccgctggccttgctgctccacgccgccaggccggaagtgcagctggttgaatctggcggaggactggttcagcctggcggatctctgagactgtcttgtgccgccagcggcttcagcttcagcgacttttggatgagctgggtccgacaggcccctggcaaaggacttgaatgggtcgccacaatcagccaggccggcagcgagaaggactacgtggactctgtgaagggcagattcaccatcagccgggacaacgccaagaagtccctgtacctccagatgaacagcctgagagccgaggacaccgccgtgtactattgtgcctctggcgtgtacagcttcgactacagaggccagggcaccctggtcacagtctcttctggtaccggcggaggcggatctggcggcggaggtagcggtggcggaggatctgaattcgaagtgcagctccagcagtctggacctggcctggttaagcctagccagacactgagcctgacctgtgccatcagcggcgatagcgtgctgagcaacagcgacacctggaactggatcagacagagccctagcagaggactggaatggctgggcagaacctaccacagaagcacttggtacgacgactacgccagctctgtgcggggcagagtgtccatcaatgtggacaccagcaagaaccagtacagcctgcaactgaacgccgtgacacctgaggataccggcgtgtactactgcgccagagacagactccaggacggcaactcttggagcgacgcctttgatgtgtggggccagggcacaatggtcaccgtttctagcctcgagatccagaaccctgatcctgccgtgtaccagctgcgggatagcaagagcagcgacaagagcgtgtgtctgttcaccgacttcgacagccagaccaacgtgtcccagagcaaggactccgacgtgtacatcaccgataagtgcgtgctggacatgcggagcatggacttcaagagcaactccgccgtggcctggtccaacaagtccgatttcgcctgcgccaacgccttcaacaacagcattatccccgaggacacattcttcccaagccccgagagcagctgcgacgtgaagctggtggaaaagagcttcgagacagacaccaacctgaacttccagatcctgtacgagatcctgctgggcaaggccaccctgtacgccgtgctggtgtctgccctggtgctgatggctatggtcaagcggaaggacagccggggacgcgccaagagaagcggatctggcgtgaagcagaccctgaatttcgacctgctgaagctggctggcgacgtggaatccaacccaggccctactagtatggactggatttggcgcatccttttccttgtcggcgctgctaccggcgcgcattccttcgaacaatctgctctgacacagcctgccagcgtgtcaggatctcctggacagagcatcaccatctcttgcaccggcaccagctctgatgtcggcggctacaattacgtgtcctggtatcagcagcaccccggcaaggcccctaagctgatgatctacgacgtgtccaacagacccagcggcgtgtccaatagattctccggcagcaagagcggcaacaccgccagcctgacaatttctggactgcaagccgaggacgaggccgactactactgtagcagctacaccagcagcagcacactggtgtacgtgttcggcacaggcaccaaagtgaccgtgcttacgcgtgaggacctgaagaacgtgttcccacctgaggtggccgtgttcgagcctagcgaggccgagatcagccacacccagaaagccaccctcgtgtgcctggctaccggcttctaccccgaccatgtggaactgtcttggtgggtcaacggcaaagaggtgcacagcggcgtgtgtaccgacccccagccactgaaagaacagcccgccctgaacgacagccggtactgcctgagcagcagactgagagtgtccgccaccttctggcagaacccccggaaccacttcagatgccaggtgcagttctacggcctgagcgagaacgacgagtggacccaggacagagccaagcccgtgacccagatcgtgtctgccgaagcctggggcagagccgattgcggctttaccagcgagagctaccagcagggcgtgctgagcgccaccaacctgagcgtgatcggcttcagaatcctgctgctgaaagtggccggctttaacctgctgatgaccctgcggctgtggtccagc

SEQ ID NO: 5598 - DNA, 2247 bp, synthetic construct
  source 1..2247: mol_type = other DNA
atggccttaccagtgaccgccttgctcctgccgctggccttgctgctccacgccgccaggccggaagtgcagctggttgaatctggcggaggactggttcagcctggcggatctctgagactgtcttgtgccgccagcggcttcagcttcagcgacttttggatgagctgggtccgacaggcccctggcaaaggacttgaatgggtcgccacaatcagccaggccggcagcgagaaggactacgtggactctgtgaagggcagattcaccatcagccgggacaacgccaagaagtccctgtacctccagatgaacagcctgagagccgaggacaccgccgtgtactattgtgcctctggcgtgtacagcttcgactacagaggccagggcaccctggtcacagtctcttctggtaccggcggaggcggatctggcggcggaggtagcggtggcggaggatctgaattccaggtgcaactggttcagtctggggccgaagtgaagaaacctggggcctctgtgaaggtgtcctgcaaggcttccggctacacctttaccagctacgacatcaactgggtccgacaggccacaggccaaggactggaatggatgggctggatgaaccccaacagcggcaataccggctacgcccagaaattccagggcagagtgaccatgaccagaaacaccagcatcagcaccgcctacatggaactgagcagcctgagaagcgaggacaccgccgtgtactattgcgccagaggcgacagcaccaaggtggaaatcaaactcgagatccagaaccctgatcctgccgtgtaccagctgcgggatagcaagagcagcgacaagagcgtgtgtctgttcaccgacttcgacagccagaccaacgtgtcccagagcaaggactccgacgtgtacatcaccgataagtgcgtgctggacatgcggagcatggacttcaagagcaactccgccgtggcctggtccaacaagtccgatttcgcctgcgccaacgccttcaacaacagcattatccccgaggacacattcttcccaagccccgagagcagctgcgacgtgaagctggtggaaaagagcttcgagacagacaccaacctgaacttccagatcctgtacgagatcctgctgggcaaggccaccctgtacgccgtgctggtgtctgccctggtgctgatggctatggtcaagcggaaggacagccggggacgcgccaagagaagcggatctggcgtgaagcagaccctgaatttcgacctgctgaagctggctggcgacgtggaatccaacccaggccctactagtatggactggatttggcgcatccttttccttgtcggcgctgctaccggcgcgcattccttcgaacaatctgtgctgacccagcctagatccgtgtctggctctcctggacagagcgtgaccatctcttgtaccggcaccagctctgatgtcggcggctacaattacgtgtcctggtatcagcagcaccccggcgaagcccctaagctgattatctacgacgccgacaagcggcccagcggcatcagcaatagattcagctctggcaagagcggcaacaccgccagcctgacaatcagcggactccaggtggaagatgaggccgactactactgctgctcctatgccggcggaagcacctgggttttcggaggcggtacaaaagtgaccgtgctgacgcgtgaggacctgaagaacgtgttcccacctgaggtggccgtgttcgagcctagcgaggccgagatcagccacacccagaaagccaccctcgtgtgcctggctaccggcttctaccccgaccatgtggaactgtcttggtgggtcaacggcaaagaggtgcacagcggcgtgtgtaccgacccccagccactgaaagaacagcccgccctgaacgacagccggtactgcctgagcagcagactgagagtgtccgccaccttctggcagaacccccggaaccacttcagatgccaggtgcagttctacggcctgagcgagaacgacgagtggacccaggacagagccaagcccgtgacccagatcgtgtctgccgaagcctggggcagagccgattgcggctttaccagcgagagctaccagcagggcgtgctgagcgccaccaacctgagcgtgatcggcttcagaatcctgctgctgaaagtggccggctttaacctgctgatgaccctgcggctgtggtccagc

SEQ ID NO: 5599 - DNA, 2313 bp, synthetic construct
  source 1..2313: mol_type = other DNA
atggccttaccagtgaccgccttgctcctgccgctggccttgctgctccacgccgccaggccggaagtgcagctggttgaatctggcggaggactggttcagcctggcggatctctgagactgtcttgtgccgccagcggcttcagcttcagcgacttttggatgagctgggtccgacaggcccctggcaaaggacttgaatgggtcgccacaatcagccaggccggcagcgagaaggactacgtggactctgtgaagggcagattcaccatcagccgggacaacgccaagaagtccctgtacctccagatgaacagcctgagagccgaggacaccgccgtgtactattgtgcctctggcgtgtacagcttcgactacagaggccagggcaccctggtcacagtctcttctggtaccggcggaggcggatctggcggcggaggtagcggtggcggaggatctgaattcgaagtgcagctccagcagtctggacctggcctggttaagcctagccagacactgagcctgacctgtgccatcagcggcgatagcgtgtcctctaatagcgccgcctggaactggatcagacagagccctagcagaggactggaatggctgggcagaacctactaccgcagcaagtggtacagcgactacgccgtgtccgtgaagtcccggatcaccatcaatcccgacaccagcaagaaccagttcagcctgcaactgaacagcgtgacccctgaggataccgccgtgtactactgcgccagagatccctacgacttttggagcggctaccccgacgcctttgacatctggggacagggcacaatggtcaccgtttctagcctcgagatccagaaccctgatcctgccgtgtaccagctgcgggatagcaagagcagcgacaagagcgtgtgtctgttcaccgacttcgacagccagaccaacgtgtcccagagcaaggactccgacgtgtacatcaccgataagtgcgtgctggacatgcggagcatggacttcaagagcaactccgccgtggcctggtccaacaagtccgatttcgcctgcgccaacgccttcaacaacagcattatccccgaggacacattcttcccaagccccgagagcagctgcgacgtgaagctggtggaaaagagcttcgagacagacaccaacctgaacttccagatcctgtacgagatcctgctgggcaaggccaccctgtacgccgtgctggtgtctgccctggtgctgatggctatggtcaagcggaaggacagccggggacgcgccaagagaagcggatctggcgtgaagcagaccctgaatttcgacctgctgaagctggctggcgacgtggaatccaacccaggccctactagtatggactggatttggcgcatccttttccttgtcggcgctgctaccggcgcgcattccttcgaacaatctgctctgacacagcctgccagcgtgtcaggatctcctggacagagcatcaccatctcttgcaccggcaccagctctgatgtcggcggctacaattacgtgtcctggtatcagcagcaccccggcaaggcccctaaagtgattatcagcgaagtgaacaacagacccagcggcgtgtcccacagattcagcggctctaagtctggcaacaccgccagcctgacaatctctggactgcaagccgaggacgaggccgactacttctgtagcagctacaccagcggcagaaccctgtacgtgttcggcacaggcagcaaagtgacagtgctgggaacgcgtgaggacctgaagaacgtgttcccacctgaggtggccgtgttcgagcctagcgaggccgagatcagccacacccagaaagccaccctcgtgtgcctggctaccggcttctaccccgaccatgtggaactgtcttggtgggtcaacggcaaagaggtgcacagcggcgtgtgtaccgacccccagccactgaaagaacagcccgccctgaacgacagccggtactgcctgagcagcagactgagagtgtccgccaccttctggcagaacccccggaaccacttcagatgccaggtgcagttctacggcctgagcgagaacgacgagtggacccaggacagagccaagcccgtgacccagatcgtgtctgccgaagcctggggcagagccgattgcggctttaccagcgagagctaccagcagggcgtgctgagcgccaccaacctgagcgtgatcggcttcagaatcctgctgctgaaagtggccggctttaacctgctgatgaccctgcggctgtggtccagc

SEQ ID NO: 5600 - DNA, 2310 bp, synthetic construct
  source 1..2310: mol_type = other DNA
atggccttaccagtgaccgccttgctcctgccgctggccttgctgctccacgccgccaggccggaagtgcagctggttgaatctggcggaggactggttcagcctggcggatctctgagactgtcttgtgccgccagcggcttcagcttcagcgacttttggatgagctgggtccgacaggcccctggcaaaggacttgaatgggtcgccacaatcagccaggccggcagcgagaaggactacgtggactctgtgaagggcagattcaccatcagccgggacaacgccaagaagtccctgtacctccagatgaacagcctgagagccgaggacaccgccgtgtactattgtgcctctggcgtgtacagcttcgactacagaggccagggcaccctggtcacagtctcttctggtaccggcggaggcggatctggcggcggaggtagcggtggcggaggatctgaattccaatctgctctgacacagcctgccagcgcctctggatctcctggacagagcgtgaccatctcctgtaccggcacctcttctgatgtcggcggctacaactacgtgtcctggtatcagcagcaccccggcaaggcccctaagctgatgatctacgacgtgtccaacagacccagcggcgtgtccaatagattctccggcagcaagagcggcaacaccgccagcctgacaatttctggactgcaagccgaggacgaggccgactactactgtagcagctacaccagcagcagcacactgtacgtgttcggcacaggcacccagctcacagttcttctcgagatccagaaccctgatcctgccgtgtaccagctgcgggatagcaagagcagcgacaagagcgtgtgtctgttcaccgacttcgacagccagaccaacgtgtcccagagcaaggactccgacgtgtacatcaccgataagtgcgtgctggacatgcggagcatggacttcaagagcaactccgccgtggcctggtccaacaagtccgatttcgcctgcgccaacgccttcaacaacagcattatccccgaggacacattcttcccaagccccgagagcagctgcgacgtgaagctggtggaaaagagcttcgagacagacaccaacctgaacttccagatcctgtacgagatcctgctgggcaaggccaccctgtacgccgtgctggtgtctgccctggtgctgatggctatggtcaagcggaaggacagccggggacgcgccaagagaagcggatctggcgtgaagcagaccctgaatttcgacctgctgaagctggctggcgacgtggaatccaacccaggccctactagtatggactggatttggcgcatccttttccttgtcggcgctgctaccggcgcgcattccttcgaagaagtgcagctccagcagtctggacctggcctggttaagcctagccagacactgagcctgacctgtgccatcagcggcgattccatgctgagcaacagcgacacctggaactggatcagacagagccccagcagaggcctggaatggctgggcagaacataccacagaagcacttggtacgacgactacgccagctctgtgcggggcagagtgtccatcaatgtggacaccagcaagaaccagtacagcctgcaactgaacgccgtgacacctgaggataccggcgtgtactactgtgccagagtgcggctccaggacggcaattcttggagcgacgcctttgatgtgtggggccagggcacaatggtcaccgtttctagcacgcgtgaggacctgaagaacgtgttcccacctgaggtggccgtgttcgagcctagcgaggccgagatcagccacacccagaaagccaccctcgtgtgcctggctaccggcttctaccccgaccatgtggaactgtcttggtgggtcaacggcaaagaggtgcacagcggcgtgtgtaccgacccccagccactgaaagaacagcccgccctgaacgacagccggtactgcctgagcagcagactgagagtgtccgccaccttctggcagaacccccggaaccacttcagatgccaggtgcagttctacggcctgagcgagaacgacgagtggacccaggacagagccaagcccgtgacccagatcgtgtctgccgaagcctggggcagagccgattgcggctttaccagcgagagctaccagcagggcgtgctgagcgccaccaacctgagcgtgatcggcttcagaatcctgctgctgaaagtggccggctttaacctgctgatgaccctgcggctgtggtccagc

SEQ ID NO: 5601 - DNA, 2310 bp, synthetic construct
  source 1..2310: mol_type = other DNA
atggccttaccagtgaccgccttgctcctgccgctggccttgctgctccacgccgccaggccggaagtgcagctggttgaatctggcggaggactggttcagcctggcggatctctgagactgtcttgtgccgccagcggcttcagcttcagcgacttttggatgagctgggtccgacaggcccctggcaaaggacttgaatgggtcgccacaatcagccaggccggcagcgagaaggactacgtggactctgtgaagggcagattcaccatcagccgggacaacgccaagaagtccctgtacctccagatgaacagcctgagagccgaggacaccgccgtgtactattgtgcctctggcgtgtacagcttcgactacagaggccagggcaccctggtcacagtctcttctggtaccggcggaggcggatctggcggcggaggtagcggtggcggaggatctgaattcgacgtgatgctgacccagacaccactgagcctgcctgtgtctctgggcgatcaggccagcatctcctgtagaagcagccagagcatcctgcacagcaccggcgatacctacctggaatggtatctccagaagcctggacagagccccaagctgctgattaacaaggtgtccaaccggctgagcggcgtgcccgatagattttctggcagcggctctggcaccgacttcaccctgaagatcagcagagtggaagccgaggacctgggcgtgtactactgcttccaaggcagccatgttccttggacctttggcggaggcaccaagctggaaatcaagagagctgacgccgctcctaccgtgtccatctttcctctcgagatccagaaccctgatcctgccgtgtaccagctgcgggatagcaagagcagcgacaagagcgtgtgtctgttcaccgacttcgacagccagaccaacgtgtcccagagcaaggactccgacgtgtacatcaccgataagtgcgtgctggacatgcggagcatggacttcaagagcaactccgccgtggcctggtccaacaagtccgatttcgcctgcgccaacgccttcaacaacagcattatccccgaggacacattcttcccaagccccgagagcagctgcgacgtgaagctggtggaaaagagcttcgagacagacaccaacctgaacttccagatcctgtacgagatcctgctgggcaaggccaccctgtacgccgtgctggtgtctgccctggtgctgatggctatggtcaagcggaaggacagccggggacgcgccaagagaagcggatctggcgtgaagcagaccctgaatttcgacctgctgaagctggctggcgacgtggaatccaacccaggccctactagtatggactggatttggcgcatccttttccttgtcggcgctgctaccggcgcgcattccttcgaacaagtgaagctccagcagagcggccctagccttgtgaaacctggcgcttccgtgaagatgagctgcaaggccagcggctacaccttcaccgatttctacatgaaatgggtcaagcagagccacggcaagtctctggaatggatcggcgacatcaaccccaacatcggagacaccttctacaaccagaagttcaagggcaaagccacactgaccgtggacaagagcagcagcaccgcctacatgcagctcaacagcctgaccagcgaggacagcgccgtgtacttttgttccgtgggctacttcgacgtgtggggagccggaacaaccgtgacagtctcttctacgcgtgaggacctgaagaacgtgttcccacctgaggtggccgtgttcgagcctagcgaggccgagatcagccacacccagaaagccaccctcgtgtgcctggctaccggcttctaccccgaccatgtggaactgtcttggtgggtcaacggcaaagaggtgcacagcggcgtgtgtaccgacccccagccactgaaagaacagcccgccctgaacgacagccggtactgcctgagcagcagactgagagtgtccgccaccttctggcagaacccccggaaccacttcagatgccaggtgcagttctacggcctgagcgagaacgacgagtggacccaggacagagccaagcccgtgacccagatcgtgtctgccgaagcctggggcagagccgattgcggctttaccagcgagagctaccagcagggcgtgctgagcgccaccaacctgagcgtgatcggcttcagaatcctgctgctgaaagtggccggctttaacctgctgatgaccctgcggctgtggtccagc

SEQ ID NO: 5602 - DNA, 2298 bp, synthetic construct
  source 1..2298: mol_type = other DNA
atggccttaccagtgaccgccttgctcctgccgctggccttgctgctccacgccgccaggccggaagtgcagctggttgaatctggcggaggactggttcagcctggcggatctctgagactgtcttgtgccgccagcggcttcagcttcagcgacttttggatgagctgggtccgacaggcccctggcaaaggacttgaatgggtcgccacaatcagccaggccggcagcgagaaggactacgtggactctgtgaagggcagattcaccatcagccgggacaacgccaagaagtccctgtacctccagatgaacagcctgagagccgaggacaccgccgtgtactattgtgcctctggcgtgtacagcttcgactacagaggccagggcaccctggtcacagtctcttctggtaccggcggaggcggatctggcggcggaggtagcggtggcggaggatctgaattcgagatcgtgctgacacagtctcccgccacactgtcactgtctccaggcgaaagagccacactgagctgtagagccagccagagcgtgtccatctacctggcctggtatcagcagaagcctggacaggctccccggctgctgatctacgatgccagcaatagagccacaggcatccccgccagattttctggctctggcagcggcaccgatttcaccctgaccataagcagcctggaacctgaggacttcgccgtgtactactgccagcagagaagcaactggcctcctttcacattcggccctggcaccaaggtggacatcaaactcgagatccagaaccctgatcctgccgtgtaccagctgcgggatagcaagagcagcgacaagagcgtgtgtctgttcaccgacttcgacagccagaccaacgtgtcccagagcaaggactccgacgtgtacatcaccgataagtgcgtgctggacatgcggagcatggacttcaagagcaactccgccgtggcctggtccaacaagtccgatttcgcctgcgccaacgccttcaacaacagcattatccccgaggacacattcttcccaagccccgagagcagctgcgacgtgaagctggtggaaaagagcttcgagacagacaccaacctgaacttccagatcctgtacgagatcctgctgggcaaggccaccctgtacgccgtgctggtgtctgccctggtgctgatggctatggtcaagcggaaggacagccggggacgcgccaagagaagcggatctggcgtgaagcagaccctgaatttcgacctgctgaagctggctggcgacgtggaatccaacccaggccctactagtatggactggatttggcgcatccttttccttgtcggcgctgctaccggcgcgcattccttcgaacaggtgcagcttgttgaaagcggaggcggagttgtgcagcctggcagaagtctgagactgtcttgtgccgccagcggcttcaccttcagcagctatggaatgcactgggtccgacaggcccctggcaaaggacttgaatgggttgccgtgatctgggacgacggcagcaacaagtattacgtggacagcgtgaagggcagattcaccatcagccgggacaacagcaagaacaccctgtacctccagatgaacagcctgagagccgaggacacagccgtgtattattgcgccagagatgactactacggcagcggctccttcaacagctactatggcacagacgtgtggggccagggcacaacagttaccgttagctctacgcgtgaggacctgaagaacgtgttcccacctgaggtggccgtgttcgagcctagcgaggccgagatcagccacacccagaaagccaccctcgtgtgcctggctaccggcttctaccccgaccatgtggaactgtcttggtgggtcaacggcaaagaggtgcacagcggcgtgtgtaccgacccccagccactgaaagaacagcccgccctgaacgacagccggtactgcctgagcagcagactgagagtgtccgccaccttctggcagaacccccggaaccacttcagatgccaggtgcagttctacggcctgagcgagaacgacgagtggacccaggacagagccaagcccgtgacccagatcgtgtctgccgaagcctggggcagagccgattgcggctttaccagcgagagctaccagcagggcgtgctgagcgccaccaacctgagcgtgatcggcttcagaatcctgctgctgaaagtggccggctttaacctgctgatgaccctgcggctgtggtccagc

SEQ ID NO: 5603 - DNA, 2253 bp, synthetic construct
  source 1..2253: mol_type = other DNA
atggccttaccagtgaccgccttgctcctgccgctggccttgctgctccacgccgccaggccggaagtgcagctggttgaatctggcggaggactggttcagcctggcggatctctgagactgtcttgtgccgccagcggcttcagcttcagcgacttttggatgagctgggtccgacaggcccctggcaaaggacttgaatgggtcgccacaatcagccaggccggcagcgagaaggactacgtggactctgtgaagggcagattcaccatcagccgggacaacgccaagaagtccctgtacctccagatgaacagcctgagagccgaggacaccgccgtgtactattgtgcctctggcgtgtacagcttcgactacagaggccagggcaccctggtcacagtctcttctggtaccggcggaggcggatctggcggcggaggtagcggtggcggaggatctgaattcgacatccagatgacacagagccctagcagcctgtctgccagcgtgggagacagagtgaccatcacctgtagagccagccagggcatctcttcttggctggcctggtatcagcagaagcccgagaaggcccctaagagcctgatctatgccgccagctctctccagagcggagtgcctagcagattttctggcagcggctccggcaccgatttcaccctgacaatatccagcctccagcctgaggacttcgccacctactactgccagcagtacaacagctacccctacaccttcggccagggcaccaagctggaaatcaaactcgagatccagaaccctgatcctgccgtgtaccagctgcgggatagcaagagcagcgacaagagcgtgtgtctgttcaccgacttcgacagccagaccaacgtgtcccagagcaaggactccgacgtgtacatcaccgataagtgcgtgctggacatgcggagcatggacttcaagagcaactccgccgtggcctggtccaacaagtccgatttcgcctgcgccaacgccttcaacaacagcattatccccgaggacacattcttcccaagccccgagagcagctgcgacgtgaagctggtggaaaagagcttcgagacagacaccaacctgaacttccagatcctgtacgagatcctgctgggcaaggccaccctgtacgccgtgctggtgtctgccctggtgctgatggctatggtcaagcggaaggacagccggggacgcgccaagagaagcggatctggcgtgaagcagaccctgaatttcgacctgctgaagctggctggcgacgtggaatccaacccaggccctactagtatggactggatttggcgcatccttttccttgtcggcgctgctaccggcgcgcattccttcgaagaagtgcaactggttcaatctggcggcggactggttcatccaggcggttctctgagactgagctgtgccggctctggcttcaccttcagcacctacctgatgtactgggtccgacaggcccctggcaagacactggaatgggtgtccgctattggcagcggaggcgatacctactacgccgactctgtgaagggcagattcaccatcagccgggacaacgccaagaacagcctgtacctccagatgaactccctgagagccgaggacatggccgtgtactactgtgccagaggactcggctattggggccagggaacactggtcacagtgtcctctacgcgtgaggacctgaagaacgtgttcccacctgaggtggccgtgttcgagcctagcgaggccgagatcagccacacccagaaagccaccctcgtgtgcctggctaccggcttctaccccgaccatgtggaactgtcttggtgggtcaacggcaaagaggtgcacagcggcgtgtgtaccgacccccagccactgaaagaacagcccgccctgaacgacagccggtactgcctgagcagcagactgagagtgtccgccaccttctggcagaacccccggaaccacttcagatgccaggtgcagttctacggcctgagcgagaacgacgagtggacccaggacagagccaagcccgtgacccagatcgtgtctgccgaagcctggggcagagccgattgcggctttaccagcgagagctaccagcagggcgtgctgagcgccaccaacctgagcgtgatcggcttcagaatcctgctgctgaaagtggccggctttaacctgctgatgaccctgcggctgtggtccagc

SEQ ID NO: 5604 - DNA, 2310 bp, synthetic construct
  source 1..2310: mol_type = other DNA
atggccttaccagtgaccgccttgctcctgccgctggccttgctgctccacgccgccaggccggaagtgcagctggttgaatctggcggaggactggttcagcctggcggatctctgagactgtcttgtgccgccagcggcttcagcttcagcgacttttggatgagctgggtccgacaggcccctggcaaaggacttgaatgggtcgccacaatcagccaggccggcagcgagaaggactacgtggactctgtgaagggcagattcaccatcagccgggacaacgccaagaagtccctgtacctccagatgaacagcctgagagccgaggacaccgccgtgtactattgtgcctctggcgtgtacagcttcgactacagaggccagggcaccctggtcacagtctcttctggtaccggcggaggcggatctggcggcggaggtagcggtggcggaggatctgaattcctgcctgttctgacacagcctccatccgtgtctgtggcccctggaaagaccgccagaatcacatgcggcggcaacaacatcggcagcaagagcgtgcactggtatcagcagaagcctggacaggctcctgtgctggtggtgtacgacgacagcgatagacctagcggcatccccgagagattcagcggcagcaattccggcaataccgccacactgaccatcagcagagtggaagctggcgacgaggccgactactactgccaagtgtgggacagcagcagcgactacgtggtgtttggcggcggaacaaagctgacagtgcttctcgagatccagaaccctgatcctgccgtgtaccagctgcgggatagcaagagcagcgacaagagcgtgtgtctgttcaccgacttcgacagccagaccaacgtgtcccagagcaaggactccgacgtgtacatcaccgataagtgcgtgctggacatgcggagcatggacttcaagagcaactccgccgtggcctggtccaacaagtccgatttcgcctgcgccaacgccttcaacaacagcattatccccgaggacacattcttcccaagccccgagagcagctgcgacgtgaagctggtggaaaagagcttcgagacagacaccaacctgaacttccagatcctgtacgagatcctgctgggcaaggccaccctgtacgccgtgctggtgtctgccctggtgctgatggctatggtcaagcggaaggacagccggggacgcgccaagagaagcggatctggcgtgaagcagaccctgaatttcgacctgctgaagctggctggcgacgtggaatccaacccaggccctactagtatggactggatttggcgcatccttttccttgtcggcgctgctaccggcgcgcattccttcgaagaagttcaactggtgcagagcggagccgaagtgaagaagccaggcgagagcctgaagattagctgcaaaggcagcggctacagcttcaccagctactggatcggctgggtccgacagatgcctggcaaaggactggaatggatgggcatcatctaccccggcgacagcgacaccagatacagccctagctttcagggccaagtgaccatctccgccgacaagagcatcagcacagcctacctccagtggtcctctctgaaggccagcgataccgccatgtactactgcgccagacaagtctggggatggcaaggcggcatgtaccccaggtctaactggtggtacaacctggactcttggggccagggcacactggtcacagtctcttctacgcgtgaggacctgaagaacgtgttcccacctgaggtggccgtgttcgagcctagcgaggccgagatcagccacacccagaaagccaccctcgtgtgcctggctaccggcttctaccccgaccatgtggaactgtcttggtgggtcaacggcaaagaggtgcacagcggcgtgtgtaccgacccccagccactgaaagaacagcccgccctgaacgacagccggtactgcctgagcagcagactgagagtgtccgccaccttctggcagaacccccggaaccacttcagatgccaggtgcagttctacggcctgagcgagaacgacgagtggacccaggacagagccaagcccgtgacccagatcgtgtctgccgaagcctggggcagagccgattgcggctttaccagcgagagctaccagcagggcgtgctgagcgccaccaacctgagcgtgatcggcttcagaatcctgctgctgaaagtggccggctttaacctgctgatgaccctgcggctgtggtccagc

SEQ ID NO: 5605 - DNA, 2289 bp, synthetic construct
  source 1..2289: mol_type = other DNA
atggccttaccagtgaccgccttgctcctgccgctggccttgctgctccacgccgccaggccggaagtgcagctggttgaatctggcggaggactggttcagcctggcggatctctgagactgtcttgtgccgccagcggcttcagcttcagcgacttttggatgagctgggtccgacaggcccctggcaaaggacttgaatgggtcgccacaatcagccaggccggcagcgagaaggactacgtggactctgtgaagggcagattcaccatcagccgggacaacgccaagaagtccctgtacctccagatgaacagcctgagagccgaggacaccgccgtgtactattgtgcctctggcgtgtacagcttcgactacagaggccagggcaccctggtcacagtctcttctggtaccggcggaggcggatctggcggcggaggtagcggtggcggaggatctgaattcgagctggtcatgacacagagccctgcttctctggccgtgtcactgggacagagagccaccatctcttgcagagccagcgagagcgtggacagctacggcaagagcttcatgcactggtatcagctcaagcccggccagcctcctaagctgctgatctacagagcctccaacctggaaagcggcgtgccagccagattttctggcagcggcagcagaaccgacttcaccctgaccattgatcccgtggaagccgatgatgccgccacctactactgccagcagaacaacgaggacccctggacatttggcggaggcaccaagctggaaatcaaactcgagatccagaaccctgatcctgccgtgtaccagctgcgggatagcaagagcagcgacaagagcgtgtgtctgttcaccgacttcgacagccagaccaacgtgtcccagagcaaggactccgacgtgtacatcaccgataagtgcgtgctggacatgcggagcatggacttcaagagcaactccgccgtggcctggtccaacaagtccgatttcgcctgcgccaacgccttcaacaacagcattatccccgaggacacattcttcccaagccccgagagcagctgcgacgtgaagctggtggaaaagagcttcgagacagacaccaacctgaacttccagatcctgtacgagatcctgctgggcaaggccaccctgtacgccgtgctggtgtctgccctggtgctgatggctatggtcaagcggaaggacagccggggacgcgccaagagaagcggatctggcgtgaagcagaccctgaatttcgacctgctgaagctggctggcgacgtggaatccaacccaggccctactagtatggactggatttggcgcatccttttccttgtcggcgctgctaccggcgcgcattccttcgaagaagtgcagctcgaacagtctggccccgagcttgtgaaacctggcgcttccgtgaagatgagctgcaaggccagcggctacaccttcaccaactactacatgaaatgggtcaagcagagccacggcaagtccctggaatggatcggcgatctgaaccccaacaacggcgacaccttctacaaccagaagttcaagggcaaagccacactgaccgtggacaagagcagcaacaccgcctacatgcagctcaactccctgaccagcgaggacagcgccgtgtactactgtgccagaaccggcagatacgaagagaacgctatggactactggggccagggcacaagcgtgacagtctcttctacgcgtgaggacctgaagaacgtgttcccacctgaggtggccgtgttcgagcctagcgaggccgagatcagccacacccagaaagccaccctcgtgtgcctggctaccggcttctaccccgaccatgtggaactgtcttggtgggtcaacggcaaagaggtgcacagcggcgtgtgtaccgacccccagccactgaaagaacagcccgccctgaacgacagccggtactgcctgagcagcagactgagagtgtccgccaccttctggcagaacccccggaaccacttcagatgccaggtgcagttctacggcctgagcgagaacgacgagtggacccaggacagagccaagcccgtgacccagatcgtgtctgccgaagcctggggcagagccgattgcggctttaccagcgagagctaccagcagggcgtgctgagcgccaccaacctgagcgtgatcggcttcagaatcctgctgctgaaagtggccggctttaacctgctgatgaccctgcggctgtggtccagc

SEQ ID NO: 5606 - DNA, 2271 bp, synthetic construct
  source 1..2271: mol_type = other DNA
atggccttaccagtgaccgccttgctcctgccgctggccttgctgctccacgccgccaggccggaagtgcagctggttgaatctggcggaggactggttcagcctggcggatctctgagactgtcttgtgccgccagcggcttcagcttcagcgacttttggatgagctgggtccgacaggcccctggcaaaggacttgaatgggtcgccacaatcagccaggccggcagcgagaaggactacgtggactctgtgaagggcagattcaccatcagccgggacaacgccaagaagtccctgtacctccagatgaacagcctgagagccgaggacaccgccgtgtactattgtgcctctggcgtgtacagcttcgactacagaggccagggcaccctggtcacagtctcttctggtaccggcggaggcggatctggcggcggaggtagcggtggcggaggatctgaattcgacgtggtcatgacacagagcccttctagcctgtctgccagcgtgggcgacagagtgaccatcacctgtatggcctccgaggacatctacatccggctggcctggtatcagcagaagcctggaaacgcccctaagctgctgatctacgccgccacctctctggaaacaggcgtgccaagcagattttccggcagcggctctggcaccgatttcaccctgacaatatccagcctccagcctgaggacttcgccacctactactgccagcagtattggagcagcccctggacatttggcggaggcaccaaggtggaaatcaaactcgagatccagaaccctgatcctgccgtgtaccagctgcgggatagcaagagcagcgacaagagcgtgtgtctgttcaccgacttcgacagccagaccaacgtgtcccagagcaaggactccgacgtgtacatcaccgataagtgcgtgctggacatgcggagcatggacttcaagagcaactccgccgtggcctggtccaacaagtccgatttcgcctgcgccaacgccttcaacaacagcattatccccgaggacacattcttcccaagccccgagagcagctgcgacgtgaagctggtggaaaagagcttcgagacagacaccaacctgaacttccagatcctgtacgagatcctgctgggcaaggccaccctgtacgccgtgctggtgtctgccctggtgctgatggctatggtcaagcggaaggacagccggggacgcgccaagagaagcggatctggcgtgaagcagaccctgaatttcgacctgctgaagctggctggcgacgtggaatccaacccaggccctactagtatggactggatttggcgcatccttttccttgtcggcgctgctaccggcgcgcattccttcgaacaggttcagctgcaagagtctggccccggactggtcaagcctagccaaacactgagcctgacctgtaccgtgtccggctacagcatcaccagcgactacacctggaactggatcagacagcctcctggcaacggactggaatggatcggctacatcacctacagcggcagcaccagctacaaccccagcctgaaaagccgggtgctgatctccgtggacaccagcaagaatcaggtgtccctgaagctgagcagcgtgacagccgctgataccgccgtgtactactgtgccagactggggagaagatacacaatggactactggggccagggcaccaccgtgacagtttcttctacgcgtgaggacctgaagaacgtgttcccacctgaggtggccgtgttcgagcctagcgaggccgagatcagccacacccagaaagccaccctcgtgtgcctggctaccggcttctaccccgaccatgtggaactgtcttggtgggtcaacggcaaagaggtgcacagcggcgtgtgtaccgacccccagccactgaaagaacagcccgccctgaacgacagccggtactgcctgagcagcagactgagagtgtccgccaccttctggcagaacccccggaaccacttcagatgccaggtgcagttctacggcctgagcgagaacgacgagtggacccaggacagagccaagcccgtgacccagatcgtgtctgccgaagcctggggcagagccgattgcggctttaccagcgagagctaccagcagggcgtgctgagcgccaccaacctgagcgtgatcggcttcagaatcctgctgctgaaagtggccggctttaacctgctgatgaccctgcggctgtggtccagc

SEQ ID NO: 5607 - DNA, 2283 bp, synthetic construct
  source 1..2283: mol_type = other DNA
atggccttaccagtgaccgccttgctcctgccgctggccttgctgctccacgccgccaggccggaagtgcagctggttgaatctggcggaggactggttcagcctggcggatctctgagactgtcttgtgccgccagcggcttcagcttcagcgacttttggatgagctgggtccgacaggcccctggcaaaggacttgaatgggtcgccacaatcagccaggccggcagcgagaaggactacgtggactctgtgaagggcagattcaccatcagccgggacaacgccaagaagtccctgtacctccagatgaacagcctgagagccgaggacaccgccgtgtactattgtgcctctggcgtgtacagcttcgactacagaggccagggcaccctggtcacagtctcttctggtaccggcggaggcggatctggcggcggaggtagcggtggcggaggatctgaattcgatattgtgctgactcagagccctgccactctgagccttagtccaggcgacagagctaccatctcctgtagggcctctgaatccgtgaccattctgggctctcatctcatatattggtatcaacaaaagccgggccagcctccacggctgctcattcaactggcctctaacgtgcagaccggcgtgccagctagattttctggctctggctcccggaccgactttacactgacaatcagctccgtggaacccgaagattttgccgtctattattgcctccagtccaggaccattcctcggacattcggccagggaacaaaactcgaaatcaagcggctcgagatccagaaccctgatcctgccgtgtaccagctgcgggatagcaagagcagcgacaagagcgtgtgtctgttcaccgacttcgacagccagaccaacgtgtcccagagcaaggactccgacgtgtacatcaccgataagtgcgtgctggacatgcggagcatggacttcaagagcaactccgccgtggcctggtccaacaagtccgatttcgcctgcgccaacgccttcaacaacagcattatccccgaggacacattcttcccaagccccgagagcagctgcgacgtgaagctggtggaaaagagcttcgagacagacaccaacctgaacttccagatcctgtacgagatcctgctgggcaaggccaccctgtacgccgtgctggtgtctgccctggtgctgatggctatggtcaagcggaaggacagccggggacgcgccaagagaagcggatctggcgtgaagcagaccctgaatttcgacctgctgaagctggctggcgacgtggaatccaacccaggccctactagtatggactggatttggcgcatccttttccttgtcggcgctgctaccggcgcgcattccttcgaacaggtgcagctcgttcagagtggccccgaagtgaaaaagccaggcgagtccgtgaagatttcctgcaaagcctccggctacacattccggcactactctatgaattgggtcaagcaggccccaggccagggccttaagtggatgggacgcatcaataccgagtccggcgtgccaatctacgccgatgacttcaaaggccggttcagcttcaccgtggatacctctgcctccaccgcctacctggaaatcagcagcctgaccagcgaggatacagctgtgtacttctgtagcaacgattacctctacagcctggatttctggggacagggaaccacactgaccgtgtctagcacgcgtgaggacctgaagaacgtgttcccacctgaggtggccgtgttcgagcctagcgaggccgagatcagccacacccagaaagccaccctcgtgtgcctggctaccggcttctaccccgaccatgtggaactgtcttggtgggtcaacggcaaagaggtgcacagcggcgtgtgtaccgacccccagccactgaaagaacagcccgccctgaacgacagccggtactgcctgagcagcagactgagagtgtccgccaccttctggcagaacccccggaaccacttcagatgccaggtgcagttctacggcctgagcgagaacgacgagtggacccaggacagagccaagcccgtgacccagatcgtgtctgccgaagcctggggcagagccgattgcggctttaccagcgagagctaccagcagggcgtgctgagcgccaccaacctgagcgtgatcggcttcagaatcctgctgctgaaagtggccggctttaacctgctgatgaccctgcggctgtggtccagc

SEQ ID NO: 5608 - DNA, 2283 bp, synthetic construct
  source 1..2283: mol_type = other DNA
atggccttaccagtgaccgccttgctcctgccgctggccttgctgctccacgccgccaggccggaagtgcagctggttgaatctggcggaggactggttcagcctggcggatctctgagactgtcttgtgccgccagcggcttcagcttcagcgacttttggatgagctgggtccgacaggcccctggcaaaggacttgaatgggtcgccacaatcagccaggccggcagcgagaaggactacgtggactctgtgaagggcagattcaccatcagccgggacaacgccaagaagtccctgtacctccagatgaacagcctgagagccgaggacaccgccgtgtactattgtgcctctggcgtgtacagcttcgactacagaggccagggcaccctggtcacagtctcttctggtaccggcggaggcggatctggcggcggaggtagcggtggcggaggatctgaattcgacatcgtgctgacacagtctcccgccacactgtcactgagccctggcgatagagccacactgagctgtagagccagcgagagcgtgacaatcctgggcagccacctgatctactggtatcagcagaagcccggacaggcccctagactgctgattcagctcgccagcaatgtgcagacaggcatccctgccagattttccggcagcggcagcagaaccgatttcaccctgaccataagcagcctggaacctgaggacttcgccgtgtactactgcctccagagccggacaatccccagaacctttggacagggcaccaagctggaaatcaagagactcgagatccagaaccctgatcctgccgtgtaccagctgcgggatagcaagagcagcgacaagagcgtgtgtctgttcaccgacttcgacagccagaccaacgtgtcccagagcaaggactccgacgtgtacatcaccgataagtgcgtgctggacatgcggagcatggacttcaagagcaactccgccgtggcctggtccaacaagtccgatttcgcctgcgccaacgccttcaacaacagcattatccccgaggacacattcttcccaagccccgagagcagctgcgacgtgaagctggtggaaaagagcttcgagacagacaccaacctgaacttccagatcctgtacgagatcctgctgggcaaggccaccctgtacgccgtgctggtgtctgccctggtgctgatggctatggtcaagcggaaggacagccggggacgcgccaagagaagcggatctggcgtgaagcagaccctgaatttcgacctgctgaagctggctggcgacgtggaatccaacccaggccctactagtatggactggatttggcgcatccttttccttgtcggcgctgctaccggcgcgcattccttcgaacaggttcagctggtgcagtctggcagcgagctgaagaaacctggcgagagcgtgaagatcagctgcaaggccagcggctacaccttcacacactacagcatgaactgggtccgacaggcccctggacaaggactggaatggatgggcagaatcaacaccgagacaggcgagcccctgtacgccgacgatttcaagggcagattcgtgttcagcctggacaccagcgccagcacagcctatctccagatcagctctctgaaggccgaggacaccgccgtgtactactgctccaacgactacctgtactccctggactattggggccagggcacactggtcacagtgtctagtacgcgtgaggacctgaagaacgtgttcccacctgaggtggccgtgttcgagcctagcgaggccgagatcagccacacccagaaagccaccctcgtgtgcctggctaccggcttctaccccgaccatgtggaactgtcttggtgggtcaacggcaaagaggtgcacagcggcgtgtgtaccgacccccagccactgaaagaacagcccgccctgaacgacagccggtactgcctgagcagcagactgagagtgtccgccaccttctggcagaacccccggaaccacttcagatgccaggtgcagttctacggcctgagcgagaacgacgagtggacccaggacagagccaagcccgtgacccagatcgtgtctgccgaagcctggggcagagccgattgcggctttaccagcgagagctaccagcagggcgtgctgagcgccaccaacctgagcgtgatcggcttcagaatcctgctgctgaaagtggccggctttaacctgctgatgaccctgcggctgtggtccagc

SEQ ID NO: 5609 - DNA, 2286 bp, synthetic construct
  source 1..2286: mol_type = other DNA
atggccttaccagtgaccgccttgctcctgccgctggccttgctgctccacgccgccaggccggaagtgcagctggttgaatctggcggaggactggttcagcctggcggatctctgagactgtcttgtgccgccagcggcttcagcttcagcgacttttggatgagctgggtccgacaggcccctggcaaaggacttgaatgggtcgccacaatcagccaggccggcagcgagaaggactacgtggactctgtgaagggcagattcaccatcagccgggacaacgccaagaagtccctgtacctccagatgaacagcctgagagccgaggacaccgccgtgtactattgtgcctctggcgtgtacagcttcgactacagaggccagggcaccctggtcacagtctcttctggtaccggcggaggcggatctggcggcggaggtagcggtggcggaggatctgaattcgacatccagctgactcagagccctagctttctgagcgccagcgtgggcgacagagtgaccattacatgtagagccagccagggcatcagcaccgacctgaactggtatcagcagaagcctggcaaggcccctaagctgctgatctacgccgccagcaatctggaaagcggcgtgccaagcagattttccggctctggcagcggcaccgagttcaccctgacaatatctagcctccagcctgaggacttcgccacctactactgccagcagagctacaactggccctacacctttggcggaggcaccaaggtggaaatcaagagactcgagatccagaaccctgatcctgccgtgtaccagctgcgggatagcaagagcagcgacaagagcgtgtgtctgttcaccgacttcgacagccagaccaacgtgtcccagagcaaggactccgacgtgtacatcaccgataagtgcgtgctggacatgcggagcatggacttcaagagcaactccgccgtggcctggtccaacaagtccgatttcgcctgcgccaacgccttcaacaacagcattatccccgaggacacattcttcccaagccccgagagcagctgcgacgtgaagctggtggaaaagagcttcgagacagacaccaacctgaacttccagatcctgtacgagatcctgctgggcaaggccaccctgtacgccgtgctggtgtctgccctggtgctgatggctatggtcaagcggaaggacagccggggacgcgccaagagaagcggatctggcgtgaagcagaccctgaatttcgacctgctgaagctggctggcgacgtggaatccaacccaggccctactagtatggactggatttggcgcatccttttccttgtcggcgctgctaccggcgcgcattccttcgaagaagttcagctggttgaatcaggcggaggactcgtgaaacctggcggctctctgagactgtcttgtgccgccagcggcttcaccttcagcaacttcgagatgaactgggtccgacaggccccaggcaaaggactggaatgggtgtccggcatcagctccaatggccggtacatcaactacgccgacagcgtgaagggcagattcaccatcagccgggacaacgccaagaacagcctgtacctccagatgaactccctgagagccgaggacaccgccgtgtactattgtgccagagtggtggacttcgaccaggactacaacggcttcgactattggggccagggcaccctggttaccgttagctctacgcgtgaggacctgaagaacgtgttcccacctgaggtggccgtgttcgagcctagcgaggccgagatcagccacacccagaaagccaccctcgtgtgcctggctaccggcttctaccccgaccatgtggaactgtcttggtgggtcaacggcaaagaggtgcacagcggcgtgtgtaccgacccccagccactgaaagaacagcccgccctgaacgacagccggtactgcctgagcagcagactgagagtgtccgccaccttctggcagaacccccggaaccacttcagatgccaggtgcagttctacggcctgagcgagaacgacgagtggacccaggacagagccaagcccgtgacccagatcgtgtctgccgaagcctggggcagagccgattgcggctttaccagcgagagctaccagcagggcgtgctgagcgccaccaacctgagcgtgatcggcttcagaatcctgctgctgaaagtggccggctttaacctgctgatgaccctgcggctgtggtccagc

SEQ ID NO: 5610 - DNA, 2280 bp, synthetic construct
  source 1..2280: mol_type = other DNA
atggccttaccagtgaccgccttgctcctgccgctggccttgctgctccacgccgccaggccggaagtgcagctggttgaatctggcggaggactggttcagcctggcggatctctgagactgtcttgtgccgccagcggcttcagcttcagcgacttttggatgagctgggtccgacaggcccctggcaaaggacttgaatgggtcgccacaatcagccaggccggcagcgagaaggactacgtggactctgtgaagggcagattcaccatcagccgggacaacgccaagaagtccctgtacctccagatgaacagcctgagagccgaggacaccgccgtgtactattgtgcctctggcgtgtacagcttcgactacagaggccagggcaccctggtcacagtctcttctggtaccggcggaggcggatctggcggcggaggtagcggtggcggaggatctgaattcgacatccaactgactcagagccccagctttctgagcgcctctgtgggcgacagagtgaccatcacatgtagtctcagcctgggcatcagcacatggcgggattggtttccgccgaggcttggcaggggccttgagccgctgacctacgccgccagcacactgcaaagcggagtgcctagcagattttccggcagcggctctggcaccgagttcaccctgacaatatccagcctccagcctgaggacttcgccacctactactgccagcagctcaacagctaccctctgacctttggcggaggcaccaaggtggaaatcaagagactcgagatccagaaccctgatcctgccgtgtaccagctgcgggatagcaagagcagcgacaagagcgtgtgtctgttcaccgacttcgacagccagaccaacgtgtcccagagcaaggactccgacgtgtacatcaccgataagtgcgtgctggacatgcggagcatggacttcaagagcaactccgccgtggcctggtccaacaagtccgatttcgcctgcgccaacgccttcaacaacagcattatccccgaggacacattcttcccaagccccgagagcagctgcgacgtgaagctggtggaaaagagcttcgagacagacaccaacctgaacttccagatcctgtacgagatcctgctgggcaaggccaccctgtacgccgtgctggtgtctgccctggtgctgatggctatggtcaagcggaaggacagccggggacgcgccaagagaagcggatctggcgtgaagcagaccctgaatttcgacctgctgaagctggctggcgacgtggaatccaacccaggccctactagtatggactggatttggcgcatccttttccttgtcggcgctgctaccggcgcgcattccttcgaagaagttcaactggttgagtctggtggcggcctggttaagcctggcggatctctgagactgagctgtgccgccagcggcttcacctttagcacatacggcatgagctgggtccgacaggcccctggaaaaggacttgagtgggtcgcctacatcaacaacggctccggctacatctactacgccgacagcgtgaagggcagattcaccatcagccgggacaacgccaagaacagcctgtacctccagatgaactccctgagagccgaggacaccgccgtgtactattgtgccagaggacagtggtggagcggcggagactttgattattggggccagggcaccctggtcaccgtttcttctacgcgtgaggacctgaagaacgtgttcccacctgaggtggccgtgttcgagcctagcgaggccgagatcagccacacccagaaagccaccctcgtgtgcctggctaccggcttctaccccgaccatgtggaactgtcttggtgggtcaacggcaaagaggtgcacagcggcgtgtgtaccgacccccagccactgaaagaacagcccgccctgaacgacagccggtactgcctgagcagcagactgagagtgtccgccaccttctggcagaacccccggaaccacttcagatgccaggtgcagttctacggcctgagcgagaacgacgagtggacccaggacagagccaagcccgtgacccagatcgtgtctgccgaagcctggggcagagccgattgcggctttaccagcgagagctaccagcagggcgtgctgagcgccaccaacctgagcgtgatcggcttcagaatcctgctgctgaaagtggccggctttaacctgctgatgaccctgcggctgtggtccagc

SEQ ID NO: 5611 - DNA, 2283 bp, synthetic construct
  source 1..2283: mol_type = other DNA
atggccttaccagtgaccgccttgctcctgccgctggccttgctgctccacgccgccaggccggaagtgcagctggttgaatctggcggaggactggttcagcctggcggatctctgagactgtcttgtgccgccagcggcttcagcttcagcgacttttggatgagctgggtccgacaggcccctggcaaaggacttgaatgggtcgccacaatcagccaggccggcagcgagaaggactacgtggactctgtgaagggcagattcaccatcagccgggacaacgccaagaagtccctgtacctccagatgaacagcctgagagccgaggacaccgccgtgtactattgtgcctctggcgtgtacagcttcgactacagaggccagggcaccctggtcacagtctcttctggtaccggcggaggcggatctggcggcggaggtagcggtggcggaggatctgaattcgagatcgtgctgacacagtctcccgccacactgtcactgtctccaggcgaaagagccacactgagctgtagcgccagcagcagcgtgtcctacatgtactggtatcagcagaagcccggacaggcccctagactgctgatctacagaaccagcaacctggcctctggcatccccgccagattttctggctctggcagcggcaccgatttcaccctgaccataagcagcctggaacctgaggacttcgccgtgtactactgccagcagtaccacagctaccccaccacctttggacagggcaccaaggtggaaatcaagcggacagttctcgagatccagaaccctgatcctgccgtgtaccagctgcgggatagcaagagcagcgacaagagcgtgtgtctgttcaccgacttcgacagccagaccaacgtgtcccagagcaaggactccgacgtgtacatcaccgataagtgcgtgctggacatgcggagcatggacttcaagagcaactccgccgtggcctggtccaacaagtccgatttcgcctgcgccaacgccttcaacaacagcattatccccgaggacacattcttcccaagccccgagagcagctgcgacgtgaagctggtggaaaagagcttcgagacagacaccaacctgaacttccagatcctgtacgagatcctgctgggcaaggccaccctgtacgccgtgctggtgtctgccctggtgctgatggctatggtcaagcggaaggacagccggggacgcgccaagagaagcggatctggcgtgaagcagaccctgaatttcgacctgctgaagctggctggcgacgtggaatccaacccaggccctactagtatggactggatttggcgcatccttttccttgtcggcgctgctaccggcgcgcattccttcgaagaagtgcagctggttgaatcaggtggcggcctggttcaacctggcggatctctgagactgtcttgtgccgccagcggcttcagcttcaacacctacgccatgaactgggtccgacaggctcctggcaaaggactggaatgggtgtcccacatcagaagcaagagcaacaacttcgccacctactacgccgacagcgtgaaggacagattcaccatcagccgggacaacgccaagaacagcctgtacctccagatgaactccctgagagccgaggacaccgccgtgtattattgcgccagacaaggcggcgacttccctatggattattggggccagggcaccctggtcaccgtttcttctacgcgtgaggacctgaagaacgtgttcccacctgaggtggccgtgttcgagcctagcgaggccgagatcagccacacccagaaagccaccctcgtgtgcctggctaccggcttctaccccgaccatgtggaactgtcttggtgggtcaacggcaaagaggtgcacagcggcgtgtgtaccgacccccagccactgaaagaacagcccgccctgaacgacagccggtactgcctgagcagcagactgagagtgtccgccaccttctggcagaacccccggaaccacttcagatgccaggtgcagttctacggcctgagcgagaacgacgagtggacccaggacagagccaagcccgtgacccagatcgtgtctgccgaagcctggggcagagccgattgcggctttaccagcgagagctaccagcagggcgtgctgagcgccaccaacctgagcgtgatcggcttcagaatcctgctgctgaaagtggccggctttaacctgctgatgaccctgcggctgtggtccagc

SEQ ID NO: 5612 - DNA, 2271 bp, synthetic construct
  source 1..2271: mol_type = other DNA
atggccttaccagtgaccgccttgctcctgccgctggccttgctgctccacgccgccaggccggaagtgcagctggttgaatctggcggaggactggttcagcctggcggatctctgagactgtcttgtgccgccagcggcttcagcttcagcgacttttggatgagctgggtccgacaggcccctggcaaaggacttgaatgggtcgccacaatcagccaggccggcagcgagaaggactacgtggactctgtgaagggcagattcaccatcagccgggacaacgccaagaagtccctgtacctccagatgaacagcctgagagccgaggacaccgccgtgtactattgtgcctctggcgtgtacagcttcgactacagaggccagggcaccctggtcacagtctcttctggtaccggcggaggcggatctggcggcggaggtagcggtggcggaggatctgaattcgacgtggtcatgacacagagcccttctagcctgtctgccagcgtgggcgacagagtgaccatcacctgtaaagccagcgaggacatctacatccggctggcctggtatcagcagaagcctggaaaggcccctaagctgctgatctacgccgccacctctctggaaacaggcgtgccaagcagattttccggcagcggctctggcaccgatttcaccctgacaatatccagcctccagcctgaggacttcgccacctactactgccagcagtattggaccacaccttggacctttggcggaggcaccaaggtggaaatcaaactcgagatccagaaccctgatcctgccgtgtaccagctgcgggatagcaagagcagcgacaagagcgtgtgtctgttcaccgacttcgacagccagaccaacgtgtcccagagcaaggactccgacgtgtacatcaccgataagtgcgtgctggacatgcggagcatggacttcaagagcaactccgccgtggcctggtccaacaagtccgatttcgcctgcgccaacgccttcaacaacagcattatccccgaggacacattcttcccaagccccgagagcagctgcgacgtgaagctggtggaaaagagcttcgagacagacaccaacctgaacttccagatcctgtacgagatcctgctgggcaaggccaccctgtacgccgtgctggtgtctgccctggtgctgatggctatggtcaagcggaaggacagccggggacgcgccaagagaagcggatctggcgtgaagcagaccctgaatttcgacctgctgaagctggctggcgacgtggaatccaacccaggccctactagtatggactggatttggcgcatccttttccttgtcggcgctgctaccggcgcgcattccttcgaacaggtgcagctccaagagtctggccctggactggtcaagcctagccagacactgagcctgacctgtaccgtgtccggctacagcatcaccatcgactacacctggaactggatcagacagcctcctggcaaaggactggaatggatcggctacatcacctacagcggcagcaccgactacaaccccagcctgaaaagccgggtgctgatctccgtggacaccagcaagaatcaggtgtccctgaagctgagcagcgtgacagccgctgataccgccgtgtactactgtgccagactgggcagaagatacgccctggattattggggccagggcaccaccgtgacagtgtcatctacgcgtgaggacctgaagaacgtgttcccacctgaggtggccgtgttcgagcctagcgaggccgagatcagccacacccagaaagccaccctcgtgtgcctggctaccggcttctaccccgaccatgtggaactgtcttggtgggtcaacggcaaagaggtgcacagcggcgtgtgtaccgacccccagccactgaaagaacagcccgccctgaacgacagccggtactgcctgagcagcagactgagagtgtccgccaccttctggcagaacccccggaaccacttcagatgccaggtgcagttctacggcctgagcgagaacgacgagtggacccaggacagagccaagcccgtgacccagatcgtgtctgccgaagcctggggcagagccgattgcggctttaccagcgagagctaccagcagggcgtgctgagcgccaccaacctgagcgtgatcggcttcagaatcctgctgctgaaagtggccggctttaacctgctgatgaccctgcggctgtggtccagc

SEQ ID NO: 5613 - DNA, 2283 bp, synthetic construct
  source 1..2283: mol_type = other DNA
atggccttaccagtgaccgccttgctcctgccgctggccttgctgctccacgccgccaggccggaagtgcagctggttgaatctggcggaggactggttcagcctggcggatctctgagactgtcttgtgccgccagcggcttcagcttcagcgacttttggatgagctgggtccgacaggcccctggcaaaggacttgaatgggtcgccacaatcagccaggccggcagcgagaaggactacgtggactctgtgaagggcagattcaccatcagccgggacaacgccaagaagtccctgtacctccagatgaacagcctgagagccgaggacaccgccgtgtactattgtgcctctggcgtgtacagcttcgactacagaggccagggcaccctggtcacagtctcttctggtaccggcggaggcggatctggcggcggaggtagcggtggcggaggatctgaattcgacatccagatgacccagaccacaagcagcctgtctgccagcctgggcgacagagtgaccatctcttgtagagccagccaggacatcagcaactacctgaactggtatcagcagaaacccgacggcaccgtgaagctgctgatctactacaccagcatcctgcacagcggcgtgcccagcagattttctggctctggcagcggcaccgactacagcctgaccatcagcaatctggaacaagaggacttcgctacctacttctgccagcaaggcaacaccctgccttggacatttggcggaggcaccaagctggaaatcaaagctctcgagatccagaaccctgatcctgccgtgtaccagctgcgggatagcaagagcagcgacaagagcgtgtgtctgttcaccgacttcgacagccagaccaacgtgtcccagagcaaggactccgacgtgtacatcaccgataagtgcgtgctggacatgcggagcatggacttcaagagcaactccgccgtggcctggtccaacaagtccgatttcgcctgcgccaacgccttcaacaacagcattatccccgaggacacattcttcccaagccccgagagcagctgcgacgtgaagctggtggaaaagagcttcgagacagacaccaacctgaacttccagatcctgtacgagatcctgctgggcaaggccaccctgtacgccgtgctggtgtctgccctggtgctgatggctatggtcaagcggaaggacagccggggacgcgccaagagaagcggatctggcgtgaagcagaccctgaatttcgacctgctgaagctggctggcgacgtggaatccaacccaggccctactagtatggactggatttggcgcatccttttccttgtcggcgctgctaccggcgcgcattccttcgaagtgcaactggttgaatctggcggcggactggttaagcctggcggatctctgaagctgagctgtgccgcctctggcttcgccttcagcatctacgatatgagctgggtccgacagacccctgagaagagactggaatgggtcgcctacatctctagcggcggagggacctactatcccgacacagtgaagggcagattcaccatctccagagacaacgccaagaacaccctgtacctccagatgagcagcctgaagtccgaggacaccgccatgtactactgcgccagacacagcggctatggcacacattggggagtgctgtttgcctactggggccagggaacactggtcacagtttctgctacgcgtgaggacctgaagaacgtgttcccacctgaggtggccgtgttcgagcctagcgaggccgagatcagccacacccagaaagccaccctcgtgtgcctggctaccggcttctaccccgaccatgtggaactgtcttggtgggtcaacggcaaagaggtgcacagcggcgtgtgtaccgacccccagccactgaaagaacagcccgccctgaacgacagccggtactgcctgagcagcagactgagagtgtccgccaccttctggcagaacccccggaaccacttcagatgccaggtgcagttctacggcctgagcgagaacgacgagtggacccaggacagagccaagcccgtgacccagatcgtgtctgccgaagcctggggcagagccgattgcggctttaccagcgagagctaccagcagggcgtgctgagcgccaccaacctgagcgtgatcggcttcagaatcctgctgctgaaagtggccggctttaacctgctgatgaccctgcggctgtggtccagc

SEQ ID NO: 5614 - DNA, 2316 bp, synthetic construct
  source 1..2316: mol_type = other DNA
atggccttaccagtgaccgccttgctcctgccgctggccttgctgctccacgccgccaggccggaagtgcagctggttgaatctggcggaggactggttcagcctggcggatctctgagactgtcttgtgccgccagcggcttcagcttcagcgacttttggatgagctgggtccgacaggcccctggcaaaggacttgaatgggtcgccacaatcagccaggccggcagcgagaaggactacgtggactctgtgaagggcagattcaccatcagccgggacaacgccaagaagtccctgtacctccagatgaacagcctgagagccgaggacaccgccgtgtactattgtgcctctggcgtgtacagcttcgactacagaggccagggcaccctggtcacagtctcttctggtaccggcggaggcggatctggcggcggaggtagcggtggcggaggatctgaattcgacatcgtgatgacacagagccctgatagcctggccgtgtctctgggagagagagccaccatcaactgcaagagcagccagagcctgctgtacagaagcaaccagaagaactacctggcctggtatcagcagaagcccggccagcctcctaagctgctgatctactgggccagcaccagagaaagcggcgtgcccgatagattttctggctctggcagcggcaccgacttcaccctgacaatttctagcctgcaagccgaggacgtggccgtgtactactgccagcagtattacaactaccccagaaccttcggccagggcaccaaggtggaaatcaagagaacagttctcgagatccagaaccctgatcctgccgtgtaccagctgcgggatagcaagagcagcgacaagagcgtgtgtctgttcaccgacttcgacagccagaccaacgtgtcccagagcaaggactccgacgtgtacatcaccgataagtgcgtgctggacatgcggagcatggacttcaagagcaactccgccgtggcctggtccaacaagtccgatttcgcctgcgccaacgccttcaacaacagcattatccccgaggacacattcttcccaagccccgagagcagctgcgacgtgaagctggtggaaaagagcttcgagacagacaccaacctgaacttccagatcctgtacgagatcctgctgggcaaggccaccctgtacgccgtgctggtgtctgccctggtgctgatggctatggtcaagcggaaggacagccggggacgcgccaagagaagcggatctggcgtgaagcagaccctgaatttcgacctgctgaagctggctggcgacgtggaatccaacccaggccctactagtatggactggatttggcgcatccttttccttgtcggcgctgctaccggcgcgcattccttcgaagaagttcagctgcttgaatcaggcggcggactggttcaacctggcggatctctgagactgagctgtgccgccagcggctacagcatcacaagcgactatgcctggaactgggtccgacaggcccctggcaaaggactggaatgggtgtcctacatcagcaacagcggcagcaccagctacaaccccagcctgaagtcccggttcaccatcagcagagacaacagcaagaacaccctgtacctccagatgaacagcctgagagctgaggacaccgccgtgtattattgcgccaaagagcggaactacgactacgacgattactactacgctatggactactggggccagggaaccctggtcacagtctcttctacgcgtgaggacctgaagaacgtgttcccacctgaggtggccgtgttcgagcctagcgaggccgagatcagccacacccagaaagccaccctcgtgtgcctggctaccggcttctaccccgaccatgtggaactgtcttggtgggtcaacggcaaagaggtgcacagcggcgtgtgtaccgacccccagccactgaaagaacagcccgccctgaacgacagccggtactgcctgagcagcagactgagagtgtccgccaccttctggcagaacccccggaaccacttcagatgccaggtgcagttctacggcctgagcgagaacgacgagtggacccaggacagagccaagcccgtgacccagatcgtgtctgccgaagcctggggcagagccgattgcggctttaccagcgagagctaccagcagggcgtgctgagcgccaccaacctgagcgtgatcggcttcagaatcctgctgctgaaagtggccggctttaacctgctgatgaccctgcggctgtggtccagc

SEQ ID NO: 5615 - DNA, 2295 bp, synthetic construct
  source 1..2295: mol_type = other DNA
atggccttaccagtgaccgccttgctcctgccgctggccttgctgctccacgccgccaggccggaagtgcagctggttgaatctggcggaggactggttcagcctggcggatctctgagactgtcttgtgccgccagcggcttcagcttcagcgacttttggatgagctgggtccgacaggcccctggcaaaggacttgaatgggtcgccacaatcagccaggccggcagcgagaaggactacgtggactctgtgaagggcagattcaccatcagccgggacaacgccaagaagtccctgtacctccagatgaacagcctgagagccgaggacaccgccgtgtactattgtgcctctggcgtgtacagcttcgactacagaggccagggcaccctggtcacagtctcttctggtaccggcggaggcggatctggcggcggaggtagcggtggcggaggatctgaattcgacgtggtcatgacacagagccctctgagcctgcctgtgacacttggacagcctgccagcatcagctgtagaagcagccagagcctgctgcacagcagcggcaatacctacctggaatggtatcagcagaggcccggacagagccccagacctctgatctacaagatcagcacccggttcagcggcgtgcccgatagattttctggctctggcagcggcaccgacttcaccctgaagattagcagagtggaagccgaggacgtgggcgtgtactactgcttccaaggcagccacgtgccatacacctttggcggcggaacaaaggtggaaatcaagagactcgagatccagaaccctgatcctgccgtgtaccagctgcgggatagcaagagcagcgacaagagcgtgtgtctgttcaccgacttcgacagccagaccaacgtgtcccagagcaaggactccgacgtgtacatcaccgataagtgcgtgctggacatgcggagcatggacttcaagagcaactccgccgtggcctggtccaacaagtccgatttcgcctgcgccaacgccttcaacaacagcattatccccgaggacacattcttcccaagccccgagagcagctgcgacgtgaagctggtggaaaagagcttcgagacagacaccaacctgaacttccagatcctgtacgagatcctgctgggcaaggccaccctgtacgccgtgctggtgtctgccctggtgctgatggctatggtcaagcggaaggacagccggggacgcgccaagagaagcggatctggcgtgaagcagaccctgaatttcgacctgctgaagctggctggcgacgtggaatccaacccaggccctactagtatggactggatttggcgcatccttttccttgtcggcgctgctaccggcgcgcattccttcgaacaagttcagctggttcagagcggagccgaagtgaagaaacctggggcctctgtgaaggtgtcctgcaaagcctctggcctgaccatcgaggactactacatgcactgggtccgacaggcccctggacaaggacttgaatggatgggctggatcgaccccgagaacggcgatacagagtacggccctaagttccagggcagagtgaccatgaccagagacaccagcatcaacaccgcctacatggaactgagccggctgagatccgatgacaccgccgtgtactattgcgccgtgcacaatgcccactacggcacttggtttgcctattggggccagggcacactggtcaccgttagctctacgcgtgaggacctgaagaacgtgttcccacctgaggtggccgtgttcgagcctagcgaggccgagatcagccacacccagaaagccaccctcgtgtgcctggctaccggcttctaccccgaccatgtggaactgtcttggtgggtcaacggcaaagaggtgcacagcggcgtgtgtaccgacccccagccactgaaagaacagcccgccctgaacgacagccggtactgcctgagcagcagactgagagtgtccgccaccttctggcagaacccccggaaccacttcagatgccaggtgcagttctacggcctgagcgagaacgacgagtggacccaggacagagccaagcccgtgacccagatcgtgtctgccgaagcctggggcagagccgattgcggctttaccagcgagagctaccagcagggcgtgctgagcgccaccaacctgagcgtgatcggcttcagaatcctgctgctgaaagtggccggctttaacctgctgatgaccctgcggctgtggtccagc

SEQ ID NO: 5616 - DNA, 2271 bp, synthetic construct
  source 1..2271: mol_type = other DNA
atggccttaccagtgaccgccttgctcctgccgctggccttgctgctccacgccgccaggccggaagtgcagctggttgaatctggcggaggactggttcagcctggcggatctctgagactgtcttgtgccgccagcggcttcagcttcagcgacttttggatgagctgggtccgacaggcccctggcaaaggacttgaatgggtcgccacaatcagccaggccggcagcgagaaggactacgtggactctgtgaagggcagattcaccatcagccgggacaacgccaagaagtccctgtacctccagatgaacagcctgagagccgaggacaccgccgtgtactattgtgcctctggcgtgtacagcttcgactacagaggccagggcaccctggtcacagtctcttctggtaccggcggaggcggatctggcggcggaggtagcggtggcggaggatctgaattcgacatccagatgacacagagccctagcagcctgtctgccagcgtgggagacagagtgaccatcacctgtagagccagcgagaacatctacagcaacctggcctggtatcagcagaagcctggcaaggcccctaagctgctgatctacgccgccaccaatctggctgatggcgtgccaagcagattttccggctctggcagcggcaccgatttcaccctgacaatatccagcctccagcctgaggacttcgccacctactactgccagcacttttggggcacccctacattcggccagggcaccaaggtggaaatcaagagaacagttctcgagatccagaaccctgatcctgccgtgtaccagctgcgggatagcaagagcagcgacaagagcgtgtgtctgttcaccgacttcgacagccagaccaacgtgtcccagagcaaggactccgacgtgtacatcaccgataagtgcgtgctggacatgcggagcatggacttcaagagcaactccgccgtggcctggtccaacaagtccgatttcgcctgcgccaacgccttcaacaacagcattatccccgaggacacattcttcccaagccccgagagcagctgcgacgtgaagctggtggaaaagagcttcgagacagacaccaacctgaacttccagatcctgtacgagatcctgctgggcaaggccaccctgtacgccgtgctggtgtctgccctggtgctgatggctatggtcaagcggaaggacagccggggacgcgccaagagaagcggatctggcgtgaagcagaccctgaatttcgacctgctgaagctggctggcgacgtggaatccaacccaggccctactagtatggactggatttggcgcatccttttccttgtcggcgctgctaccggcgcgcattccttcgaagaagtgcagctggttgaatcaggtggcggcctggttcaacctggcggatctctgagactgagctgtgccgcctctggcttcagcctgacaaattacggcgtgcactgggtccgacaggcccctggaaaaggactggaatgggtgtccgtgatttggagcggcggcagcaccgattacaacgccgccttcatcagccggttcaccatcagcgccgacaccagcaagaataccgcctacctccagatgaactccctgagagccgaggacaccgccgtgtactattgcgccagagaactgatccacgctatggacaactggggccagggaaccctggtcacagtctcttctacgcgtgaggacctgaagaacgtgttcccacctgaggtggccgtgttcgagcctagcgaggccgagatcagccacacccagaaagccaccctcgtgtgcctggctaccggcttctaccccgaccatgtggaactgtcttggtgggtcaacggcaaagaggtgcacagcggcgtgtgtaccgacccccagccactgaaagaacagcccgccctgaacgacagccggtactgcctgagcagcagactgagagtgtccgccaccttctggcagaacccccggaaccacttcagatgccaggtgcagttctacggcctgagcgagaacgacgagtggacccaggacagagccaagcccgtgacccagatcgtgtctgccgaagcctggggcagagccgattgcggctttaccagcgagagctaccagcagggcgtgctgagcgccaccaacctgagcgtgatcggcttcagaatcctgctgctgaaagtggccggctttaacctgctgatgaccctgcggctgtggtccagc

SEQ ID NO: 5617 - DNA, 2292 bp, synthetic construct
  source 1..2292: mol_type = other DNA
atggccttaccagtgaccgccttgctcctgccgctggccttgctgctccacgccgccaggccggaagtgcagctggttgaatctggcggaggactggttcagcctggcggatctctgagactgtcttgtgccgccagcggcttcagcttcagcgacttttggatgagctgggtccgacaggcccctggcaaaggacttgaatgggtcgccacaatcagccaggccggcagcgagaaggactacgtggactctgtgaagggcagattcaccatcagccgggacaacgccaagaagtccctgtacctccagatgaacagcctgagagccgaggacaccgccgtgtactattgtgcctctggcgtgtacagcttcgactacagaggccagggcaccctggtcacagtctcttctggtaccggcggaggcggatctggcggcggaggtagcggtggcggaggatctgaattcgacttcgtgatgacacagagccctctgagcctgcctgtgacacctggcgaacctgccagcatcagctgtagaagcagccagagcatcgtgcacagcaacggcaacacctacctggaatggtatctccagaagcctggacagagcccacagctgctgatctacaaggtgtccaacagattcagcggcgtgcccgacagattttctggcagcggctctggcaccgacttcaccctgaagattagcagagtggaagccgaggacgtgggcgtgtactactgcttccaaggctctcacgtgcccctgacctttggacagggcaccaagctggaaatcaagagactcgagatccagaaccctgatcctgccgtgtaccagctgcgggatagcaagagcagcgacaagagcgtgtgtctgttcaccgacttcgacagccagaccaacgtgtcccagagcaaggactccgacgtgtacatcaccgataagtgcgtgctggacatgcggagcatggacttcaagagcaactccgccgtggcctggtccaacaagtccgatttcgcctgcgccaacgccttcaacaacagcattatccccgaggacacattcttcccaagccccgagagcagctgcgacgtgaagctggtggaaaagagcttcgagacagacaccaacctgaacttccagatcctgtacgagatcctgctgggcaaggccaccctgtacgccgtgctggtgtctgccctggtgctgatggctatggtcaagcggaaggacagccggggacgcgccaagagaagcggatctggcgtgaagcagaccctgaatttcgacctgctgaagctggctggcgacgtggaatccaacccaggccctactagtatggactggatttggcgcatccttttccttgtcggcgctgctaccggcgcgcattccttcgaagaagtgcagctggttgaaagcggagccgaagtgaagaaacctggggcctctgtgaaggtgtcctgcaaggccagcggctacacctttaccagctactggattcactgggtccgacaggcccctggacaaggacttgagtggatgggcgagaacgacccctccaacggcaggaccaactacaacgagaagttcaagaaccgcgtgaccctgaccgtggacaccagcatctctaccgcctacatggaactgagccggctgagatccgatgacaccgccgtgtactattgcgccagaggacccaactacttttacagcatggactactggggccagggcacaatggtcaccgttagctctacgcgtgaggacctgaagaacgtgttcccacctgaggtggccgtgttcgagcctagcgaggccgagatcagccacacccagaaagccaccctcgtgtgcctggctaccggcttctaccccgaccatgtggaactgtcttggtgggtcaacggcaaagaggtgcacagcggcgtgtgtaccgacccccagccactgaaagaacagcccgccctgaacgacagccggtactgcctgagcagcagactgagagtgtccgccaccttctggcagaacccccggaaccacttcagatgccaggtgcagttctacggcctgagcgagaacgacgagtggacccaggacagagccaagcccgtgacccagatcgtgtctgccgaagcctggggcagagccgattgcggctttaccagcgagagctaccagcagggcgtgctgagcgccaccaacctgagcgtgatcggcttcagaatcctgctgctgaaagtggccggctttaacctgctgatgaccctgcggctgtggtccagc

SEQ ID NO: 5618 - DNA, 2271 bp, synthetic construct
  source 1..2271: mol_type = other DNA
atggccttaccagtgaccgccttgctcctgccgctggccttgctgctccacgccgccaggccggaagtgcagctggttgaatctggcggaggactggttcagcctggcggatctctgagactgtcttgtgccgccagcggcttcagcttcagcgacttttggatgagctgggtccgacaggcccctggcaaaggacttgaatgggtcgccacaatcagccaggccggcagcgagaaggactacgtggactctgtgaagggcagattcaccatcagccgggacaacgccaagaagtccctgtacctccagatgaacagcctgagagccgaggacaccgccgtgtactattgtgcctctggcgtgtacagcttcgactacagaggccagggcaccctggtcacagtctcttctggtaccggcggaggcggatctggcggcggaggtagcggtggcggaggatctgaattcgacatccagctgactcagagccctagctttctgagcgccagcgtgggcgacagagtgaccatcacatgtagcgccagatccagcatcagcttcatgtactggtatcagcagaagcccggcaaggcccctaagctgctgatctacgacaccagcaatctggcctctggcgtgcccagcagattttctggaagcggcagcggcaccgagttcaccctgacaatctctagcctggaagccgaggatgccgccacctactattgccagcagtggtccagctatcccctgacatttggacagggcaccaagctggaaatcaaactcgagatccagaaccctgatcctgccgtgtaccagctgcgggatagcaagagcagcgacaagagcgtgtgtctgttcaccgacttcgacagccagaccaacgtgtcccagagcaaggactccgacgtgtacatcaccgataagtgcgtgctggacatgcggagcatggacttcaagagcaactccgccgtggcctggtccaacaagtccgatttcgcctgcgccaacgccttcaacaacagcattatccccgaggacacattcttcccaagccccgagagcagctgcgacgtgaagctggtggaaaagagcttcgagacagacaccaacctgaacttccagatcctgtacgagatcctgctgggcaaggccaccctgtacgccgtgctggtgtctgccctggtgctgatggctatggtcaagcggaaggacagccggggacgcgccaagagaagcggatctggcgtgaagcagaccctgaatttcgacctgctgaagctggctggcgacgtggaatccaacccaggccctactagtatggactggatttggcgcatccttttccttgtcggcgctgctaccggcgcgcattccttcgaacaggttcagctggttcagtctggggccgaagtgaagaaacctggggcctctgtgaaggtgtcctgcaaggcttccggctacacctttaccggctcttggatgaactgggtccgacaggctcctggacagggactcgaatggatcggcagaatctatcctggcgacggcgagacaaactacaacggcaagttcaaggaccgcgtgacaatcaccgccgacaagagcacaagcaccgcctacatggaactgagcagcctgcggagcgaagataccgccgtgtactactgcgcccggatctacggcaacaacgtgtacttcgatgtgtggggccagggcacaaccgtgacagtctcttctacgcgtgaggacctgaagaacgtgttcccacctgaggtggccgtgttcgagcctagcgaggccgagatcagccacacccagaaagccaccctcgtgtgcctggctaccggcttctaccccgaccatgtggaactgtcttggtgggtcaacggcaaagaggtgcacagcggcgtgtgtaccgacccccagccactgaaagaacagcccgccctgaacgacagccggtactgcctgagcagcagactgagagtgtccgccaccttctggcagaacccccggaaccacttcagatgccaggtgcagttctacggcctgagcgagaacgacgagtggacccaggacagagccaagcccgtgacccagatcgtgtctgccgaagcctggggcagagccgattgcggctttaccagcgagagctaccagcagggcgtgctgagcgccaccaacctgagcgtgatcggcttcagaatcctgctgctgaaagtggccggctttaacctgctgatgaccctgcggctgtggtccagc

SEQ ID NO: 5619 - DNA, 2295 bp, synthetic construct
  source 1..2295: mol_type = other DNA
atggccttaccagtgaccgccttgctcctgccgctggccttgctgctccacgccgccaggccggaagtgcagctggttgaatctggcggaggactggttcagcctggcggatctctgagactgtcttgtgccgccagcggcttcagcttcagcgacttttggatgagctgggtccgacaggcccctggcaaaggacttgaatgggtcgccacaatcagccaggccggcagcgagaaggactacgtggactctgtgaagggcagattcaccatcagccgggacaacgccaagaagtccctgtacctccagatgaacagcctgagagccgaggacaccgccgtgtactattgtgcctctggcgtgtacagcttcgactacagaggccagggcaccctggtcacagtctcttctggtaccggcggaggcggatctggcggcggaggtagcggtggcggaggatctgaattccagctggtgctgacacagtctccaagcgcctctgccagcctgggatctagcgtgaagctgacctgtacactgagcagcggccacaagaccgacaccatcgactggtatcagcagcagcctggcaaggcccctagatacctgatgaagctggaaggcagcggcagctacaacaaaggctctggcgtgcccgatagattcagcggcagttcttctggcgctgattggtatctgaccatcagcagcctccagagcgaggacgaggccgattactactgcggcacagactaccccggcaactacctgtttggcggcggaacacagctgacagtgcttggcctcgagatccagaaccctgatcctgccgtgtaccagctgcgggatagcaagagcagcgacaagagcgtgtgtctgttcaccgacttcgacagccagaccaacgtgtcccagagcaaggactccgacgtgtacatcaccgataagtgcgtgctggacatgcggagcatggacttcaagagcaactccgccgtggcctggtccaacaagtccgatttcgcctgcgccaacgccttcaacaacagcattatccccgaggacacattcttcccaagccccgagagcagctgcgacgtgaagctggtggaaaagagcttcgagacagacaccaacctgaacttccagatcctgtacgagatcctgctgggcaaggccaccctgtacgccgtgctggtgtctgccctggtgctgatggctatggtcaagcggaaggacagccggggacgcgccaagagaagcggatctggcgtgaagcagaccctgaatttcgacctgctgaagctggctggcgacgtggaatccaacccaggccctactagtatggactggatttggcgcatccttttccttgtcggcgctgctaccggcgcgcattccttcgaacaagaacagctggttgaaagcggcggaggactggttcaacctggcggttctctgagactgagctgtgccgccagcggcttcaccttcagcgactactacatgagctggatcagacaggccccaggcaaaggactggaatgggtcgccacaatctaccccagcagcggcaagacctactacgccgattctgccaagggcagactgaccatctccagcgacaacgccaaggacagcctgtacctccagatgaacagcctgagagccgaggacaccgccgtgtactactgcaccagagatagctacgccgacgacgccgctctgtttgacatttggggccagggcaccaccgtgaccgtttcttctacgcgtgaggacctgaagaacgtgttcccacctgaggtggccgtgttcgagcctagcgaggccgagatcagccacacccagaaagccaccctcgtgtgcctggctaccggcttctaccccgaccatgtggaactgtcttggtgggtcaacggcaaagaggtgcacagcggcgtgtgtaccgacccccagccactgaaagaacagcccgccctgaacgacagccggtactgcctgagcagcagactgagagtgtccgccaccttctggcagaacccccggaaccacttcagatgccaggtgcagttctacggcctgagcgagaacgacgagtggacccaggacagagccaagcccgtgacccagatcgtgtctgccgaagcctggggcagagccgattgcggctttaccagcgagagctaccagcagggcgtgctgagcgccaccaacctgagcgtgatcggcttcagaatcctgctgctgaaagtggccggctttaacctgctgatgaccctgcggctgtggtccagc

SEQ ID NO: 5620 - DNA, 2271 bp, synthetic construct; identical to SEQ ID NO: 5616
  source 1..2271: mol_type = other DNA

SEQ ID NO: 5621 - DNA, 2292 bp, synthetic construct; identical to SEQ ID NO: 5617
  source 1..2292: mol_type = other DNA

SEQ ID NO: 5622 - DNA, 2271 bp, synthetic construct; identical to SEQ ID NO: 5618
  source 1..2271: mol_type = other DNA

SEQ ID NO: 5623 - DNA, 2295 bp, synthetic construct; identical to SEQ ID NO: 5619
  source 1..2295: mol_type = other DNA

SEQ ID NO: 5624 - DNA, 2292 bp, synthetic construct
  source 1..2292: mol_type = other DNA
atggccttaccagtgaccgccttgctcctgccgctggccttgctgctccacgccgccaggccggaagtgcagctggttgaatctggcggaggactggttcagcctggcggatctctgagactgtcttgtgccgccagcggcttcagcttcagcgacttttggatgagctgggtccgacaggcccctggcaaaggacttgaatgggtcgccacaatcagccaggccggcagcgagaaggactacgtggactctgtgaagggcagattcaccatcagccgggacaacgccaagaagtccctgtacctccagatgaacagcctgagagccgaggacaccgccgtgtactattgtgcctctggcgtgtacagcttcgactacagaggccagggcaccctggtcacagtctcttctggtaccggcggaggcggatctggcggcggaggtagcggtggcggaggatctgaattcgatatccagctcactcaaagcccctctagtctctctgcctcagtgggggatcgggtcagttttacttgtcaagcttcacaggatatcaacaacttccttaattggtatcagcagaagccaggaaaagcacccaagctgctcatctatgatgcctcaaatttggagacgggtgttcccagtcgattctctgggtcagggtccgggaccgactttacgtttacgatctcctctctgcagcccgaagacatcgccacatactattgtcaacagtacggcaacttgcctttcacatttgggggcgggactaaggttgaaatcaagaggctcgagatccagaaccctgatcctgccgtgtaccagctgcgggatagcaagagcagcgacaagagcgtgtgtctgttcaccgacttcgacagccagaccaacgtgtcccagagcaaggactccgacgtgtacatcaccgataagtgcgtgctggacatgcggagcatggacttcaagagcaactccgccgtggcctggtccaacaagtccgatttcgcctgcgccaacgccttcaacaacagcattatccccgaggacacattcttcccaagccccgagagcagctgcgacgtgaagctggtggaaaagagcttcgagacagacaccaacctgaacttccagatcctgtacgagatcctgctgggcaaggccaccctgtacgccgtgctggtgtctgccctggtgctgatggctatggtcaagcggaaggacagccggggacgcgccaagagaagcggatctggcgtgaagcagaccctgaatttcgacctgctgaagctggctggcgacgtggaatccaacccaggccctactagtatggactggatttggcgcatccttttccttgtcggcgctgctaccggcgcgcattccttcgaacaggtacagctgcaggaatctgggcccggacttgtcaagccaagtcagacactttctcttacatgtaccgtgagcggcggaagtataagcagtggaggcttttactggtcttggatacggcagcacccaggcaaaggcttggagtggattggatacattcatcattcaggatctacacactataatccatcccttaagtcccgggtcaccattagcattgatacgtctaagaatctgttcagtctcaggctgtcctccgtcactgctgccgacacagccgtgtactactgcgcctccttggtttactgcggaggcgactgttatagcggctttgattattgggggcaggggaccctcgtaaccgtgagctctacgcgtgaggacctgaagaacgtgttcccacctgaggtggccgtgttcgagcctagcgaggccgagatcagccacacccagaaagccaccctcgtgtgcctggctaccggcttctaccccgaccatgtggaactgtcttggtgggtcaacggcaaagaggtgcacagcggcgtgtgtaccgacccccagccactgaaagaacagcccgccctgaacgacagccggtactgcctgagcagcagactgagagtgtccgccaccttctggcagaacccccggaaccacttcagatgccaggtgcagttctacggcctgagcgagaacgacgagtggacccaggacagagccaagcccgtgacccagatcgtgtctgccgaagcctggggcagagccgattgcggctttaccagcgagagctaccagcagggcgtgctgagcgccaccaacctgagcgtgatcggcttcagaatcctgctgctgaaagtggccggctttaacctgctgatgaccctgcggctgtggtccagc

SEQ ID NO: 5625 - DNA, 2280 bp, synthetic construct
  source 1..2280: mol_type = other DNA
atggccttaccagtgaccgccttgctcctgccgctggccttgctgctccacgccgccaggccggaagtgcagctggttgaatctggcggaggactggttcagcctggcggatctctgagactgtcttgtgccgccagcggcttcagcttcagcgacttttggatgagctgggtccgacaggcccctggcaaaggacttgaatgggtcgccacaatcagccaggccggcagcgagaaggactacgtggactctgtgaagggcagattcaccatcagccgggacaacgccaagaagtccctgtacctccagatgaacagcctgagagccgaggacaccgccgtgtactattgtgcctctggcgtgtacagcttcgactacagaggccagggcaccctggtcacagtctcttctggtaccggcggaggcggatctggcggcggaggtagcggtggcggaggatctgaattcgacattcagatgacacagagccctagcagcctgagcgcctctgtgggagacagagtgaccatcacatgcaagagcagccagagcgtgctgtactccagcaatcagaagaactacctggcctggttccagcagaagcctggcaaggctcctaagctgctgatctactgggccagcaccagagaaagcggcgtgccaagcagattttctggcagcggctctggcaccgacttcaccctgacaatatccagcctccagcctgaggacttcgccacctacttttgccaccagtacctgagcagctacacattcggacagggcaccaaggtggaaatcaagcggctcgagatccagaaccctgatcctgccgtgtaccagctgcgggatagcaagagcagcgacaagagcgtgtgtctgttcaccgacttcgacagccagaccaacgtgtcccagagcaaggactccgacgtgtacatcaccgataagtgcgtgctggacatgcggagcatggacttcaagagcaactccgccgtggcctggtccaacaagtccgatttcgcctgcgccaacgccttcaacaacagcattatccccgaggacacattcttcccaagccccgagagcagctgcgacgtgaagctggtggaaaagagcttcgagacagacaccaacctgaacttccagatcctgtacgagatcctgctgggcaaggccaccctgtacgccgtgctggtgtctgccctggtgctgatggctatggtcaagcggaaggacagccggggacgcgccaagagaagcggatctggcgtgaagcagaccctgaatttcgacctgctgaagctggctggcgacgtggaatccaacccaggccctactagtatggactggatttggcgcatccttttccttgtcggcgctgctaccggcgcgcattccttcgaagaggtgcagctggttgaatctggcggaggactggttcagcctggcggatctctgagactgtcttgtgccgccagcggctacaccttcaccacctattggatgcactgggtccgacaggcccctggcaaaggacttgagtgggtcggatatatcaggcccagcaccggctacacagagtacaaccagaagttcaaggaccgcttcaccatcagcgccgacaccagcaagaataccgcctacctccagatgaacagcctgagagccgaggacaccgccgtgtactactgtgccagatccagatggctgctggactattggggccagggcacactggttacagtttctacgcgtgaggacctgaagaacgtgttcccacctgaggtggccgtgttcgagcctagcgaggccgagatcagccacacccagaaagccaccctcgtgtgcctggctaccggcttctaccccgaccatgtggaactgtcttggtgggtcaacggcaaagaggtgcacagcggcgtgtgtaccgacccccagccactgaaagaacagcccgccctgaacgacagccggtactgcctgagcagcagactgagagtgtccgccaccttctggcagaacccccggaaccacttcagatgccaggtgcagttctacggcctgagcgagaacgacgagtggacccaggacagagccaagcccgtgacccagatcgtgtctgccgaagcctggggcagagccgattgcggctttaccagcgagagctaccagcagggcgtgctgagcgccaccaacctgagcgtgatcggcttcagaatcctgctgctgaaagtggccggctttaacctgctgatgaccctgcggctgtggtccagc

SEQ ID NO: 5626 - DNA, 2271 bp, synthetic construct
  source 1..2271: mol_type = other DNA
atggccttaccagtgaccgccttgctcctgccgctggccttgctgctccacgccgccaggccggaagtgcagctggttgaatctggcggaggactggttcagcctggcggatctctgagactgtcttgtgccgccagcggcttcagcttcagcgacttttggatgagctgggtccgacaggcccctggcaaaggacttgaatgggtcgccacaatcagccaggccggcagcgagaaggactacgtggactctgtgaagggcagattcaccatcagccgggacaacgccaagaagtccctgtacctccagatgaacagcctgagagccgaggacaccgccgtgtactattgtgcctctggcgtgtacagcttcgactacagaggccagggcaccctggtcacagtctcttctggtaccggcggaggcggatctggcggcggaggtagcggtggcggaggatctgaattcgacatccagatgacacagagccctagcagcctgtctgccagcgtgggagacagagtgaccatcacctgtagagccagccaggacatcagcaactacctgaactggtatcagcagaagcccggcaaggcccctaagctgctgatctactacaccagcagactgcacagcggcgtgcccagcagattttctggctctggcagcggcaccgacttcaccctgacaatatctagcctccagcctgaggacttcgccacctactattgccagcagggcaacaccctgccttacacatttggacagggcaccaaggtggaaatcaagagactcgagatccagaaccctgatcctgccgtgtaccagctgcgggatagcaagagcagcgacaagagcgtgtgtctgttcaccgacttcgacagccagaccaacgtgtcccagagcaaggactccgacgtgtacatcaccgataagtgcgtgctggacatgcggagcatggacttcaagagcaactccgccgtggcctggtccaacaagtccgatttcgcctgcgccaacgccttcaacaacagcattatccccgaggacacattcttcccaagccccgagagcagctgcgacgtgaagctggtggaaaagagcttcgagacagacaccaacctgaacttccagatcctgtacgagatcctgctgggcaaggccaccctgtacgccgtgctggtgtctgccctggtgctgatggctatggtcaagcggaaggacagccggggacgcgccaagagaagcggatctggcgtgaagcagaccctgaatttcgacctgctgaagctggctggcgacgtggaatccaacccaggccctactagtatggactggatttggcgcatccttttccttgtcggcgctgctaccggcgcgcattccttcgaagaagtgcagctggttgaatcaggtggcggcctggttcaacctggcggatctctgagactgagctgtgccgccagcggcttcaccttcagcgactactttatgagctgggtccgacaggcccctggcaaaggacttgaatgggtcgccaccatcagcaatggcggcacctacacttactaccccgacagcgtgaagggcagattcaccatctccagagacaacagcaagaacaccctgtacctccagatgaactccctgagagccgaggacaccgccgtgtactactgcgccagattcgacggctacatcttcgactattggggccagggcaccctggtcacagtctcttctacgcgtgaggacctgaagaacgtgttcccacctgaggtggccgtgttcgagcctagcgaggccgagatcagccacacccagaaagccaccctcgtgtgcctggctaccggcttctaccccgaccatgtggaactgtcttggtgggtcaacggcaaagaggtgcacagcggcgtgtgtaccgacccccagccactgaaagaacagcccgccctgaacgacagccggtactgcctgagcagcagactgagagtgtccgccaccttctggcagaacccccggaaccacttcagatgccaggtgcagttctacggcctgagcgagaacgacgagtggacccaggacagagccaagcccgtgacccagatcgtgtctgccgaagcctggggcagagccgattgcggctttaccagcgagagctaccagcagggcgtgctgagcgccaccaacctgagcgtgatcggcttcagaatcctgctgctgaaagtggccggctttaacctgctgatgaccctgcggctgtggtccagc

SEQ ID NO: 5627 - DNA, 2673 bp, synthetic construct
  source 1..2673: mol_type = other DNA
atggccttaccagtgaccgccttgctcctgccgctggccttgctgctccacgccgccaggccggaagtgcagctggttgaatctggcggaggactggttcagcctggcggatctctgagactgtcttgtgccgccagcggcttcagcttcagcgacttttggatgagctgggtccgacaggcccctggcaaaggacttgaatgggtcgccacaatcagccaggccggcagcgagaaggactacgtggactctgtgaagggcagattcaccatcagccgggacaacgccaagaagtccctgtacctccagatgaacagcctgagagccgaggacaccgccgtgtactattgtgcctctggcgtgtacagcttcgactacagaggccagggcaccctggtcacagtctcttctggtaccggcggaggcggatctggcggcggaggtagcggtggcggaggatctgaattcgacatccagatgacacagactacatcctccctgtctgcctctctgggagacagagtcaccatcagttgcagggcaagtcaggacattagtaagtacctgaactggtatcagcagaaaccagatggaactgttaaactcctgatctaccatacatcaagattacactcaggagtcccatcaaggttcagtggcagtgggtctggaacagattattctctcaccattagcaacctggagcaagaagatattgccacttacttttgccaacagggtaatacgcttccgtacacgttcggaggggggaccaagctggagatcacactcgaggacctgaagaacgtgttcccacctgaggtggccgtgttcgagcctagcgaggccgagatcagccacacccagaaagccaccctcgtgtgcctggctaccggcttctaccccgaccatgtggaactgtcttggtgggtcaacggcaaagaggtgcacagcggcgtgtgtaccgacccccagccactgaaagaacagcccgccctgaacgacagccggtactgcctgagcagcagactgagagtgtccgccaccttctggcagaacccccggaaccacttcagatgccaggtgcagttctacggcctgagcgagaacgacgagtggacccaggacagagccaagcccgtgacccagatcgtgtctgccgaagcctggggcagagccgattgcggctttaccagcgagagctaccagcagggcgtgctgagcgccaccaacctgagcgtgatcggcttcagaatcctgctgctgaaagtggccggctttaacctgctgatgaccctgcggctgtggtccagcagggccaagcgatctggatctggagcaacaaacttctcactactcaaacaagcaggtgacgtggaggagaatcccgggcctactagtatggactggatttggcgcatccttttccttgtcggcgctgctaccggcgcgcattccgggccccagctccagctgcaagagtctggacctggcctggtcaagcctagcgagacactgagcctgacctgtaccgtgtccggcgatagcatcagcagcggcgattactactggggctggatcagacagcctcctggcaaaggactggaatggatcggccacatctactacagcggcgtgacctactacaaccccagcctgaagtccagagtgaccatcagcgtggacaccagccggaaccagttctccctgaagctgtctagcgtgacagccgccgataccgccgtgtactactgcaccagagaggacagcagcaactggcggagtagaggccagggaacactggtcacagttagctctggatccggcggaggcggaagtggaggcggaggatctggcggcggaggctctttcgaagtgaaactgcaggagtcaggacctggcctggtggcgccctcacagagcctgtccgtcacatgcactgtctcaggggtctcattacccgactatggtgtaagctggattcgccagcctccacgaaagggtctggagtggctgggagtaatatggggtagtgaaaccacatactataattcagctctcaaatccagactgaccatcatcaaggacaactccaagagccaagttttcttaaaaatgaacagtctgcaaactgatgacacagccatttactactgtgccaaacattattactacggtggtagctatgctatggactactggggccaaggaacctcagtcaccgtctcctcaacgcgtatccagaaccctgatcctgccgtgtaccagctgcgggatagcaagagcagcgacaagagcgtgtgtctgttcaccgacttcgacagccagaccaacgtgtcccagagcaaggactccgacgtgtacatcaccgataagtgcgtgctggacatgcggagcatggacttcaagagcaactccgccgtggcctggtccaacaagtccgatttcgcctgcgccaacgccttcaacaacagcattatccccgaggacacattcttcccaagccccgagagcagctgcgacgtgaagctggtggaaaagagcttcgagacagacaccaacctgaacttccagatcctgtacgagatcctgctgggcaaggccaccctgtacgccgtgctggtgtctgccctggtgctgatggctatggtcaagcggaaggacagccgggga

SEQ ID NO: 5628 - DNA, 2676 bp, synthetic construct
  source 1..2676: mol_type = other DNA
atggccttaccagtgaccgccttgctcctgccgctggccttgctgctccacgccgccaggccggaagtgcagctggttgaatctggcggaggactggttcagcctggcggatctctgagactgtcttgtgccgccagcggcttcagcttcagcgacttttggatgagctgggtccgacaggcccctggcaaaggacttgaatgggtcgccacaatcagccaggccggcagcgagaaggactacgtggactctgtgaagggcagattcaccatcagccgggacaacgccaagaagtccctgtacctccagatgaacagcctgagagccgaggacaccgccgtgtactattgtgcctctggcgtgtacagcttcgactacagaggccagggcaccctggtcacagtctcttctggtaccggcggaggcggatctggcggcggaggtagcggtggcggaggatctgaattcgagatcgtgatgacccagagccctgccaccctgtctctgagccctggcgaaagagccaccctgagctgtagagccagccaggacatcagcaagtacctgaactggtatcagcagaagcccggccaggcccccagactgctgatctaccacaccagcagactgcacagcggcatccccgccagattttctggctctggcagcggcaccgactacaccctgacaatcagcagcctccagcccgaggacttcgccgtgtacttctgtcagcaaggcaacaccctgccctacaccttcggccagggcaccaagctggaaatcaagctcgaggacctgaagaacgtgttcccacctgaggtggccgtgttcgagcctagcgaggccgagatcagccacacccagaaagccaccctcgtgtgcctggctaccggcttctaccccgaccatgtggaactgtcttggtgggtcaacggcaaagaggtgcacagcggcgtgtgtaccgacccccagccactgaaagaacagcccgccctgaacgacagccggtactgcctgagcagcagactgagagtgtccgccaccttctggcagaacccccggaaccacttcagatgccaggtgcagttctacggcctgagcgagaacgacgagtggacccaggacagagccaagcccgtgacccagatcgtgtctgccgaagcctggggcagagccgattgcggctttaccagcgagagctaccagcagggcgtgctgagcgccaccaacctgagcgtgatcggcttcagaatcctgctgctgaaagtggccggctttaacctgctgatgaccctgcggctgtggtccagcagggccaagcgatctggatctggagcaacaaacttctcactactcaaacaagcaggtgacgtggaggagaatcccgggcctactagtatggactggatttggcgcatccttttccttgtcggcgctgctaccggcgcgcattccgggccccagctccagctgcaagagtctggacctggcctggtcaagcctagcgagacactgagcctgacctgtaccgtgtccggcgatagcatcagcagcggcgattactactggggctggatcagacagcctcctggcaaaggactggaatggatcggccacatctactacagcggcgtgacctactacaaccccagcctgaagtccagagtgaccatcagcgtggacaccagccggaaccagttctccctgaagctgtctagcgtgacagccgccgataccgccgtgtactactgcaccagagaggacagcagcaactggcggagtagaggccagggaacactggtcacagttagctctggatccggcggaggcggaagtggaggcggaggatctggcggcggaggctctttcgaacaggtgcaactccaggaatctggccctggcctcgtgaagcccagcgagacactgagcctgacctgtaccgtgtccggcgtgtccctgcctgactatggcgtgtcctggatcagacagccccctggcaagggcctggaatggatcggagtgatttggggcagcgaaaccacctactacaacagctccctgaagtccagagtgaccatctccaaggacaactccaagaaccaggtgtccctgaagctgagcagcgtgacagccgccgacaccgccgtgtattactgcgccaagcactactactacggcggcagctacgctatggactactggggccagggaaccctcgtgaccgtgtctagtacgcgtatccagaaccctgatcctgccgtgtaccagctgcgggatagcaagagcagcgacaagagcgtgtgtctgttcaccgacttcgacagccagaccaacgtgtcccagagcaaggactccgacgtgtacatcaccgataagtgcgtgctggacatgcggagcatggacttcaagagcaactccgccgtggcctggtccaacaagtccgatttcgcctgcgccaacgccttcaacaacagcattatccccgaggacacattcttcccaagccccgagagcagctgcgacgtgaagctggtggaaaagagcttcgagacagacaccaacctgaacttccagatcctgtacgagatcctgctgggcaaggccaccctgtacgccgtgctggtgtctgccctggtgctgatggctatggtcaagcggaaggacagccgggga

SEQ ID NO: 5629 - DNA, 2679 bp, synthetic construct
  source 1..2679: mol_type = other DNA
atggccttaccagtgaccgccttgctcctgccgctggccttgctgctccacgccgccaggccggaagtgcagctggttgaatctggcggaggactggttcagcctggcggatctctgagactgtcttgtgccgccagcggcttcagcttcagcgacttttggatgagctgggtccgacaggcccctggcaaaggacttgaatgggtcgccacaatcagccaggccggcagcgagaaggactacgtggactctgtgaagggcagattcaccatcagccgggacaacgccaagaagtccctgtacctccagatgaacagcctgagagccgaggacaccgccgtgtactattgtgcctctggcgtgtacagcttcgactacagaggccagggcaccctggtcacagtctcttctggtaccggcggaggcggatctggcggcggaggtagcggtggcggaggatctgaattcgacgagatcgtgctgacacagagccccgccaccctgtcactgtctccaggcgaaagagccaccctgagctgtagcgccagcagcagcgtgtcctacatgcactggtatcagcagaagcccggccaggcccccagactgctgatctacgataccagcaagctggcctccggcatccccgccagattttctggcagcggctccggcaccgacttcaccctgacaatcagcagcctggaacccgaggacgtggccgtgtactactgttttcaaggcagcgtgtaccccttcaccttcggccagggcaccaagctggaaatcaagagactcgaggacctgaagaacgtgttcccacctgaggtggccgtgttcgagcctagcgaggccgagatcagccacacccagaaagccaccctcgtgtgcctggctaccggcttctaccccgaccatgtggaactgtcttggtgggtcaacggcaaagaggtgcacagcggcgtgtgtaccgacccccagccactgaaagaacagcccgccctgaacgacagccggtactgcctgagcagcagactgagagtgtccgccaccttctggcagaacccccggaaccacttcagatgccaggtgcagttctacggcctgagcgagaacgacgagtggacccaggacagagccaagcccgtgacccagatcgtgtctgccgaagcctggggcagagccgattgcggctttaccagcgagagctaccagcagggcgtgctgagcgccaccaacctgagcgtgatcggcttcagaatcctgctgctgaaagtggccggctttaacctgctgatgaccctgcggctgtggtccagcagggccaagcgatctggatctggagcaacaaacttctcactactcaaacaagcaggtgacgtggaggagaatcccgggcctactagtatggactggatttggcgcatccttttccttgtcggcgctgctaccggcgcgcattccgggccccagctccagctgcaagagtctggacctggcctggtcaagcctagcgagacactgagcctgacctgtaccgtgtccggcgatagcatcagcagcggcgattactactggggctggatcagacagcctcctggcaaaggactggaatggatcggccacatctactacagcggcgtgacctactacaaccccagcctgaagtccagagtgaccatcagcgtggacaccagccggaaccagttctccctgaagctgtctagcgtgacagccgccgataccgccgtgtactactgcaccagagaggacagcagcaactggcggagtagaggccagggaacactggtcacagttagctctggatccggcggaggcggaagtggaggcggaggatctggcggcggaggctctttcgaacaggtgcagctccaggaatctggccctggcctcgtgaagcctagccagaccctgagcctgacctgtaccgtgtctggcggcagcatcagcacaagcggcatgggcgtgggctggatcagacagcaccctggcaagggcctggaatggatcggccacatttggtgggacgacgacaagcggtacaaccccgccctgaagtccagagtgaccatcagcgtggacaccagcaagaaccagttcagcctgaagctgagcagcgtgacagccgccgataccgccgtgtattattgcgcccggatggaactgtggtcctactacttcgactactggggccagggaaccctcgtgaccgtgtctagtacgcgtatccagaaccctgatcctgccgtgtaccagctgcgggatagcaagagcagcgacaagagcgtgtgtctgttcaccgacttcgacagccagaccaacgtgtcccagagcaaggactccgacgtgtacatcaccgataagtgcgtgctggacatgcggagcatggacttcaagagcaactccgccgtggcctggtccaacaagtccgatttcgcctgcgccaacgccttcaacaacagcattatccccgaggacacattcttcccaagccccgagagcagctgcgacgtgaagctggtggaaaagagcttcgagacagacaccaacctgaacttccagatcctgtacgagatcctgctgggcaaggccaccctgtacgccgtgctggtgtctgccctggtgctgatggctatggtcaagcggaaggacagccgggga

SEQ ID NO: 5630 - DNA, 2673 bp, synthetic construct
  source 1..2673: mol_type = other DNA
atggccttaccagtgaccgccttgctcctgccgctggccttgctgctccacgccgccaggccggaagtgcagctggttgaatctggcggaggactggttcagcctggcggatctctgagactgtcttgtgccgccagcggcttcagcttcagcgacttttggatgagctgggtccgacaggcccctggcaaaggacttgaatgggtcgccacaatcagccaggccggcagcgagaaggactacgtggactctgtgaagggcagattcaccatcagccgggacaacgccaagaagtccctgtacctccagatgaacagcctgagagccgaggacaccgccgtgtactattgtgcctctggcgtgtacagcttcgactacagaggccagggcaccctggtcacagtctcttctggtaccggcggaggcggatctggcggcggaggtagcggtggcggaggatctgaattcgactacatccacgtgacacagagccctagcagcctgtccgtgtccatcggcgatagagtgaccatcaactgccagacctctcaaggcgtgggcagcgacctgcactggtatcagcacaaacctggcagagcccctaagctgctgatccaccatgccagctctgtggaagatggcgtgcccagcagattttccggcaccggatttcacaccagcttcaacctgacaatcaacgacctccaggccgacgacatcggcacctactactgtcaagtgctccagagcttcggcagaggcagcagactggatacaaaactcgaggacctgaagaacgtgttcccacctgaggtggccgtgttcgagcctagcgaggccgagatcagccacacccagaaagccaccctcgtgtgcctggctaccggcttctaccccgaccatgtggaactgtcttggtgggtcaacggcaaagaggtgcacagcggcgtgtgtaccgacccccagccactgaaagaacagcccgccctgaacgacagccggtactgcctgagcagcagactgagagtgtccgccaccttctggcagaacccccggaaccacttcagatgccaggtgcagttctacggcctgagcgagaacgacgagtggacccaggacagagccaagcccgtgacccagatcgtgtctgccgaagcctggggcagagccgattgcggctttaccagcgagagctaccagcagggcgtgctgagcgccaccaacctgagcgtgatcggcttcagaatcctgctgctgaaagtggccggctttaacctgctgatgaccctgcggctgtggtccagcagggccaagcgatctggatctggagcaacaaacttctcactactcaaacaagcaggtgacgtggaggagaatcccgggcctactagtatggactggatttggcgcatccttttccttgtcggcgctgctaccggcgcgcattccgggccccagctccagctgcaagagtctggacctggcctggtcaagcctagcgagacactgagcctgacctgtaccgtgtccggcgatagcatcagcagcggcgattactactggggctggatcagacagcctcctggcaaaggactggaatggatcggccacatctactacagcggcgtgacctactacaaccccagcctgaagtccagagtgaccatcagcgtggacaccagccggaaccagttctccctgaagctgtctagcgtgacagccgccgataccgccgtgtactactgcaccagagaggacagcagcaactggcggagtagaggccagggaacactggtcacagttagctctggatccggcggaggcggaagtggaggcggaggatctggcggcggaggctctttcgaaagggcacacctggtgcagtctggcaccgccatgaagaaacctggcgcttccgtcagagtgtcctgtcagacaagcggctacaccttcacagcccacatcctgttctggttcagacaggccccaggcagaggactggaatgggtcggatggatcaagccccagtacggggccgtgaatttcggcggaggcttcagagacagagtgaccctgaccagggacgtgtaccgggaaatcgcctacatggacatccggggcctgaagcctgatgacaccgccgtgtactactgcgccagggatagaagctacggcgacagctcttgggctctcgatgcttggggacagggcacaacagtggtggtgtctgctacgcgtatccagaaccctgatcctgccgtgtaccagctgcgggatagcaagagcagcgacaagagcgtgtgtctgttcaccgacttcgacagccagaccaacgtgtcccagagcaaggactccgacgtgtacatcaccgataagtgcgtgctggacatgcggagcatggacttcaagagcaactccgccgtggcctggtccaacaagtccgatttcgcctgcgccaacgccttcaacaacagcattatccccgaggacacattcttcccaagccccgagagcagctgcgacgtgaagctggtggaaaagagcttcgagacagacaccaacctgaacttccagatcctgtacgagatcctgctgggcaaggccaccctgtacgccgtgctggtgtctgccctggtgctgatggctatggtcaagcggaaggacagccgggga

SEQ ID NO: 5631 - DNA, 2703 bp, synthetic construct
  source 1..2703: mol_type = other DNA
atggccttaccagtgaccgccttgctcctgccgctggccttgctgctccacgccgccaggccggaagtgcagctggttgaatctggcggaggactggttcagcctggcggatctctgagactgtcttgtgccgccagcggcttcagcttcagcgacttttggatgagctgggtccgacaggcccctggcaaaggacttgaatgggtcgccacaatcagccaggccggcagcgagaaggactacgtggactctgtgaagggcagattcaccatcagccgggacaacgccaagaagtccctgtacctccagatgaacagcctgagagccgaggacaccgccgtgtactattgtgcctctggcgtgtacagcttcgactacagaggccagggcaccctggtcacagtctcttctggtaccggcggaggcggatctggcggcggaggtagcggtggcggaggatctgaattcgacgtgcagatgatccagacccccgatagcctggccgtgtccctgggacagagagccaccatctcttgcagagccagcgagagcgtggacaactacggcatcagcttcatgcactggtatcagcagaagcccggccagagccccaagctgctgatctacagagcctccaacctggaaagcggcatccccgccagattttccggcagcggcagcagaaccgacttcaccctgaccatcaaccccgtggaaaccgacgacgtggcaacctactactgccagcagaacaacaaggacccccccacctttggcggaggcaccaagctggaaatcaagctcgaggacctgaagaacgtgttcccacctgaggtggccgtgttcgagcctagcgaggccgagatcagccacacccagaaagccaccctcgtgtgcctggctaccggcttctaccccgaccatgtggaactgtcttggtgggtcaacggcaaagaggtgcacagcggcgtgtgtaccgacccccagccactgaaagaacagcccgccctgaacgacagccggtactgcctgagcagcagactgagagtgtccgccaccttctggcagaacccccggaaccacttcagatgccaggtgcagttctacggcctgagcgagaacgacgagtggacccaggacagagccaagcccgtgacccagatcgtgtctgccgaagcctggggcagagccgattgcggctttaccagcgagagctaccagcagggcgtgctgagcgccaccaacctgagcgtgatcggcttcagaatcctgctgctgaaagtggccggctttaacctgctgatgaccctgcggctgtggtccagcagggccaagcgatctggatctggagcaacaaacttctcactactcaaacaagcaggtgacgtggaggagaatcccgggcctactagtatggactggatttggcgcatccttttccttgtcggcgctgctaccggcgcgcattccgggccccagctccagctgcaagagtctggacctggcctggtcaagcctagcgagacactgagcctgacctgtaccgtgtccggcgatagcatcagcagcggcgattactactggggctggatcagacagcctcctggcaaaggactggaatggatcggccacatctactacagcggcgtgacctactacaaccccagcctgaagtccagagtgaccatcagcgtggacaccagccggaaccagttctccctgaagctgtctagcgtgacagccgccgataccgccgtgtactactgcaccagagaggacagcagcaactggcggagtagaggccagggaacactggtcacagttagctctggatccggcggaggcggaagtggaggcggaggatctggcggcggaggctctttcgaagggggaggcggctctcaggtgcaactccagcagtctggcgctgagcttgtgaagcctggggccagcgtgaagattagctgcaaggccagcggctacgccttcagcagctactggatgaactgggtcaagcagcggcctggcaagggcctggaatggatcggccaaatctaccccggcgacggcgacaccacctacaacggcaagttcaagggcaaggccaccctgacagccgacaagagcagcagcaccgtgtacatgcaactgaacagcctgaccagcgaggacagcgccgtgtacttctgcgtgcggtactactacggcagctccggctacttcgactattggggccagggcaccacactgaccgtgtcctctacgcgtatccagaaccctgatcctgccgtgtaccagctgcgggatagcaagagcagcgacaagagcgtgtgtctgttcaccgacttcgacagccagaccaacgtgtcccagagcaaggactccgacgtgtacatcaccgataagtgcgtgctggacatgcggagcatggacttcaagagcaactccgccgtggcctggtccaacaagtccgatttcgcctgcgccaacgccttcaacaacagcattatccccgaggacacattcttcccaagccccgagagcagctgcgacgtgaagctggtggaaaagagcttcgagacagacaccaacctgaacttccagatcctgtacgagatcctgctgggcaaggccaccctgtacgccgtgctggtgtctgccctggtgctgatggctatggtcaagcggaaggacagccgggga

SEQ ID NO: 5632 - DNA, 2676 bp, synthetic construct
  source 1..2676: mol_type = other DNA
atggccttaccagtgaccgccttgctcctgccgctggccttgctgctccacgccgccaggccggaagtgcagctggttgaatctggcggaggactggttcagcctggcggatctctgagactgtcttgtgccgccagcggcttcagcttcagcgacttttggatgagctgggtccgacaggcccctggcaaaggacttgaatgggtcgccacaatcagccaggccggcagcgagaaggactacgtggactctgtgaagggcagattcaccatcagccgggacaacgccaagaagtccctgtacctccagatgaacagcctgagagccgaggacaccgccgtgtactattgtgcctctggcgtgtacagcttcgactacagaggccagggcaccctggtcacagtctcttctggtaccggcggaggcggatctggcggcggaggtagcggtggcggaggatctgaattcgacgtgcagatgatccagacccccagcagcctgtctgccagcctgggcgatagagtgaccatcagctgtcgggccagccaggacatcggcaactacctgaactggtatcagcagaaacccgacggcaccgtgaagctgctgatctactacaccagcagactgcacagcggcgtgcccagcagattttctggcagcggctctggcaccgagtacagcctgaccatctccaacctggaacaggaagatattgctacctacttctgtcagcaaggcagcgccctgccccctacatttggcggcggaacaaagctggaaatcaacctcgaggacctgaagaacgtgttcccacctgaggtggccgtgttcgagcctagcgaggccgagatcagccacacccagaaagccaccctcgtgtgcctggctaccggcttctaccccgaccatgtggaactgtcttggtgggtcaacggcaaagaggtgcacagcggcgtgtgtaccgacccccagccactgaaagaacagcccgccctgaacgacagccggtactgcctgagcagcagactgagagtgtccgccaccttctggcagaacccccggaaccacttcagatgccaggtgcagttctacggcctgagcgagaacgacgagtggacccaggacagagccaagcccgtgacccagatcgtgtctgccgaagcctggggcagagccgattgcggctttaccagcgagagctaccagcagggcgtgctgagcgccaccaacctgagcgtgatcggcttcagaatcctgctgctgaaagtggccggctttaacctgctgatgaccctgcggctgtggtccagcagggccaagcgatctggatctggagcaacaaacttctcactactcaaacaagcaggtgacgtggaggagaatcccgggcctactagtatggactggatttggcgcatccttttccttgtcggcgctgctaccggcgcgcattccgggccccagctccagctgcaagagtctggacctggcctggtcaagcctagcgagacactgagcctgacctgtaccgtgtccggcgatagcatcagcagcggcgattactactggggctggatcagacagcctcctggcaaaggactggaatggatcggccacatctactacagcggcgtgacctactacaaccccagcctgaagtccagagtgaccatcagcgtggacaccagccggaaccagttctccctgaagctgtctagcgtgacagccgccgataccgccgtgtactactgcaccagagaggacagcagcaactggcggagtagaggccagggaacactggtcacagttagctctggatccggcggaggcggaagtggaggcggaggatctggcggcggaggctctttcgaagctctccagctccagcagtctggcgcagaactcgtgcggcctggcgcttctgtgaccctgagctgtaaagccagcggctacaccttcaccgactacgagatgcactgggtcaagcagacccctgtgcacggcctggaatggatcggagccatcgaccctgagacaggcggcaccgcctacaaccagaagttcgagggcaaggccatcctgaccgccgacaagagcagcagcacagcctacatggaactgcggagcctgacctccgaggacagccccgtgtactactgtgccagacggcggtactacggcagcagctccttcgactattggggccagggcaccaccctgaccgtgtctagtacgcgtatccagaaccctgatcctgccgtgtaccagctgcgggatagcaagagcagcgacaagagcgtgtgtctgttcaccgacttcgacagccagaccaacgtgtcccagagcaaggactccgacgtgtacatcaccgataagtgcgtgctggacatgcggagcatggacttcaagagcaactccgccgtggcctggtccaacaagtccgatttcgcctgcgccaacgccttcaacaacagcattatccccgaggacacattcttcccaagccccgagagcagctgcgacgtgaagctggtggaaaagagcttcgagacagacaccaacctgaacttccagatcctgtacgagatcctgctgggcaaggccaccctgtacgccgtgctggtgtctgccctggtgctgatggctatggtcaagcggaaggacagccgggga

SEQ ID NO: 5633 - DNA, 2688 bp, synthetic construct
  source 1..2688: mol_type = other DNA
atggccttaccagtgaccgccttgctcctgccgctggccttgctgctccacgccgccaggccggaagtgcagctggttgaatctggcggaggactggttcagcctggcggatctctgagactgtcttgtgccgccagcggcttcagcttcagcgacttttggatgagctgggtccgacaggcccctggcaaaggacttgaatgggtcgccacaatcagccaggccggcagcgagaaggactacgtggactctgtgaagggcagattcaccatcagccgggacaacgccaagaagtccctgtacctccagatgaacagcctgagagccgaggacaccgccgtgtactattgtgcctctggcgtgtacagcttcgactacagaggccagggcaccctggtcacagtctcttctggtaccggcggaggcggatctggcggcggaggtagcggtggcggaggatctgaattcgacatcgtcctgacccagtccccagccagcctggcggtgtccctgggtcaacgagctaccatttcctgcagagcctctaagtccgtatccacttccggctatagttacctgcattggtaccaacagaaaccagggcagccacccaagctgctcatctatctggcctcaaacctggagtccggcgtgcccgccagattctccggaagtgggagcggcaccgactttacattgaacatccacccagtcgaagaggaagatgctgccacttattactgtcagcactccagggagctgccatttacatttggctctggcacaaaactggagatcaaactcgaggacctgaagaacgtgttcccacctgaggtggccgtgttcgagcctagcgaggccgagatcagccacacccagaaagccaccctcgtgtgcctggctaccggcttctaccccgaccatgtggaactgtcttggtgggtcaacggcaaagaggtgcacagcggcgtgtgtaccgacccccagccactgaaagaacagcccgccctgaacgacagccggtactgcctgagcagcagactgagagtgtccgccaccttctggcagaacccccggaaccacttcagatgccaggtgcagttctacggcctgagcgagaacgacgagtggacccaggacagagccaagcccgtgacccagatcgtgtctgccgaagcctggggcagagccgattgcggctttaccagcgagagctaccagcagggcgtgctgagcgccaccaacctgagcgtgatcggcttcagaatcctgctgctgaaagtggccggctttaacctgctgatgaccctgcggctgtggtccagcagggccaagcgatctggatctggagcaacaaacttctcactactcaaacaagcaggtgacgtggaggagaatcccgggcctactagtatggactggatttggcgcatccttttccttgtcggcgctgctaccggcgcgcattccgggccccagctccagctgcaagagtctggacctggcctggtcaagcctagcgagacactgagcctgacctgtaccgtgtccggcgatagcatcagcagcggcgattactactggggctggatcagacagcctcctggcaaaggactggaatggatcggccacatctactacagcggcgtgacctactacaaccccagcctgaagtccagagtgaccatcagcgtggacaccagccggaaccagttctccctgaagctgtctagcgtgacagccgccgataccgccgtgtactactgcaccagagaggacagcagcaactggcggagtagaggccagggaacactggtcacagttagctctggatccggcggaggcggaagtggaggcggaggatctggcggcggaggctctttcgaacaggttcagctggtcgagtccgggggaggtctggtacagccgggtggcagcctcaagctgtcatgtgccgcatctggttttgactttagcaggtattggatgagctgggtccgccaggccccgggcaagggacttgagtggattggagaaataaaccctacttccagcacaatcaacttcacaccttctttgaaagataaggtttttatctctcgggataacgctaaaaacacactgtacttgcagatgtctaaggtgcgaagcgaagacaccgccctctattattgcgcccggggtaattactaccgctatggggatgcgatggactattgggggcaaggtacctccgtcacggtctcaacgcgtatccagaaccctgatcctgccgtgtaccagctgcgggatagcaagagcagcgacaagagcgtgtgtctgttcaccgacttcgacagccagaccaacgtgtcccagagcaaggactccgacgtgtacatcaccgataagtgcgtgctggacatgcggagcatggacttcaagagcaactccgccgtggcctggtccaacaagtccgatttcgcctgcgccaacgccttcaacaacagcattatccccgaggacacattcttcccaagccccgagagcagctgcgacgtgaagctggtggaaaagagcttcgagacagacaccaacctgaacttccagatcctgtacgagatcctgctgggcaaggccaccctgtacgccgtgctggtgtctgccctggtgctgatggctatggtcaagcggaaggacagccgggga

SEQ ID NO: 5634 - DNA, 2682 bp, synthetic construct
  source 1..2682: mol_type = other DNA
atggccttaccagtgaccgccttgctcctgccgctggccttgctgctccacgccgccaggccggaagtgcagctggttgaatctggcggaggactggttcagcctggcggatctctgagactgtcttgtgccgccagcggcttcagcttcagcgacttttggatgagctgggtccgacaggcccctggcaaaggacttgaatgggtcgccacaatcagccaggccggcagcgagaaggactacgtggactctgtgaagggcagattcaccatcagccgggacaacgccaagaagtccctgtacctccagatgaacagcctgagagccgaggacaccgccgtgtactattgtgcctctggcgtgtacagcttcgactacagaggccagggcaccctggtcacagtctcttctggtaccggcggaggcggatctggcggcggaggtagcggtggcggaggatctgaattcgacatccagatgacccagagccctagctcactgagcgccagcgtgggcgacagggtgaccattacctgctccgccagccaggacatcagcaactacctgaactggtaccagcagaagcccggcaaggcccccaagctgctgatctactacacctccaacctgcactccggcgtgcccagcaggttcagcggaagcggcagcggcaccgatttcaccctgaccatctccagcctgcagcccgaggacttcgccacctactactgccagcagtacaggaagctcccctggactttcggccagggcaccaaactggagatcaagcgtctcgaggacctgaagaacgtgttcccacctgaggtggccgtgttcgagcctagcgaggccgagatcagccacacccagaaagccaccctcgtgtgcctggctaccggcttctaccccgaccatgtggaactgtcttggtgggtcaacggcaaagaggtgcacagcggcgtgtgtaccgacccccagccactgaaagaacagcccgccctgaacgacagccggtactgcctgagcagcagactgagagtgtccgccaccttctggcagaacccccggaaccacttcagatgccaggtgcagttctacggcctgagcgagaacgacgagtggacccaggacagagccaagcccgtgacccagatcgtgtctgccgaagcctggggcagagccgattgcggctttaccagcgagagctaccagcagggcgtgctgagcgccaccaacctgagcgtgatcggcttcagaatcctgctgctgaaagtggccggctttaacctgctgatgaccctgcggctgtggtccagcagggccaagcgatctggatctggagcaacaaacttctcactactcaaacaagcaggtgacgtggaggagaatcccgggcctactagtatggactggatttggcgcatccttttccttgtcggcgctgctaccggcgcgcattccgggccccagctccagctgcaagagtctggacctggcctggtcaagcctagcgagacactgagcctgacctgtaccgtgtccggcgatagcatcagcagcggcgattactactggggctggatcagacagcctcctggcaaaggactggaatggatcggccacatctactacagcggcgtgacctactacaaccccagcctgaagtccagagtgaccatcagcgtggacaccagccggaaccagttctccctgaagctgtctagcgtgacagccgccgataccgccgtgtactactgcaccagagaggacagcagcaactggcggagtagaggccagggaacactggtcacagttagctctggatccggcggaggcggaagtggaggcggaggatctggcggcggaggctctttcgaacaggtgcagctggtccagagcggcgccgaagtgaagaagcccggcagctccgtgaaagtgagctgcaaggccagcggcggcaccttcagcaactactggatgcactgggtgaggcaggcccccggacagggcctggagtggatgggcgccacctacaggggccacagcgacacctactacaaccagaagttcaagggccgggtgaccatcaccgccgacaagagcaccagcaccgcctacatggaactgagcagcctcaggagcgaggacaccgctgtgtattactgcgccaggggcgccatctacgacggctacgacgtgctggacaactggggccagggcacactggtgaccgtgtccagcacgcgtatccagaaccctgatcctgccgtgtaccagctgcgggatagcaagagcagcgacaagagcgtgtgtctgttcaccgacttcgacagccagaccaacgtgtcccagagcaaggactccgacgtgtacatcaccgataagtgcgtgctggacatgcggagcatggacttcaagagcaactccgccgtggcctggtccaacaagtccgatttcgcctgcgccaacgccttcaacaacagcattatccccgaggacacattcttcccaagccccgagagcagctgcgacgtgaagctggtggaaaagagcttcgagacagacaccaacctgaacttccagatcctgtacgagatcctgctgggcaaggccaccctgtacgccgtgctggtgtctgccctggtgctgatggctatggtcaagcggaaggacagccgggga

SEQ ID NO: 5635 - DNA, 2682 bp, synthetic construct
  source 1..2682: mol_type = other DNA
atggccttaccagtgaccgccttgctcctgccgctggccttgctgctccacgccgccaggccggaagtgcagctggttgaatctggcggaggactggttcagcctggcggatctctgagactgtcttgtgccgccagcggcttcagcttcagcgacttttggatgagctgggtccgacaggcccctggcaaaggacttgaatgggtcgccacaatcagccaggccggcagcgagaaggactacgtggactctgtgaagggcagattcaccatcagccgggacaacgccaagaagtccctgtacctccagatgaacagcctgagagccgaggacaccgccgtgtactattgtgcctctggcgtgtacagcttcgactacagaggccagggcaccctggtcacagtctcttctggtaccggcggaggcggatctggcggcggaggtagcggtggcggaggatctgaattcgacatcgtgctgacacagagccctgccaccctgtctctgagccctggcgatagagccaccatcagctgtagagccagcgagagcgtgaccatcctgggcagccacctgatctactggtatcagcagaagcccggccagccccccagactgctgattcagctggcctccaatgtgcagaccggcgtgccagccagattttccggcagcggcagcagaaccgacttcaccctgaccatcagcagcgtggaacccgaggacttcgccgtgtactactgcctccagagccggaccatccccagaacattcggccagggcaccaagctggaaatcaagagactcgaggacctgaagaacgtgttcccacctgaggtggccgtgttcgagcctagcgaggccgagatcagccacacccagaaagccaccctcgtgtgcctggctaccggcttctaccccgaccatgtggaactgtcttggtgggtcaacggcaaagaggtgcacagcggcgtgtgtaccgacccccagccactgaaagaacagcccgccctgaacgacagccggtactgcctgagcagcagactgagagtgtccgccaccttctggcagaacccccggaaccacttcagatgccaggtgcagttctacggcctgagcgagaacgacgagtggacccaggacagagccaagcccgtgacccagatcgtgtctgccgaagcctggggcagagccgattgcggctttaccagcgagagctaccagcagggcgtgctgagcgccaccaacctgagcgtgatcggcttcagaatcctgctgctgaaagtggccggctttaacctgctgatgaccctgcggctgtggtccagcagggccaagcgatctggatctggagcaacaaacttctcactactcaaacaagcaggtgacgtggaggagaatcccgggcctactagtatggactggatttggcgcatccttttccttgtcggcgctgctaccggcgcgcattccgggccccagctccagctgcaagagtctggacctggcctggtcaagcctagcgagacactgagcctgacctgtaccgtgtccggcgatagcatcagcagcggcgattactactggggctggatcagacagcctcctggcaaaggactggaatggatcggccacatctactacagcggcgtgacctactacaaccccagcctgaagtccagagtgaccatcagcgtggacaccagccggaaccagttctccctgaagctgtctagcgtgacagccgccgataccgccgtgtactactgcaccagagaggacagcagcaactggcggagtagaggccagggaacactggtcacagttagctctggatccggcggaggcggaagtggaggcggaggatctggcggcggaggctctttcgaacaggtgcagctggtgcagtctggccccgaagtgaagaaacccggcgagtccgtgaagatcagctgcaaggccagcggctacaccttccggcactacagcatgaactgggtcaagcaggccccaggccagggcctgaagtggatgggcagaatcaacaccgagagcggcgtgcccatctacgccgacgacttcaagggccggttcagcttcaccgtggacaccagcgccagcaccgcctacctggaaatctccagcctgaccagcgaggataccgccgtgtatttctgctccaacgactacctgtacagcctggatttctggggccagggaaccaccctgacagtgtcctctacgcgtatccagaaccctgatcctgccgtgtaccagctgcgggatagcaagagcagcgacaagagcgtgtgtctgttcaccgacttcgacagccagaccaacgtgtcccagagcaaggactccgacgtgtacatcaccgataagtgcgtgctggacatgcggagcatggacttcaagagcaactccgccgtggcctggtccaacaagtccgatttcgcctgcgccaacgccttcaacaacagcattatccccgaggacacattcttcccaagccccgagagcagctgcgacgtgaagctggtggaaaagagcttcgagacagacaccaacctgaacttccagatcctgtacgagatcctgctgggcaaggccaccctgtacgccgtgctggtgtctgccctggtgctgatggctatggtcaagcggaaggacagccgggga

SEQ ID NO: 5636 - DNA, 2685 bp, synthetic construct
  source 1..2685: mol_type = other DNA
atggccttaccagtgaccgccttgctcctgccgctggccttgctgctccacgccgccaggccggaagtgcagctggttgaatctggcggaggactggttcagcctggcggatctctgagactgtcttgtgccgccagcggcttcagcttcagcgacttttggatgagctgggtccgacaggcccctggcaaaggacttgaatgggtcgccacaatcagccaggccggcagcgagaaggactacgtggactctgtgaagggcagattcaccatcagccgggacaacgccaagaagtccctgtacctccagatgaacagcctgagagccgaggacaccgccgtgtactattgtgcctctggcgtgtacagcttcgactacagaggccagggcaccctggtcacagtctcttctggtaccggcggaggcggatctggcggcggaggtagcggtggcggaggatctgaattccagtctgtgctgacacagcctcctagtgtgtctggcgctcctggacagagagtgaccatcagctgtacaggcagcagcagcaatatcggagccggctttgacgtgcactggtatcagcagctgcctggcacagcccctaaactgctgatctacggcaacagcaacagacccagcggcgtgcccgatagattttccggctctaagagcggcacaagcgccagcctggctattactggactccaggccgaggacgaggccgactactactgtcagagctacgacagcagcctgagcggctacgttttcggcaccggcaccaaagtgacagtgcttggtctcgaggacctgaagaacgtgttcccacctgaggtggccgtgttcgagcctagcgaggccgagatcagccacacccagaaagccaccctcgtgtgcctggctaccggcttctaccccgaccatgtggaactgtcttggtgggtcaacggcaaagaggtgcacagcggcgtgtgtaccgacccccagccactgaaagaacagcccgccctgaacgacagccggtactgcctgagcagcagactgagagtgtccgccaccttctggcagaacccccggaaccacttcagatgccaggtgcagttctacggcctgagcgagaacgacgagtggacccaggacagagccaagcccgtgacccagatcgtgtctgccgaagcctggggcagagccgattgcggctttaccagcgagagctaccagcagggcgtgctgagcgccaccaacctgagcgtgatcggcttcagaatcctgctgctgaaagtggccggctttaacctgctgatgaccctgcggctgtggtccagcagggccaagcgatctggatctggagcaacaaacttctcactactcaaacaagcaggtgacgtggaggagaatcccgggcctactagtatggactggatttggcgcatccttttccttgtcggcgctgctaccggcgcgcattccgggccccagctccagctgcaagagtctggacctggcctggtcaagcctagcgagacactgagcctgacctgtaccgtgtccggcgatagcatcagcagcggcgattactactggggctggatcagacagcctcctggcaaaggactggaatggatcggccacatctactacagcggcgtgacctactacaaccccagcctgaagtccagagtgaccatcagcgtggacaccagccggaaccagttctccctgaagctgtctagcgtgacagccgccgataccgccgtgtactactgcaccagagaggacagcagcaactggcggagtagaggccagggaacactggtcacagttagctctggatccggcggaggcggaagtggaggcggaggatctggcggcggaggctctttcgaacaagttcagctggttcagagcggagccgaagtgaagaaacctggggcctctgtgaaggtgtcctgcaaggcttccggctacacctttaccgattactacatgcactgggtccgacaggctcccggccaaagacttgaatggatgggctggatcaaccccaacagcggcggcacaaattacgcccagaagttccaggaccggatcaccgtgaccagagacaccagctccaacaccggctacatggaactgacccggctgagatccgatgacaccgccgtgtactactgcgctagaagcccttactccggcgtgctggataagtggggacagggcacactggtcaccgtgtcatctacgcgtatccagaaccctgatcctgccgtgtaccagctgcgggatagcaagagcagcgacaagagcgtgtgtctgttcaccgacttcgacagccagaccaacgtgtcccagagcaaggactccgacgtgtacatcaccgataagtgcgtgctggacatgcggagcatggacttcaagagcaactccgccgtggcctggtccaacaagtccgatttcgcctgcgccaacgccttcaacaacagcattatccccgaggacacattcttcccaagccccgagagcagctgcgacgtgaagctggtggaaaagagcttcgagacagacaccaacctgaacttccagatcctgtacgagatcctgctgggcaaggccaccctgtacgccgtgctggtgtctgccctggtgctgatggctatggtcaagcggaaggacagccgggga

SEQ ID NO: 5637 - DNA, 2676 bp, synthetic construct
  source 1..2676: mol_type = other DNA
atggccttaccagtgaccgccttgctcctgccgctggccttgctgctccacgccgccaggccggaagtgcagctggttgaatctggcggaggactggttcagcctggcggatctctgagactgtcttgtgccgccagcggcttcagcttcagcgacttttggatgagctgggtccgacaggcccctggcaaaggacttgaatgggtcgccacaatcagccaggccggcagcgagaaggactacgtggactctgtgaagggcagattcaccatcagccgggacaacgccaagaagtccctgtacctccagatgaacagcctgagagccgaggacaccgccgtgtactattgtgcctctggcgtgtacagcttcgactacagaggccagggcaccctggtcacagtctcttctggtaccggcggaggcggatctggcggcggaggtagcggtggcggaggatctgaattccaggctgttctgacacagcctccatctgcctctggcacacctggacagagagtgaccatctcctgtagcggcagcagcagcaacatcggcagctacaccgtgtcctggtatcagcagctccctggaacagcccctaagttcctgatctacagcaacaaccagcggcctagcggcgtgcccgatagattttctggcagcaagagcggcacaagcgccagcctggctatttctggactccagtctgaggacgaggccgactactattgtgccgcctgggacgatagcctgaacggctatgtgtttggcaccggcaccaaagtgacagtgcttggtctcgaggacctgaagaacgtgttcccacctgaggtggccgtgttcgagcctagcgaggccgagatcagccacacccagaaagccaccctcgtgtgcctggctaccggcttctaccccgaccatgtggaactgtcttggtgggtcaacggcaaagaggtgcacagcggcgtgtgtaccgacccccagccactgaaagaacagcccgccctgaacgacagccggtactgcctgagcagcagactgagagtgtccgccaccttctggcagaacccccggaaccacttcagatgccaggtgcagttctacggcctgagcgagaacgacgagtggacccaggacagagccaagcccgtgacccagatcgtgtctgccgaagcctggggcagagccgattgcggctttaccagcgagagctaccagcagggcgtgctgagcgccaccaacctgagcgtgatcggcttcagaatcctgctgctgaaagtggccggctttaacctgctgatgaccctgcggctgtggtccagcagggccaagcgatctggatctggagcaacaaacttctcactactcaaacaagcaggtgacgtggaggagaatcccgggcctactagtatggactggatttggcgcatccttttccttgtcggcgctgctaccggcgcgcattccgggccccagctccagctgcaagagtctggacctggcctggtcaagcctagcgagacactgagcctgacctgtaccgtgtccggcgatagcatcagcagcggcgattactactggggctggatcagacagcctcctggcaaaggactggaatggatcggccacatctactacagcggcgtgacctactacaaccccagcctgaagtccagagtgaccatcagcgtggacaccagccggaaccagttctccctgaagctgtctagcgtgacagccgccgataccgccgtgtactactgcaccagagaggacagcagcaactggcggagtagaggccagggaacactggtcacagttagctctggatccggcggaggcggaagtggaggcggaggatctggcggcggaggctctttcgaagttcaactggttcagagcggagccgaagtgaagaagcctggcgagagcctgaagattagctgcaaaggcagcggctacgacttcaccacctactggatcggctgggtccgacagatgcctggcaaaggactggaatggatgggcatcatctaccccggcgacagcgacaccagatacagccctagcgttagaggccgcgtgaccatcagcgccgacaagtctatcaacaccgcctacctccagtggtccagcctggaagcctctgacaccgccatgtactactgcgccagaatgtggaccttcagccaggatggatggggccagggaacactggtcacagtgtcatctacgcgtatccagaaccctgatcctgccgtgtaccagctgcgggatagcaagagcagcgacaagagcgtgtgtctgttcaccgacttcgacagccagaccaacgtgtcccagagcaaggactccgacgtgtacatcaccgataagtgcgtgctggacatgcggagcatggacttcaagagcaactccgccgtggcctggtccaacaagtccgatttcgcctgcgccaacgccttcaacaacagcattatccccgaggacacattcttcccaagccccgagagcagctgcgacgtgaagctggtggaaaagagcttcgagacagacaccaacctgaacttccagatcctgtacgagatcctgctgggcaaggccaccctgtacgccgtgctggtgtctgccctggtgctgatggctatggtcaagcggaaggacagccgggga

SEQ ID NO: 5638 - DNA, 2685 bp, synthetic construct
  source 1..2685: mol_type = other DNA
atggccttaccagtgaccgccttgctcctgccgctggccttgctgctccacgccgccaggccggaagtgcagctggttgaatctggcggaggactggttcagcctggcggatctctgagactgtcttgtgccgccagcggcttcagcttcagcgacttttggatgagctgggtccgacaggcccctggcaaaggacttgaatgggtcgccacaatcagccaggccggcagcgagaaggactacgtggactctgtgaagggcagattcaccatcagccgggacaacgccaagaagtccctgtacctccagatgaacagcctgagagccgaggacaccgccgtgtactattgtgcctctggcgtgtacagcttcgactacagaggccagggcaccctggtcacagtctcttctggtaccggcggaggcggatctggcggcggaggtagcggtggcggaggatctgaattcgacatcgtgatgacccagagccccgatagcctggccgtgtctctgggagagagagccaccatcaactgcaagagcagccagagcatcctgtacagcagcaaccagaagaactacctggcctggtatcagcagaagcccggccagagccctaagctgctgatctactgggccagcaccagagaaagcggcgtgcccgatagattcagcggcagcggctctggcaccgacttcaccctgaccatcagttctcttcaggccgaggacgtggccgtgtactactgccaccagtacatcagctcctacaccttcggccagggcaccaagctggaaatcaagctcgaggacctgaagaacgtgttcccacctgaggtggccgtgttcgagcctagcgaggccgagatcagccacacccagaaagccaccctcgtgtgcctggctaccggcttctaccccgaccatgtggaactgtcttggtgggtcaacggcaaagaggtgcacagcggcgtgtgtaccgacccccagccactgaaagaacagcccgccctgaacgacagccggtactgcctgagcagcagactgagagtgtccgccaccttctggcagaacccccggaaccacttcagatgccaggtgcagttctacggcctgagcgagaacgacgagtggacccaggacagagccaagcccgtgacccagatcgtgtctgccgaagcctggggcagagccgattgcggctttaccagcgagagctaccagcagggcgtgctgagcgccaccaacctgagcgtgatcggcttcagaatcctgctgctgaaagtggccggctttaacctgctgatgaccctgcggctgtggtccagcagggccaagcgatctggatctggagcaacaaacttctcactactcaaacaagcaggtgacgtggaggagaatcccgggcctactagtatggactggatttggcgcatccttttccttgtcggcgctgctaccggcgcgcattccgggccccagctccagctgcaagagtctggacctggcctggtcaagcctagcgagacactgagcctgacctgtaccgtgtccggcgatagcatcagcagcggcgattactactggggctggatcagacagcctcctggcaaaggactggaatggatcggccacatctactacagcggcgtgacctactacaaccccagcctgaagtccagagtgaccatcagcgtggacaccagccggaaccagttctccctgaagctgtctagcgtgacagccgccgataccgccgtgtactactgcaccagagaggacagcagcaactggcggagtagaggccagggaacactggtcacagttagctctggatccggcggaggcggaagtggaggcggaggatctggcggcggaggctctttcgaacaggtgcagctggtgcagtctggcgctgaagtgaagaaacctggggccagcgtgaaggtgtcctgcaaggccagcggctacacctttgccagccagtggatgcactggatgagacaggcccctggacagggcctggaatggatcggctggatcaaccccggcaacgtgaacaccaagtacaacgagaagttcaagggcagagccaccctgacagtggacaccagcaccaacaccgcctacatggaactgagcagcctgcggagcgaggacaccgccgtgtattattgcgccagaagcacctggtacagacccctggattattggggccagggaacccttgtgaccgtgtcctctacgcgtatccagaaccctgatcctgccgtgtaccagctgcgggatagcaagagcagcgacaagagcgtgtgtctgttcaccgacttcgacagccagaccaacgtgtcccagagcaaggactccgacgtgtacatcaccgataagtgcgtgctggacatgcggagcatggacttcaagagcaactccgccgtggcctggtccaacaagtccgatttcgcctgcgccaacgccttcaacaacagcattatccccgaggacacattcttcccaagccccgagagcagctgcgacgtgaagctggtggaaaagagcttcgagacagacaccaacctgaacttccagatcctgtacgagatcctgctgggcaaggccaccctgtacgccgtgctggtgtctgccctggtgctgatggctatggtcaagcggaaggacagccgggga

SEQ ID NO: 5639 - DNA, 2685 bp, synthetic construct
  source 1..2685: mol_type = other DNA
atggccttaccagtgaccgccttgctcctgccgctggccttgctgctccacgccgccaggccggaagtgcagctggttgaatctggcggaggactggttcagcctggcggatctctgagactgtcttgtgccgccagcggcttcagcttcagcgacttttggatgagctgggtccgacaggcccctggcaaaggacttgaatgggtcgccacaatcagccaggccggcagcgagaaggactacgtggactctgtgaagggcagattcaccatcagccgggacaacgccaagaagtccctgtacctccagatgaacagcctgagagccgaggacaccgccgtgtactattgtgcctctggcgtgtacagcttcgactacagaggccagggcaccctggtcacagtctcttctggtaccggcggaggcggatctggcggcggaggtagcggtggcggaggatctgaattcgaccacatcgtgctgacccagagccctagcagcctgtctgccagcctgggcgacagagtgaccatcagctgtagagccagccaggacatcagcacctacctgaactggtatcagcagaaacccgacggcaccgtgaagctgctgatcttctacaccagcagactgcacgccggggtgcccagcagattttctggcagcggctctggcacccaccacagcctgaccatctccaacctggaacaggaagatattgctacctacttctgtcagcaaggcaacagcctgcccttcaccttcggcagcggcaccaagctggaaatcaagagactcgaggacctgaagaacgtgttcccacctgaggtggccgtgttcgagcctagcgaggccgagatcagccacacccagaaagccaccctcgtgtgcctggctaccggcttctaccccgaccatgtggaactgtcttggtgggtcaacggcaaagaggtgcacagcggcgtgtgtaccgacccccagccactgaaagaacagcccgccctgaacgacagccggtactgcctgagcagcagactgagagtgtccgccaccttctggcagaacccccggaaccacttcagatgccaggtgcagttctacggcctgagcgagaacgacgagtggacccaggacagagccaagcccgtgacccagatcgtgtctgccgaagcctggggcagagccgattgcggctttaccagcgagagctaccagcagggcgtgctgagcgccaccaacctgagcgtgatcggcttcagaatcctgctgctgaaagtggccggctttaacctgctgatgaccctgcggctgtggtccagcagggccaagcgatctggatctggagcaacaaacttctcactactcaaacaagcaggtgacgtggaggagaatcccgggcctactagtatggactggatttggcgcatccttttccttgtcggcgctgctaccggcgcgcattccgggccccagctccagctgcaagagtctggacctggcctggtcaagcctagcgagacactgagcctgacctgtaccgtgtccggcgatagcatcagcagcggcgattactactggggctggatcagacagcctcctggcaaaggactggaatggatcggccacatctactacagcggcgtgacctactacaaccccagcctgaagtccagagtgaccatcagcgtggacaccagccggaaccagttctccctgaagctgtctagcgtgacagccgccgataccgccgtgtactactgcaccagagaggacagcagcaactggcggagtagaggccagggaacactggtcacagttagctctggatccggcggaggcggaagtggaggcggaggatctggcggcggaggctctttcgaacaggtgcagctgaaagagagcggccctgagctggaaaagcctggggccagcgtgaagattagctgcaaggccagcggctacagcttcaccgcctacagcatgaactgggtcaagcagaacaacggcatgagcctggaatggatcggcagcatcgacccctactacggcgacaccaaatacgcccagaagttcaagggcaaggccaccctgaccgtggataaggccagcagcaccgcctacctccagctgaagtctctgaccagcgaggacagcgccgtgtactactgcgccagacggatgattaccaccggcgactggtacttcgacgtgtggggagccggaaccaccgtgacagtgtctagcacgcgtatccagaaccctgatcctgccgtgtaccagctgcgggatagcaagagcagcgacaagagcgtgtgtctgttcaccgacttcgacagccagaccaacgtgtcccagagcaaggactccgacgtgtacatcaccgataagtgcgtgctggacatgcggagcatggacttcaagagcaactccgccgtggcctggtccaacaagtccgatttcgcctgcgccaacgccttcaacaacagcattatccccgaggacacattcttcccaagccccgagagcagctgcgacgtgaagctggtggaaaagagcttcgagacagacaccaacctgaacttccagatcctgtacgagatcctgctgggcaaggccaccctgtacgccgtgctggtgtctgccctggtgctgatggctatggtcaagcggaaggacagccgggga

SEQ ID NO: 5640 - DNA, 2685 bp, synthetic construct; identical to SEQ ID NO: 5639
  source 1..2685: mol_type = other DNA

SEQ ID NO: 5641 - DNA, 2685 bp, synthetic construct
  source 1..2685: mol_type = other DNA
atggccttaccagtgaccgccttgctcctgccgctggccttgctgctccacgccgccaggccggaagtgcagctggttgaatctggcggaggactggttcagcctggcggatctctgagactgtcttgtgccgccagcggcttcagcttcagcgacttttggatgagctgggtccgacaggcccctggcaaaggacttgaatgggtcgccacaatcagccaggccggcagcgagaaggactacgtggactctgtgaagggcagattcaccatcagccgggacaacgccaagaagtccctgtacctccagatgaacagcctgagagccgaggacaccgccgtgtactattgtgcctctggcgtgtacagcttcgactacagaggccagggcaccctggtcacagtctcttctggtaccggcggaggcggatctggcggcggaggtagcggtggcggaggatctgaattcgacgagatcgtgctgacacagagccctgccaccctgtctctgagccctggcgaaagagccaccctgagctgtagagccagccagagcgtgtccagctacctggcctggtatcagcagaagcccggccaggctccccggctgctgatctacgatgccagcaatagagccaccggcatccccgccagattttccggctctggcagcggcaccgacttcaccctgaccatcagctccctggaacccgaggacttcgccgtgtactactgccagcagcggagcaactggcccatcacattcggccagggcacccggctggaaatcaaactcgaggacctgaagaacgtgttcccacctgaggtggccgtgttcgagcctagcgaggccgagatcagccacacccagaaagccaccctcgtgtgcctggctaccggcttctaccccgaccatgtggaactgtcttggtgggtcaacggcaaagaggtgcacagcggcgtgtgtaccgacccccagccactgaaagaacagcccgccctgaacgacagccggtactgcctgagcagcagactgagagtgtccgccaccttctggcagaacccccggaaccacttcagatgccaggtgcagttctacggcctgagcgagaacgacgagtggacccaggacagagccaagcccgtgacccagatcgtgtctgccgaagcctggggcagagccgattgcggctttaccagcgagagctaccagcagggcgtgctgagcgccaccaacctgagcgtgatcggcttcagaatcctgctgctgaaagtggccggctttaacctgctgatgaccctgcggctgtggtccagcagggccaagcgatctggatctggagcaacaaacttctcactactcaaacaagcaggtgacgtggaggagaatcccgggcctactagtatggactggatttggcgcatccttttccttgtcggcgctgctaccggcgcgcattccgggccccagctccagctgcaagagtctggacctggcctggtcaagcctagcgagacactgagcctgacctgtaccgtgtccggcgatagcatcagcagcggcgattactactggggctggatcagacagcctcctggcaaaggactggaatggatcggccacatctactacagcggcgtgacctactacaaccccagcctgaagtccagagtgaccatcagcgtggacaccagccggaaccagttctccctgaagctgtctagcgtgacagccgccgataccgccgtgtactactgcaccagagaggacagcagcaactggcggagtagaggccagggaacactggtcacagttagctctggatccggcggaggcggaagtggaggcggaggatctggcggcggaggctctttcgaagaagtgcagctggtggaatcaggcggcggactggtgcagcctggcagaagcctgagactgagctgtgccgccagcggcttcaccttcaacgactacgccatgcactgggtgcgccaggcccctggaaaaggactggaatgggtgtccacaatcagctggaacagcggcagcatcggctacgccgatagcgtgaagggccggttcaccatcagccgggacaacgccaagaagtccctgtacctccagatgaacagcctgcgggccgaggacacagccctgtactattgcgccaaggacatccagtacggcaactactactacggcatggacgtgtggggccagggaaccaccgtgaccgtgtcatctacgcgtatccagaaccctgatcctgccgtgtaccagctgcgggatagcaagagcagcgacaagagcgtgtgtctgttcaccgacttcgacagccagaccaacgtgtcccagagcaaggactccgacgtgtacatcaccgataagtgcgtgctggacatgcggagcatggacttcaagagcaactccgccgtggcctggtccaacaagtccgatttcgcctgcgccaacgccttcaacaacagcattatccccgaggacacattcttcccaagccccgagagcagctgcgacgtgaagctggtggaaaagagcttcgagacagacaccaacctgaacttccagatcctgtacgagatcctgctgggcaaggccaccctgtacgccgtgctggtgtctgccctggtgctgatggctatggtcaagcggaaggacagccgggga

SEQ ID NO: 5642 - DNA, 2691 bp, synthetic construct
  source 1..2691: mol_type = other DNA
atggccttaccagtgaccgccttgctcctgccgctggccttgctgctccacgccgccaggccggaagtgcagctggttgaatctggcggaggactggttcagcctggcggatctctgagactgtcttgtgccgccagcggcttcagcttcagcgacttttggatgagctgggtccgacaggcccctggcaaaggacttgaatgggtcgccacaatcagccaggccggcagcgagaaggactacgtggactctgtgaagggcagattcaccatcagccgggacaacgccaagaagtccctgtacctccagatgaacagcctgagagccgaggacaccgccgtgtactattgtgcctctggcgtgtacagcttcgactacagaggccagggcaccctggtcacagtctcttctggtaccggcggaggcggatctggcggcggaggtagcggtggcggaggatctgaattcgacatcgtgatgacccagacccccctgagcctgcctgtgacacctggcgagcctgccagcatctcctgcagaagcagcaagagcctgctgcacagcaacggcatcacctacctgtactggtatctgcagaaacccggccagagcccccaactgctgatctaccagatgagcaacctggtgtccggcgtgcccgacagattttctggcagcggctccggcaccgacttcaccctgaagatcagccgggtggaagccgaggacgtgggcgtgtactactgcgcccagaacctggaactgccctacacctttggcggcggaacaaaggtggaaatcaagcggctcgaggacctgaagaacgtgttcccacctgaggtggccgtgttcgagcctagcgaggccgagatcagccacacccagaaagccaccctcgtgtgcctggctaccggcttctaccccgaccatgtggaactgtcttggtgggtcaacggcaaagaggtgcacagcggcgtgtgtaccgacccccagccactgaaagaacagcccgccctgaacgacagccggtactgcctgagcagcagactgagagtgtccgccaccttctggcagaacccccggaaccacttcagatgccaggtgcagttctacggcctgagcgagaacgacgagtggacccaggacagagccaagcccgtgacccagatcgtgtctgccgaagcctggggcagagccgattgcggctttaccagcgagagctaccagcagggcgtgctgagcgccaccaacctgagcgtgatcggcttcagaatcctgctgctgaaagtggccggctttaacctgctgatgaccctgcggctgtggtccagcagggccaagcgatctggatctggagcaacaaacttctcactactcaaacaagcaggtgacgtggaggagaatcccgggcctactagtatggactggatttggcgcatccttttccttgtcggcgctgctaccggcgcgcattccgggccccagctccagctgcaagagtctggacctggcctggtcaagcctagcgagacactgagcctgacctgtaccgtgtccggcgatagcatcagcagcggcgattactactggggctggatcagacagcctcctggcaaaggactggaatggatcggccacatctactacagcggcgtgacctactacaaccccagcctgaagtccagagtgaccatcagcgtggacaccagccggaaccagttctccctgaagctgtctagcgtgacagccgccgataccgccgtgtactactgcaccagagaggacagcagcaactggcggagtagaggccagggaacactggtcacagttagctctggatccggcggaggcggaagtggaggcggaggatctggcggcggaggctctttcgaacaggtgcaactggtgcagagcggagccgaagtgaaaaagcccggcagcagcgtgaaggtgtcctgcaaggccagcggctacgccttcagctactcctggatcaactgggtgcgccaggcccctggacagggcctggaatggatgggcagaatcttccccggcgacggcgacaccgactacaacggcaagttcaagggcagagtgaccatcaccgccgacaagagcaccagcaccgcctacatggaactgagcagcctgcggagcgaggataccgccgtgtactattgtgccagaaacgtgttcgacggctactggctggtgtactggggccagggaacacttgtgaccgtgtccagcacgcgtatccagaaccctgatcctgccgtgtaccagctgcgggatagcaagagcagcgacaagagcgtgtgtctgttcaccgacttcgacagccagaccaacgtgtcccagagcaaggactccgacgtgtacatcaccgataagtgcgtgctggacatgcggagcatggacttcaagagcaactccgccgtggcctggtccaacaagtccgatttcgcctgcgccaacgccttcaacaacagcattatccccgaggacacattcttcccaagccccgagagcagctgcgacgtgaagctggtggaaaagagcttcgagacagacaccaacctgaacttccagatcctgtacgagatcctgctgggcaaggccaccctgtacgccgtgctggtgtctgccctggtgctgatggctatggtcaagcggaaggacagccgggga

SEQ ID NO: 5643 - DNA, 2694 bp, synthetic construct
  source 1..2694: mol_type = other DNA
atggccttaccagtgaccgccttgctcctgccgctggccttgctgctccacgccgccaggccggaagtgcagctggttgaatctggcggaggactggttcagcctggcggatctctgagactgtcttgtgccgccagcggcttcagcttcagcgacttttggatgagctgggtccgacaggcccctggcaaaggacttgaatgggtcgccacaatcagccaggccggcagcgagaaggactacgtggactctgtgaagggcagattcaccatcagccgggacaacgccaagaagtccctgtacctccagatgaacagcctgagagccgaggacaccgccgtgtactattgtgcctctggcgtgtacagcttcgactacagaggccagggcaccctggtcacagtctcttctggtaccggcggaggcggatctggcggcggaggtagcggtggcggaggatctgaattcgacatccagatgacccagagccccagcagcctgtctgccagcgtgggcgacagagtgaccatcacctgtcggagcagccagagcatcgtgcactccgtgggcaacaccttcctggaatggtatcagcagaagcccggcaaggcccccaagctgctgatctacaaggtgtccaacagattcagcggcgtgcccagcaggtttagcggctctggcagcggcaccgacttcaccctgaccatctctagcctccagcccgaggacttcgccacctactactgttttcaaggcagccagttcccctacaccttcggccagggaacaaaggtggaaatcaagcggctcgaggacctgaagaacgtgttcccacctgaggtggccgtgttcgagcctagcgaggccgagatcagccacacccagaaagccaccctcgtgtgcctggctaccggcttctaccccgaccatgtggaactgtcttggtgggtcaacggcaaagaggtgcacagcggcgtgtgtaccgacccccagccactgaaagaacagcccgccctgaacgacagccggtactgcctgagcagcagactgagagtgtccgccaccttctggcagaacccccggaaccacttcagatgccaggtgcagttctacggcctgagcgagaacgacgagtggacccaggacagagccaagcccgtgacccagatcgtgtctgccgaagcctggggcagagccgattgcggctttaccagcgagagctaccagcagggcgtgctgagcgccaccaacctgagcgtgatcggcttcagaatcctgctgctgaaagtggccggctttaacctgctgatgaccctgcggctgtggtccagcagggccaagcgatctggatctggagcaacaaacttctcactactcaaacaagcaggtgacgtggaggagaatcccgggcctactagtatggactggatttggcgcatccttttccttgtcggcgctgctaccggcgcgcattccgggccccagctccagctgcaagagtctggacctggcctggtcaagcctagcgagacactgagcctgacctgtaccgtgtccggcgatagcatcagcagcggcgattactactggggctggatcagacagcctcctggcaaaggactggaatggatcggccacatctactacagcggcgtgacctactacaaccccagcctgaagtccagagtgaccatcagcgtggacaccagccggaaccagttctccctgaagctgtctagcgtgacagccgccgataccgccgtgtactactgcaccagagaggacagcagcaactggcggagtagaggccagggaacactggtcacagttagctctggatccggcggaggcggaagtggaggcggaggatctggcggcggaggctctttcgaagaagtgcaactggtggaaagcggaggcggcctggtgcagcctggcggatctctgagactgagctgtgccgccagcggctacgagttcagccggtcctggatgaactgggtgcgccaggcccctggcaagggactggaatgggtgggaagaatctaccccggcgacggcgacaccaactacagcggcaagttcaagggccggttcaccatcagcgccgacaccagcaagaacaccgcctacctccagatgaacagcctgcgggccgaggataccgccgtgtactactgtgccagagatggcagctcctgggactggtacttcgacgtgtggggacagggaacccttgtgaccgtgtccagcacgcgtatccagaaccctgatcctgccgtgtaccagctgcgggatagcaagagcagcgacaagagcgtgtgtctgttcaccgacttcgacagccagaccaacgtgtcccagagcaaggactccgacgtgtacatcaccgataagtgcgtgctggacatgcggagcatggacttcaagagcaactccgccgtggcctggtccaacaagtccgatttcgcctgcgccaacgccttcaacaacagcattatccccgaggacacattcttcccaagccccgagagcagctgcgacgtgaagctggtggaaaagagcttcgagacagacaccaacctgaacttccagatcctgtacgagatcctgctgggcaaggccaccctgtacgccgtgctggtgtctgccctggtgctgatggctatggtcaagcggaaggacagccgggga

SEQ ID NO: 5644 - DNA, 2688 bp, synthetic construct
  source 1..2688: mol_type = other DNA
atggccttaccagtgaccgccttgctcctgccgctggccttgctgctccacgccgccaggccggaagtgcagctggttgaatctggcggaggactggttcagcctggcggatctctgagactgtcttgtgccgccagcggcttcagcttcagcgacttttggatgagctgggtccgacaggcccctggcaaaggacttgaatgggtcgccacaatcagccaggccggcagcgagaaggactacgtggactctgtgaagggcagattcaccatcagccgggacaacgccaagaagtccctgtacctccagatgaacagcctgagagccgaggacaccgccgtgtactattgtgcctctggcgtgtacagcttcgactacagaggccagggcaccctggtcacagtctcttctggtaccggcggaggcggatctggcggcggaggtagcggtggcggaggatctgaattcgacatccagatgacccagagccccagcagcctgtctgccagcgtgggcgacagagtgaccatcacctgtagagccagccagaccatctggtcctacctgaactggtatcagcagaggcccggcaaggcccccaacctgctgatctatgccgccagctctctccagagcggcgtgcccagcagattttccggcagaggcagcggcaccgacttcaccctgaccatcagttccttgcaggccgaggacttcgccacctactactgccagcagagctacagcatcccccagattttcggccagggcaccaagctggaaatcaagctcgaggacctgaagaacgtgttcccacctgaggtggccgtgttcgagcctagcgaggccgagatcagccacacccagaaagccaccctcgtgtgcctggctaccggcttctaccccgaccatgtggaactgtcttggtgggtcaacggcaaagaggtgcacagcggcgtgtgtaccgacccccagccactgaaagaacagcccgccctgaacgacagccggtactgcctgagcagcagactgagagtgtccgccaccttctggcagaacccccggaaccacttcagatgccaggtgcagttctacggcctgagcgagaacgacgagtggacccaggacagagccaagcccgtgacccagatcgtgtctgccgaagcctggggcagagccgattgcggctttaccagcgagagctaccagcagggcgtgctgagcgccaccaacctgagcgtgatcggcttcagaatcctgctgctgaaagtggccggctttaacctgctgatgaccctgcggctgtggtccagcagggccaagcgatctggatctggagcaacaaacttctcactactcaaacaagcaggtgacgtggaggagaatcccgggcctactagtatggactggatttggcgcatccttttccttgtcggcgctgctaccggcgcgcattccgggccccagctccagctgcaagagtctggacctggcctggtcaagcctagcgagacactgagcctgacctgtaccgtgtccggcgatagcatcagcagcggcgattactactggggctggatcagacagcctcctggcaaaggactggaatggatcggccacatctactacagcggcgtgacctactacaaccccagcctgaagtccagagtgaccatcagcgtggacaccagccggaaccagttctccctgaagctgtctagcgtgacagccgccgataccgccgtgtactactgcaccagagaggacagcagcaactggcggagtagaggccagggaacactggtcacagttagctctggatccggcggaggcggaagtggaggcggaggatctggcggcggaggctctttcgaacaggtgcagctccagcagtctggacccggcctcgtgaagcctagccagacactgagcctgacctgcgccatcagcggcgatagcgtgtccagcaatagcgccgcctggaactggatcagacagtccccctctcggggcctggaatggctgggccggacctactaccgcagcaagtggtacaacgactacgccgtgtccgtgaagtcccggatcaccatcaaccccgacaccagcaagaaccagttctccttgcaactgaacagcgtgacccccgaggacaccgccgtgtactactgcgccagagaagtgaccggcgacctggaagatgccttcgacatctggggccagggaacaatggtcacagtgtccagcacgcgtatccagaaccctgatcctgccgtgtaccagctgcgggatagcaagagcagcgacaagagcgtgtgtctgttcaccgacttcgacagccagaccaacgtgtcccagagcaaggactccgacgtgtacatcaccgataagtgcgtgctggacatgcggagcatggacttcaagagcaactccgccgtggcctggtccaacaagtccgatttcgcctgcgccaacgccttcaacaacagcattatccccgaggacacattcttcccaagccccgagagcagctgcgacgtgaagctggtggaaaagagcttcgagacagacaccaacctgaacttccagatcctgtacgagatcctgctgggcaaggccaccctgtacgccgtgctggtgtctgccctggtgctgatggctatggtcaagcggaaggacagccgggga

SEQ ID NO: 5645 - DNA, 2667 bp, synthetic construct
  source 1..2667: mol_type = other DNA
atggccttaccagtgaccgccttgctcctgccgctggccttgctgctccacgccgccaggccggaagtgcagctggttgaatctggcggaggactggttcagcctggcggatctctgagactgtcttgtgccgccagcggcttcagcttcagcgacttttggatgagctgggtccgacaggcccctggcaaaggacttgaatgggtcgccacaatcagccaggccggcagcgagaaggactacgtggactctgtgaagggcagattcaccatcagccgggacaacgccaagaagtccctgtacctccagatgaacagcctgagagccgaggacaccgccgtgtactattgtgcctctggcgtgtacagcttcgactacagaggccagggcaccctggtcacagtctcttctggtaccggcggaggcggatctggcggcggaggtagcggtggcggaggatctgaattcgacatccagatgacccagagccccgccaccatcgagaacacaagcctgtctgccagcgtgggcgacagagtgaccatcacctgtagagccagccagggcatcagctcttggctgacctggtatcagcagaagcccgagaaggcccccaagagcctgatctacgccgccagctctctgcagtctggcgtgcccagcagattttccggcagcggctctggcaccgacttcaccctgacaatcagcagcctgcagcccgaggacttcgccacctactactgccagcagtacgacagctaccccatcaccttcggccagggcacccggctggaaatcaagctcgaggacctgaagaacgtgttcccacctgaggtggccgtgttcgagcctagcgaggccgagatcagccacacccagaaagccaccctcgtgtgcctggctaccggcttctaccccgaccatgtggaactgtcttggtgggtcaacggcaaagaggtgcacagcggcgtgtgtaccgacccccagccactgaaagaacagcccgccctgaacgacagccggtactgcctgagcagcagactgagagtgtccgccaccttctggcagaacccccggaaccacttcagatgccaggtgcagttctacggcctgagcgagaacgacgagtggacccaggacagagccaagcccgtgacccagatcgtgtctgccgaagcctggggcagagccgattgcggctttaccagcgagagctaccagcagggcgtgctgagcgccaccaacctgagcgtgatcggcttcagaatcctgctgctgaaagtggccggctttaacctgctgatgaccctgcggctgtggtccagcagggccaagcgatctggatctggagcaacaaacttctcactactcaaacaagcaggtgacgtggaggagaatcccgggcctactagtatggactggatttggcgcatccttttccttgtcggcgctgctaccggcgcgcattccgggccccagctccagctgcaagagtctggacctggcctggtcaagcctagcgagacactgagcctgacctgtaccgtgtccggcgatagcatcagcagcggcgattactactggggctggatcagacagcctcctggcaaaggactggaatggatcggccacatctactacagcggcgtgacctactacaaccccagcctgaagtccagagtgaccatcagcgtggacaccagccggaaccagttctccctgaagctgtctagcgtgacagccgccgataccgccgtgtactactgcaccagagaggacagcagcaactggcggagtagaggccagggaacactggtcacagttagctctggatccggcggaggcggaagtggaggcggaggatctggcggcggaggctctttcgaacaggtgcaactgcagcagtggggagccggactgctgaagcctagcgagacactgagcctgacctgcgccgtgtacggcggcagcttcagcgcctactattggagctggatcagacagccccctggcaagggcctggaatggatcggcgacatcaatcacggcggaggcaccaactacaaccccagcctgaagtcccgcgtgaccatctccgtggacaccagcaagaaccagttctccctgaagctgaacagcgtgacagccgccgacacagccgtgtactactgtgccagcctgaccgcctattggggccagggatctcttgtgaccgtgtccagcacgcgtatccagaaccctgatcctgccgtgtaccagctgcgggatagcaagagcagcgacaagagcgtgtgtctgttcaccgacttcgacagccagaccaacgtgtcccagagcaaggactccgacgtgtacatcaccgataagtgcgtgctggacatgcggagcatggacttcaagagcaactccgccgtggcctggtccaacaagtccgatttcgcctgcgccaacgccttcaacaacagcattatccccgaggacacattcttcccaagccccgagagcagctgcgacgtgaagctggtggaaaagagcttcgagacagacaccaacctgaacttccagatcctgtacgagatcctgctgggcaaggccaccctgtacgccgtgctggtgtctgccctggtgctgatggctatggtcaagcggaaggacagccgggga

SEQ ID NO: 5646 - DNA, 2682 bp, synthetic construct
  source 1..2682: mol_type = other DNA
atggccttaccagtgaccgccttgctcctgccgctggccttgctgctccacgccgccaggccggaagtgcagctggttgaatctggcggaggactggttcagcctggcggatctctgagactgtcttgtgccgccagcggcttcagcttcagcgacttttggatgagctgggtccgacaggcccctggcaaaggacttgaatgggtcgccacaatcagccaggccggcagcgagaaggactacgtggactctgtgaagggcagattcaccatcagccgggacaacgccaagaagtccctgtacctccagatgaacagcctgagagccgaggacaccgccgtgtactattgtgcctctggcgtgtacagcttcgactacagaggccagggcaccctggtcacagtctcttctggtaccggcggaggcggatctggcggcggaggtagcggtggcggaggatctgaattcgacgagatcgtgctgacccagagccctgatagcctggccgtgtctctgggcgagagagccaccatcaactgcaaggccagccagagcgtggacttcgacggcgacagctacctgaactggtatcagcagaagcccggccagccccccaaggtgctgatctatgccgccagcacactgcagagcggcgtgcccagcagattttctggcagcggctccggcaccgacttcaccctgaccatcaacagcctggaagccgaggacgccgccacctactactgccagcagagcaacgaggacccctggacctttggcggcggaacaaaggtggaaatcaagctcgaggacctgaagaacgtgttcccacctgaggtggccgtgttcgagcctagcgaggccgagatcagccacacccagaaagccaccctcgtgtgcctggctaccggcttctaccccgaccatgtggaactgtcttggtgggtcaacggcaaagaggtgcacagcggcgtgtgtaccgacccccagccactgaaagaacagcccgccctgaacgacagccggtactgcctgagcagcagactgagagtgtccgccaccttctggcagaacccccggaaccacttcagatgccaggtgcagttctacggcctgagcgagaacgacgagtggacccaggacagagccaagcccgtgacccagatcgtgtctgccgaagcctggggcagagccgattgcggctttaccagcgagagctaccagcagggcgtgctgagcgccaccaacctgagcgtgatcggcttcagaatcctgctgctgaaagtggccggctttaacctgctgatgaccctgcggctgtggtccagcagggccaagcgatctggatctggagcaacaaacttctcactactcaaacaagcaggtgacgtggaggagaatcccgggcctactagtatggactggatttggcgcatccttttccttgtcggcgctgctaccggcgcgcattccgggccccagctccagctgcaagagtctggacctggcctggtcaagcctagcgagacactgagcctgacctgtaccgtgtccggcgatagcatcagcagcggcgattactactggggctggatcagacagcctcctggcaaaggactggaatggatcggccacatctactacagcggcgtgacctactacaaccccagcctgaagtccagagtgaccatcagcgtggacaccagccggaaccagttctccctgaagctgtctagcgtgacagccgccgataccgccgtgtactactgcaccagagaggacagcagcaactggcggagtagaggccagggaacactggtcacagttagctctggatccggcggaggcggaagtggaggcggaggatctggcggcggaggctctttcgaacaggtgcaactggtgcagtccggcgctgaagtgaagaaacctggggccagcgtgaaggtgtcctgcaaggtgtccggctacacctttaccgactactacattacctgggtgcgccaggcccctggacaggccctggaatggatgggctggatctaccccggcagcggcaacaccaagtacagccagaagttccagggcagattcgtgttcagcgtggacaccagcgccagcaccgcctacctgcaactgtctagcctgaaggccgaagataccgccgtgtactactgcgccaactacggcaactattggttcgcctattggggccagggaacccttgtgaccgtgtcctctacgcgtatccagaaccctgatcctgccgtgtaccagctgcgggatagcaagagcagcgacaagagcgtgtgtctgttcaccgacttcgacagccagaccaacgtgtcccagagcaaggactccgacgtgtacatcaccgataagtgcgtgctggacatgcggagcatggacttcaagagcaactccgccgtggcctggtccaacaagtccgatttcgcctgcgccaacgccttcaacaacagcattatccccgaggacacattcttcccaagccccgagagcagctgcgacgtgaagctggtggaaaagagcttcgagacagacaccaacctgaacttccagatcctgtacgagatcctgctgggcaaggccaccctgtacgccgtgctggtgtctgccctggtgctgatggctatggtcaagcggaaggacagccgggga

SEQ ID NO: 5647 - DNA, 2673 bp, synthetic construct
  source 1..2673: mol_type = other DNA
atggccttaccagtgaccgccttgctcctgccgctggccttgctgctccacgccgccaggccggaagtgcagctggttgaatctggcggaggactggttcagcctggcggatctctgagactgtcttgtgccgccagcggcttcagcttcagcgacttttggatgagctgggtccgacaggcccctggcaaaggacttgaatgggtcgccacaatcagccaggccggcagcgagaaggactacgtggactctgtgaagggcagattcaccatcagccgggacaacgccaagaagtccctgtacctccagatgaacagcctgagagccgaggacaccgccgtgtactattgtgcctctggcgtgtacagcttcgactacagaggccagggcaccctggtcacagtctcttctggtaccggcggaggcggatctggcggcggaggtagcggtggcggaggatctgaattcgacatccagatgacccagagccccagcagcctgtctgccagcgtgggcgacagagtgaccatcacctgtagagccagccagggcatcagctcttggctggcctggtatcagcagaagcccgagaaggcccccaagagcctgatctacgccgcctctagtctccagagcggcgtgcccagcagattttctggcagcggctccggcaccgacttcaccctgacaatcagctccctccagcccgaggacttcgccacctactactgccagcagtacaacagctaccctcccacctttggcggaggcaccaaggtggaaatcaagctcgaggacctgaagaacgtgttcccacctgaggtggccgtgttcgagcctagcgaggccgagatcagccacacccagaaagccaccctcgtgtgcctggctaccggcttctaccccgaccatgtggaactgtcttggtgggtcaacggcaaagaggtgcacagcggcgtgtgtaccgacccccagccactgaaagaacagcccgccctgaacgacagccggtactgcctgagcagcagactgagagtgtccgccaccttctggcagaacccccggaaccacttcagatgccaggtgcagttctacggcctgagcgagaacgacgagtggacccaggacagagccaagcccgtgacccagatcgtgtctgccgaagcctggggcagagccgattgcggctttaccagcgagagctaccagcagggcgtgctgagcgccaccaacctgagcgtgatcggcttcagaatcctgctgctgaaagtggccggctttaacctgctgatgaccctgcggctgtggtccagcagggccaagcgatctggatctggagcaacaaacttctcactactcaaacaagcaggtgacgtggaggagaatcccgggcctactagtatggactggatttggcgcatccttttccttgtcggcgctgctaccggcgcgcattccgggccccagctccagctgcaagagtctggacctggcctggtcaagcctagcgagacactgagcctgacctgtaccgtgtccggcgatagcatcagcagcggcgattactactggggctggatcagacagcctcctggcaaaggactggaatggatcggccacatctactacagcggcgtgacctactacaaccccagcctgaagtccagagtgaccatcagcgtggacaccagccggaaccagttctccctgaagctgtctagcgtgacagccgccgataccgccgtgtactactgcaccagagaggacagcagcaactggcggagtagaggccagggaacactggtcacagttagctctggatccggcggaggcggaagtggaggcggaggatctggcggcggaggctctttcgaagaagtgcaactggtgcagtctggcggagggctggtgcatcctgggggaagcctgagactgagctgtgccggctctggcttcgccttcagcagcagcaccatgcactggatcagacaggcccctggcaagggcctggaatggatcagcctgatcggaagcggagggggcatctactacggcgacagcgtgaagggccggttcaccatcagccgggacaacgccaagaacagcctgtacctccagatgaactccctgcgggccgaggacatggccgtgtactattgtgtgcggggctacttcgactgggtggactacttcgattactggggccagggcaccctcgtgaccgtgtcatctacgcgtatccagaaccctgatcctgccgtgtaccagctgcgggatagcaagagcagcgacaagagcgtgtgtctgttcaccgacttcgacagccagaccaacgtgtcccagagcaaggactccgacgtgtacatcaccgataagtgcgtgctggacatgcggagcatggacttcaagagcaactccgccgtggcctggtccaacaagtccgatttcgcctgcgccaacgccttcaacaacagcattatccccgaggacacattcttcccaagccccgagagcagctgcgacgtgaagctggtggaaaagagcttcgagacagacaccaacctgaacttccagatcctgtacgagatcctgctgggcaaggccaccctgtacgccgtgctggtgtctgccctggtgctgatggctatggtcaagcggaaggacagccgggga

SEQ ID NO: 5648 - DNA, 2703 bp, synthetic construct
  source 1..2703: mol_type = other DNA
atggccttaccagtgaccgccttgctcctgccgctggccttgctgctccacgccgccaggccggaagtgcagctggttgaatctggcggaggactggttcagcctggcggatctctgagactgtcttgtgccgccagcggcttcagcttcagcgacttttggatgagctgggtccgacaggcccctggcaaaggacttgaatgggtcgccacaatcagccaggccggcagcgagaaggactacgtggactctgtgaagggcagattcaccatcagccgggacaacgccaagaagtccctgtacctccagatgaacagcctgagagccgaggacaccgccgtgtactattgtgcctctggcgtgtacagcttcgactacagaggccagggcaccctggtcacagtctcttctggtaccggcggaggcggatctggcggcggaggtagcggtggcggaggatctgaattcgacgacatcgtgatgacacagtcaccagatagcctcaccgtctccctgggggagcggaccaccattaattgtaaatccagccaaagcgtgctggactcaagcaagaacaagaatagcctcgcctggtatcagcagaagcccggtcagcctccaaagctgctgctttcttgggcctccaccagagagtccgggattcctgataggtttagtggttcaggctccggcacagattttactctgaccattgattctctccagccagaggattctgcaacttattactgccagcaaagcgcccactttcctataacttttggccagggaacccgacttgaaatcaagctcgaggacctgaagaacgtgttcccacctgaggtggccgtgttcgagcctagcgaggccgagatcagccacacccagaaagccaccctcgtgtgcctggctaccggcttctaccccgaccatgtggaactgtcttggtgggtcaacggcaaagaggtgcacagcggcgtgtgtaccgacccccagccactgaaagaacagcccgccctgaacgacagccggtactgcctgagcagcagactgagagtgtccgccaccttctggcagaacccccggaaccacttcagatgccaggtgcagttctacggcctgagcgagaacgacgagtggacccaggacagagccaagcccgtgacccagatcgtgtctgccgaagcctggggcagagccgattgcggctttaccagcgagagctaccagcagggcgtgctgagcgccaccaacctgagcgtgatcggcttcagaatcctgctgctgaaagtggccggctttaacctgctgatgaccctgcggctgtggtccagcagggccaagcgatctggatctggagcaacaaacttctcactactcaaacaagcaggtgacgtggaggagaatcccgggcctactagtatggactggatttggcgcatccttttccttgtcggcgctgctaccggcgcgcattccgggccccagctccagctgcaagagtctggacctggcctggtcaagcctagcgagacactgagcctgacctgtaccgtgtccggcgatagcatcagcagcggcgattactactggggctggatcagacagcctcctggcaaaggactggaatggatcggccacatctactacagcggcgtgacctactacaaccccagcctgaagtccagagtgaccatcagcgtggacaccagccggaaccagttctccctgaagctgtctagcgtgacagccgccgataccgccgtgtactactgcaccagagaggacagcagcaactggcggagtagaggccagggaacactggtcacagttagctctggatccggcggaggcggaagtggaggcggaggatctggcggcggaggctctttcgaacaggtgcagctggtgcagagcggtgccgaagtgaagaaaccaggtgcatccgttaaagtttcatgtaaggctagtggatataccttcaccaattacggaatgaactgggtgaaacaggcccctggccagggactgaagtggatggggtggattaacacctacaccggggagccgacttatgcagacgactttaaggggcgggtcacgatgacctccgacacctccaccagtaccgcctacctggagctgcacaaccttaggtcagacgataccgccgtgtattactgtgcccgatggtcttggtccgacggatactatgtctacttcgactattggggccaggggaccacagttaccgtgtcctctacgcgtatccagaaccctgatcctgccgtgtaccagctgcgggatagcaagagcagcgacaagagcgtgtgtctgttcaccgacttcgacagccagaccaacgtgtcccagagcaaggactccgacgtgtacatcaccgataagtgcgtgctggacatgcggagcatggacttcaagagcaactccgccgtggcctggtccaacaagtccgatttcgcctgcgccaacgccttcaacaacagcattatccccgaggacacattcttcccaagccccgagagcagctgcgacgtgaagctggtggaaaagagcttcgagacagacaccaacctgaacttccagatcctgtacgagatcctgctgggcaaggccaccctgtacgccgtgctggtgtctgccctggtgctgatggctatggtcaagcggaaggacagccgggga

SEQ ID NO: 5649 - DNA, 2691 bp, synthetic construct
  source 1..2691: mol_type = other DNA
atggccttaccagtgaccgccttgctcctgccgctggccttgctgctccacgccgccaggccggaagtgcagctggttgaatctggcggaggactggttcagcctggcggatctctgagactgtcttgtgccgccagcggcttcagcttcagcgacttttggatgagctgggtccgacaggcccctggcaaaggacttgaatgggtcgccacaatcagccaggccggcagcgagaaggactacgtggactctgtgaagggcagattcaccatcagccgggacaacgccaagaagtccctgtacctccagatgaacagcctgagagccgaggacaccgccgtgtactattgtgcctctggcgtgtacagcttcgactacagaggccagggcaccctggtcacagtctcttctggtaccggcggaggcggatctggcggcggaggtagcggtggcggaggatctgaattcgacgagatcgtgctgacacagagccctggaagcctggccgtgtctcctggcgagcgcgtgacaatgagctgcaagagcagccagagcgtgttcttcagcagctcccagaagaactacctggcctggtatcagcagatccccggccagagccccagactgctgatctactgggccagcaccagagaaagcggcgtgcccgatagattcaccggcagcggctctggcaccgacttcaccctgacaatcagcagcgtgcagcccgaggacctggctatctactactgccaccagtacctgagcagccggaccttcggccagggcaccaagctggaaatcaagagactcgaggacctgaagaacgtgttcccacctgaggtggccgtgttcgagcctagcgaggccgagatcagccacacccagaaagccaccctcgtgtgcctggctaccggcttctaccccgaccatgtggaactgtcttggtgggtcaacggcaaagaggtgcacagcggcgtgtgtaccgacccccagccactgaaagaacagcccgccctgaacgacagccggtactgcctgagcagcagactgagagtgtccgccaccttctggcagaacccccggaaccacttcagatgccaggtgcagttctacggcctgagcgagaacgacgagtggacccaggacagagccaagcccgtgacccagatcgtgtctgccgaagcctggggcagagccgattgcggctttaccagcgagagctaccagcagggcgtgctgagcgccaccaacctgagcgtgatcggcttcagaatcctgctgctgaaagtggccggctttaacctgctgatgaccctgcggctgtggtccagcagggccaagcgatctggatctggagcaacaaacttctcactactcaaacaagcaggtgacgtggaggagaatcccgggcctactagtatggactggatttggcgcatccttttccttgtcggcgctgctaccggcgcgcattccgggccccagctccagctgcaagagtctggacctggcctggtcaagcctagcgagacactgagcctgacctgtaccgtgtccggcgatagcatcagcagcggcgattactactggggctggatcagacagcctcctggcaaaggactggaatggatcggccacatctactacagcggcgtgacctactacaaccccagcctgaagtccagagtgaccatcagcgtggacaccagccggaaccagttctccctgaagctgtctagcgtgacagccgccgataccgccgtgtactactgcaccagagaggacagcagcaactggcggagtagaggccagggaacactggtcacagttagctctggatccggcggaggcggaagtggaggcggaggatctggcggcggaggctctttcgaacaggtgcaactgcagcagcctggcgctgaggtcgtgaagccaggcgcttccgtgaagatgtcctgcaaggccagcggctacaccttcaccagctactacatccactggatcaagcagacccctggacagggcctggaatgggtgggagtgatctaccccggcaacgacgacatcagctacaaccagaagttccagggcaaggccaccctgaccgccgacaagtctagcaccaccgcctacatgcaactgtccagcctgaccagcgaggacagcgccgtgtactactgcgccagagaagtgcggctgcggtacttcgatgtgtggggccagggaaccaccgtgaccgtgtcatctacgcgtatccagaaccctgatcctgccgtgtaccagctgcgggatagcaagagcagcgacaagagcgtgtgtctgttcaccgacttcgacagccagaccaacgtgtcccagagcaaggactccgacgtgtacatcaccgataagtgcgtgctggacatgcggagcatggacttcaagagcaactccgccgtggcctggtccaacaagtccgatttcgcctgcgccaacgccttcaacaacagcattatccccgaggacacattcttcccaagccccgagagcagctgcgacgtgaagctggtggaaaagagcttcgagacagacaccaacctgaacttccagatcctgtacgagatcctgctgggcaaggccaccctgtacgccgtgctggtgtctgccctggtgctgatggctatggtcaagcggaaggacagccgggga

SEQ ID NO: 5650 - DNA, 2703 bp, synthetic construct
  source 1..2703: mol_type = other DNA
atggccttaccagtgaccgccttgctcctgccgctggccttgctgctccacgccgccaggccggaagtgcagctggttgaatctggcggaggactggttcagcctggcggatctctgagactgtcttgtgccgccagcggcttcagcttcagcgacttttggatgagctgggtccgacaggcccctggcaaaggacttgaatgggtcgccacaatcagccaggccggcagcgagaaggactacgtggactctgtgaagggcagattcaccatcagccgggacaacgccaagaagtccctgtacctccagatgaacagcctgagagccgaggacaccgccgtgtactattgtgcctctggcgtgtacagcttcgactacagaggccagggcaccctggtcacagtctcttctggtaccggcggaggcggatctggcggcggaggtagcggtggcggaggatctgaattcgatgtgctgctgacccagagccctctgagcctgcctgtgacactgggacagcctgccagcatctcctgtcggagcagccagaccatcgtgcacagcaacggcaacacctacctggaatggttccagcagcggccaggccagagccccagactgctgatctaccaggtgtccaacagattcagcggcgtgcccgacagattctccggcagcggctctggcaccgacttcaccctgaagatcagccgggtggaagccgaggacgtgggcgtgtactactgttttcaaggcagccacgtgccccggacctttggcggaggaacaaaggtggaaatcaagagagccctcgaggacctgaagaacgtgttcccacctgaggtggccgtgttcgagcctagcgaggccgagatcagccacacccagaaagccaccctcgtgtgcctggctaccggcttctaccccgaccatgtggaactgtcttggtgggtcaacggcaaagaggtgcacagcggcgtgtgtaccgacccccagccactgaaagaacagcccgccctgaacgacagccggtactgcctgagcagcagactgagagtgtccgccaccttctggcagaacccccggaaccacttcagatgccaggtgcagttctacggcctgagcgagaacgacgagtggacccaggacagagccaagcccgtgacccagatcgtgtctgccgaagcctggggcagagccgattgcggctttaccagcgagagctaccagcagggcgtgctgagcgccaccaacctgagcgtgatcggcttcagaatcctgctgctgaaagtggccggctttaacctgctgatgaccctgcggctgtggtccagcagggccaagcgatctggatctggagcaacaaacttctcactactcaaacaagcaggtgacgtggaggagaatcccgggcctactagtatggactggatttggcgcatccttttccttgtcggcgctgctaccggcgcgcattccgggccccagctccagctgcaagagtctggacctggcctggtcaagcctagcgagacactgagcctgacctgtaccgtgtccggcgatagcatcagcagcggcgattactactggggctggatcagacagcctcctggcaaaggactggaatggatcggccacatctactacagcggcgtgacctactacaaccccagcctgaagtccagagtgaccatcagcgtggacaccagccggaaccagttctccctgaagctgtctagcgtgacagccgccgataccgccgtgtactactgcaccagagaggacagcagcaactggcggagtagaggccagggaacactggtcacagttagctctggatccggcggaggcggaagtggaggcggaggatctggcggcggaggctctttcgaacagatccaactggtgcagagcggcagcgagctgaagaaacctggggccagcgtgaaggtgtcctgcaaggccagcggctacacctttaccaactacggcatgaactgggtgcgccaggcccctggacagggcctgaaatggatgggctggatcaacaccaacaccggcgagcctaagtacgccgaagagttcaagggcagattcgccctgagcctggacaccagcgtgtccacagcctacctccagatcaacagcctgaaggccgaggataccgccgtgtacttctgcgccagaggctacggcaactacgccagaggggcttggctggcctattggggccagggaacactcgtgaccgtgtcctctacgcgtatccagaaccctgatcctgccgtgtaccagctgcgggatagcaagagcagcgacaagagcgtgtgtctgttcaccgacttcgacagccagaccaacgtgtcccagagcaaggactccgacgtgtacatcaccgataagtgcgtgctggacatgcggagcatggacttcaagagcaactccgccgtggcctggtccaacaagtccgatttcgcctgcgccaacgccttcaacaacagcattatccccgaggacacattcttcccaagccccgagagcagctgcgacgtgaagctggtggaaaagagcttcgagacagacaccaacctgaacttccagatcctgtacgagatcctgctgggcaaggccaccctgtacgccgtgctggtgtctgccctggtgctgatggctatggtcaagcggaaggacagccgggga

SEQ ID NO: 5651 - DNA, 2658 bp, synthetic construct
  source 1..2658: mol_type = other DNA
atggccttaccagtgaccgccttgctcctgccgctggccttgctgctccacgccgccaggccggaagtgcagctggttgaatctggcggaggactggttcagcctggcggatctctgagactgtcttgtgccgccagcggcttcagcttcagcgacttttggatgagctgggtccgacaggcccctggcaaaggacttgaatgggtcgccacaatcagccaggccggcagcgagaaggactacgtggactctgtgaagggcagattcaccatcagccgggacaacgccaagaagtccctgtacctccagatgaacagcctgagagccgaggacaccgccgtgtactattgtgcctctggcgtgtacagcttcgactacagaggccagggcaccctggtcacagtctcttctggtaccggcggaggcggatctggcggcggaggtagcggtggcggaggatctgaattcgacgagatcgtgctgacacagagccctgccacactctctctgagccctggcgaaagagccaccctgagctgtagcgccagcagcagcatcaactacatctactggctccagcagaagcccggccaggcccccagaatcctgatctacctgaccagcaacctggcctccggcgtgccagccagattttctggcagcggctccggcaccgacttcaccctgacaatcagcagcctggaacccgaggacttcgccgtgtactactgcctccagtggtccagcaaccccctgacctttggcggaggcaccaaggtggaaatcaagctcgaggacctgaagaacgtgttcccacctgaggtggccgtgttcgagcctagcgaggccgagatcagccacacccagaaagccaccctcgtgtgcctggctaccggcttctaccccgaccatgtggaactgtcttggtgggtcaacggcaaagaggtgcacagcggcgtgtgtaccgacccccagccactgaaagaacagcccgccctgaacgacagccggtactgcctgagcagcagactgagagtgtccgccaccttctggcagaacccccggaaccacttcagatgccaggtgcagttctacggcctgagcgagaacgacgagtggacccaggacagagccaagcccgtgacccagatcgtgtctgccgaagcctggggcagagccgattgcggctttaccagcgagagctaccagcagggcgtgctgagcgccaccaacctgagcgtgatcggcttcagaatcctgctgctgaaagtggccggctttaacctgctgatgaccctgcggctgtggtccagcagggccaagcgatctggatctggagcaacaaacttctcactactcaaacaagcaggtgacgtggaggagaatcccgggcctactagtatggactggatttggcgcatccttttccttgtcggcgctgctaccggcgcgcattccgggccccagctccagctgcaagagtctggacctggcctggtcaagcctagcgagacactgagcctgacctgtaccgtgtccggcgatagcatcagcagcggcgattactactggggctggatcagacagcctcctggcaaaggactggaatggatcggccacatctactacagcggcgtgacctactacaaccccagcctgaagtccagagtgaccatcagcgtggacaccagccggaaccagttctccctgaagctgtctagcgtgacagccgccgataccgccgtgtactactgcaccagagaggacagcagcaactggcggagtagaggccagggaacactggtcacagttagctctggatccggcggaggcggaagtggaggcggaggatctggcggcggaggctctttcgaagaagtgcaactggtggaaagcgggggaggacttgtgaagcctggcggctctctgagactgagctgtgccgcctctggcttcaccttcagcagctacgacatgagctgggtgcgccaggctcctggcaagggactggaatgggtgtccaccatcagcagcggcggcagctacacctactacctggacagcatcaagggccggttcaccatctccagagacaacgccaagaacagcctgtacctccagatgaactccctgcgggccgaggacacagccgtgtattattgcgccagacagggcctggattactggggcagaggcacccttgtgaccgtgtcctctacgcgtatccagaaccctgatcctgccgtgtaccagctgcgggatagcaagagcagcgacaagagcgtgtgtctgttcaccgacttcgacagccagaccaacgtgtcccagagcaaggactccgacgtgtacatcaccgataagtgcgtgctggacatgcggagcatggacttcaagagcaactccgccgtggcctggtccaacaagtccgatttcgcctgcgccaacgccttcaacaacagcattatccccgaggacacattcttcccaagccccgagagcagctgcgacgtgaagctggtggaaaagagcttcgagacagacaccaacctgaacttccagatcctgtacgagatcctgctgggcaaggccaccctgtacgccgtgctggtgtctgccctggtgctgatggctatggtcaagcggaaggacagccgggga

SEQ ID NO: 5652 - DNA, 2685 bp, synthetic construct
  source 1..2685: mol_type = other DNA
atggccttaccagtgaccgccttgctcctgccgctggccttgctgctccacgccgccaggccggaagtgcagctggttgaatctggcggaggactggttcagcctggcggatctctgagactgtcttgtgccgccagcggcttcagcttcagcgacttttggatgagctgggtccgacaggcccctggcaaaggacttgaatgggtcgccacaatcagccaggccggcagcgagaaggactacgtggactctgtgaagggcagattcaccatcagccgggacaacgccaagaagtccctgtacctccagatgaacagcctgagagccgaggacaccgccgtgtactattgtgcctctggcgtgtacagcttcgactacagaggccagggcaccctggtcacagtctcttctggtaccggcggaggcggatctggcggcggaggtagcggtggcggaggatctgaattcgacatcgtgatgacccagagccccgatagcctggccgtgtctctgggagagagagccaccatcaactgccgggccagcaagagcgtgtccaccagcggctacagcttcatgcactggtatcagcagaagcccggccagccccccaagctgctgatctacctggcctccaacctggaaagcggcgtgcccgatagattcagcggcagcggctctggcaccgacttcaccctgaccatcagttctcttcaggccgaggacgtggccgtgtactactgccagcacagcagagaggtgccctggacattcggccagggcacaaaggtggaaatcaagcggctcgaggacctgaagaacgtgttcccacctgaggtggccgtgttcgagcctagcgaggccgagatcagccacacccagaaagccaccctcgtgtgcctggctaccggcttctaccccgaccatgtggaactgtcttggtgggtcaacggcaaagaggtgcacagcggcgtgtgtaccgacccccagccactgaaagaacagcccgccctgaacgacagccggtactgcctgagcagcagactgagagtgtccgccaccttctggcagaacccccggaaccacttcagatgccaggtgcagttctacggcctgagcgagaacgacgagtggacccaggacagagccaagcccgtgacccagatcgtgtctgccgaagcctggggcagagccgattgcggctttaccagcgagagctaccagcagggcgtgctgagcgccaccaacctgagcgtgatcggcttcagaatcctgctgctgaaagtggccggctttaacctgctgatgaccctgcggctgtggtccagcagggccaagcgatctggatctggagcaacaaacttctcactactcaaacaagcaggtgacgtggaggagaatcccgggcctactagtatggactggatttggcgcatccttttccttgtcggcgctgctaccggcgcgcattccgggccccagctccagctgcaagagtctggacctggcctggtcaagcctagcgagacactgagcctgacctgtaccgtgtccggcgatagcatcagcagcggcgattactactggggctggatcagacagcctcctggcaaaggactggaatggatcggccacatctactacagcggcgtgacctactacaaccccagcctgaagtccagagtgaccatcagcgtggacaccagccggaaccagttctccctgaagctgtctagcgtgacagccgccgataccgccgtgtactactgcaccagagaggacagcagcaactggcggagtagaggccagggaacactggtcacagttagctctggatccggcggaggcggaagtggaggcggaggatctggcggcggaggctctttcgaacaggtgcagctggtgcagtctggggccgaagtgaagaaacctggggccagcgtgaaggtgtcctgcaaggccagcggatacacctttaccaactacggcatgaactgggtgcgccaggcccctggacagggcctggaatggatgggctggatcaacacctacaccggcgagcccacatacgccgacgccttcaagggcagattcgccttcagcctggacaccagcacctccaccgcctacctccagatcaacagcctgcggagcgacgacaccgccgtgtattattgcgccagagattacggcgactacgggatggactattggggccagggaaccaccgtgaccgtgtcctctacgcgtatccagaaccctgatcctgccgtgtaccagctgcgggatagcaagagcagcgacaagagcgtgtgtctgttcaccgacttcgacagccagaccaacgtgtcccagagcaaggactccgacgtgtacatcaccgataagtgcgtgctggacatgcggagcatggacttcaagagcaactccgccgtggcctggtccaacaagtccgatttcgcctgcgccaacgccttcaacaacagcattatccccgaggacacattcttcccaagccccgagagcagctgcgacgtgaagctggtggaaaagagcttcgagacagacaccaacctgaacttccagatcctgtacgagatcctgctgggcaaggccaccctgtacgccgtgctggtgtctgccctggtgctgatggctatggtcaagcggaaggacagccgggga

SEQ ID NO: 5653 - DNA, 2673 bp, synthetic construct
  source 1..2673: mol_type = other DNA
atggccttaccagtgaccgccttgctcctgccgctggccttgctgctccacgccgccaggccggaagtgcagctggttgaatctggcggaggactggttcagcctggcggatctctgagactgtcttgtgccgccagcggcttcagcttcagcgacttttggatgagctgggtccgacaggcccctggcaaaggacttgaatgggtcgccacaatcagccaggccggcagcgagaaggactacgtggactctgtgaagggcagattcaccatcagccgggacaacgccaagaagtccctgtacctccagatgaacagcctgagagccgaggacaccgccgtgtactattgtgcctctggcgtgtacagcttcgactacagaggccagggcaccctggtcacagtctcttctggtaccggcggaggcggatctggcggcggaggtagcggtggcggaggatctgaattcgacatcgtgatgacccagacccccctgaccctgagcgtgacaatcggacagcctgccagcatctcctgcaagagcagccagagcctgctggacagcgacggcaagacctacctgaactggctgctgcagaggccaggccagagccccgagagactgatctacctggtgtccaagctggactccggcgtgcccgatagattcacaggcagcggctccggcaccgacttcaccctgaagatcagccgggtggaagccgaggacctgggcgtgtactgttgttggcagggcacccacttcccttacaccttcggcggagggaccaaggtggaaatcaagggcctcgaggacctgaagaacgtgttcccacctgaggtggccgtgttcgagcctagcgaggccgagatcagccacacccagaaagccaccctcgtgtgcctggctaccggcttctaccccgaccatgtggaactgtcttggtgggtcaacggcaaagaggtgcacagcggcgtgtgtaccgacccccagccactgaaagaacagcccgccctgaacgacagccggtactgcctgagcagcagactgagagtgtccgccaccttctggcagaacccccggaaccacttcagatgccaggtgcagttctacggcctgagcgagaacgacgagtggacccaggacagagccaagcccgtgacccagatcgtgtctgccgaagcctggggcagagccgattgcggctttaccagcgagagctaccagcagggcgtgctgagcgccaccaacctgagcgtgatcggcttcagaatcctgctgctgaaagtggccggctttaacctgctgatgaccctgcggctgtggtccagcagggccaagcgatctggatctggagcaacaaacttctcactactcaaacaagcaggtgacgtggaggagaatcccgggcctactagtatggactggatttggcgcatccttttccttgtcggcgctgctaccggcgcgcattccgggccccagctccagctgcaagagtctggacctggcctggtcaagcctagcgagacactgagcctgacctgtaccgtgtccggcgatagcatcagcagcggcgattactactggggctggatcagacagcctcctggcaaaggactggaatggatcggccacatctactacagcggcgtgacctactacaaccccagcctgaagtccagagtgaccatcagcgtggacaccagccggaaccagttctccctgaagctgtctagcgtgacagccgccgataccgccgtgtactactgcaccagagaggacagcagcaactggcggagtagaggccagggaacactggtcacagttagctctggatccggcggaggcggaagtggaggcggaggatctggcggcggaggctctttcgaacaggtgcaactgcagcagcctggcgctgaacttgtgcggccaggcgcctctgtgaagctgagctgtaaagccagcggctacaccttcaccagctactggatgaactgggtcaagcagcgcccaggccagggcctggaatggatcggaatgatcgaccccagcgacagcgagacacactacaaccacatcttcaaggacaaggccaccctgaccgtggacaagtccagcagcacagcctacctgcaactgtccagcctgaccagcgaggacagcgccgtgtactactgcgcccggaacctgtatctgtggggccagggaacaagcgtgaccgtgtctagcacgcgtatccagaaccctgatcctgccgtgtaccagctgcgggatagcaagagcagcgacaagagcgtgtgtctgttcaccgacttcgacagccagaccaacgtgtcccagagcaaggactccgacgtgtacatcaccgataagtgcgtgctggacatgcggagcatggacttcaagagcaactccgccgtggcctggtccaacaagtccgatttcgcctgcgccaacgccttcaacaacagcattatccccgaggacacattcttcccaagccccgagagcagctgcgacgtgaagctggtggaaaagagcttcgagacagacaccaacctgaacttccagatcctgtacgagatcctgctgggcaaggccaccctgtacgccgtgctggtgtctgccctggtgctgatggctatggtcaagcggaaggacagccgggga

SEQ ID NO: 5654 - DNA, 2697 bp, synthetic construct
  source 1..2697: mol_type = other DNA
atggccttaccagtgaccgccttgctcctgccgctggccttgctgctccacgccgccaggccggaagtgcagctggttgaatctggcggaggactggttcagcctggcggatctctgagactgtcttgtgccgccagcggcttcagcttcagcgacttttggatgagctgggtccgacaggcccctggcaaaggacttgaatgggtcgccacaatcagccaggccggcagcgagaaggactacgtggactctgtgaagggcagattcaccatcagccgggacaacgccaagaagtccctgtacctccagatgaacagcctgagagccgaggacaccgccgtgtactattgtgcctctggcgtgtacagcttcgactacagaggccagggcaccctggtcacagtctcttctggtaccggcggaggcggatctggcggcggaggtagcggtggcggaggatctgaattcgacatcgtgatgacccagagccccgatagcctggccgtgtctctgggagagagagccaccatcaactgcgagagcagccagagcctgctgaacagcggcaaccagaagaactacctgacctggtatcagcagaagcccggccagccccccaagcccctgatctattgggccagcaccagagaaagcggcgtgcccgatagattcagcggcagcggaagcggcaccgacttcaccctgaccatcagttctcttcaggccgaggacgtggccgtgtactactgccagaacgactacagctacccctacaccttcggccagggcaccaagctggaaatcaagagactcgaggacctgaagaacgtgttcccacctgaggtggccgtgttcgagcctagcgaggccgagatcagccacacccagaaagccaccctcgtgtgcctggctaccggcttctaccccgaccatgtggaactgtcttggtgggtcaacggcaaagaggtgcacagcggcgtgtgtaccgacccccagccactgaaagaacagcccgccctgaacgacagccggtactgcctgagcagcagactgagagtgtccgccaccttctggcagaacccccggaaccacttcagatgccaggtgcagttctacggcctgagcgagaacgacgagtggacccaggacagagccaagcccgtgacccagatcgtgtctgccgaagcctggggcagagccgattgcggctttaccagcgagagctaccagcagggcgtgctgagcgccaccaacctgagcgtgatcggcttcagaatcctgctgctgaaagtggccggctttaacctgctgatgaccctgcggctgtggtccagcagggccaagcgatctggatctggagcaacaaacttctcactactcaaacaagcaggtgacgtggaggagaatcccgggcctactagtatggactggatttggcgcatccttttccttgtcggcgctgctaccggcgcgcattccgggccccagctccagctgcaagagtctggacctggcctggtcaagcctagcgagacactgagcctgacctgtaccgtgtccggcgatagcatcagcagcggcgattactactggggctggatcagacagcctcctggcaaaggactggaatggatcggccacatctactacagcggcgtgacctactacaaccccagcctgaagtccagagtgaccatcagcgtggacaccagccggaaccagttctccctgaagctgtctagcgtgacagccgccgataccgccgtgtactactgcaccagagaggacagcagcaactggcggagtagaggccagggaacactggtcacagttagctctggatccggcggaggcggaagtggaggcggaggatctggcggcggaggctctttcgaagaagtgcagctggtgcagtctggggccgaagtgaagaagcctggcgagagcctgaagatcagctgcaagggcagcggctacagcttcaccgactactacatgaagtgggccagacagatgcccggcaagggcctggaatggatgggcgacatcatccccagcaacggggccaccttctacaaccagaaattcaagggccaagtgaccatctccgccgacaagagcatcagcaccacctacctccagtggtccagcctgaaggccagcgacaccgccatgtactattgcgccagaagccatctgctgcgggccagttggttcgcctattggggccagggaacaatggtcacagtgtccagcacgcgtatccagaaccctgatcctgccgtgtaccagctgcgggatagcaagagcagcgacaagagcgtgtgtctgttcaccgacttcgacagccagaccaacgtgtcccagagcaaggactccgacgtgtacatcaccgataagtgcgtgctggacatgcggagcatggacttcaagagcaactccgccgtggcctggtccaacaagtccgatttcgcctgcgccaacgccttcaacaacagcattatccccgaggacacattcttcccaagccccgagagcagctgcgacgtgaagctggtggaaaagagcttcgagacagacaccaacctgaacttccagatcctgtacgagatcctgctgggcaaggccaccctgtacgccgtgctggtgtctgccctggtgctgatggctatggtcaagcggaaggacagccgggga

SEQ ID NO: 5655 - DNA, 2682 bp, synthetic construct
  source 1..2682: mol_type = other DNA
atggccttaccagtgaccgccttgctcctgccgctggccttgctgctccacgccgccaggccggaagtgcagctggttgaatctggcggaggactggttcagcctggcggatctctgagactgtcttgtgccgccagcggcttcagcttcagcgacttttggatgagctgggtccgacaggcccctggcaaaggacttgaatgggtcgccacaatcagccaggccggcagcgagaaggactacgtggactctgtgaagggcagattcaccatcagccgggacaacgccaagaagtccctgtacctccagatgaacagcctgagagccgaggacaccgccgtgtactattgtgcctctggcgtgtacagcttcgactacagaggccagggcaccctggtcacagtctcttctggtaccggcggaggcggatctggcggcggaggtagcggtggcggaggatctgaattcgacatccagatgacccagtctaccagttccctgagtgcatccctcggagacagggtgacgatcagttgcagcgcaagccaagggatcaataactatctgaactggtatcagcagaaaccggacggaacagtcgaactcctgatttattacaccagcacccttcagagtggcgtcccttcccggttcagtggctccggaagcgggaccgattactccctgaccatttctaatctggagccagaggacataggaacgtattattgccagcagtatagtaaactgccacgaacttttggaggggggacgaaactggagatcaaactcgaggacctgaagaacgtgttcccacctgaggtggccgtgttcgagcctagcgaggccgagatcagccacacccagaaagccaccctcgtgtgcctggctaccggcttctaccccgaccatgtggaactgtcttggtgggtcaacggcaaagaggtgcacagcggcgtgtgtaccgacccccagccactgaaagaacagcccgccctgaacgacagccggtactgcctgagcagcagactgagagtgtccgccaccttctggcagaacccccggaaccacttcagatgccaggtgcagttctacggcctgagcgagaacgacgagtggacccaggacagagccaagcccgtgacccagatcgtgtctgccgaagcctggggcagagccgattgcggctttaccagcgagagctaccagcagggcgtgctgagcgccaccaacctgagcgtgatcggcttcagaatcctgctgctgaaagtggccggctttaacctgctgatgaccctgcggctgtggtccagcagggccaagcgatctggatctggagcaacaaacttctcactactcaaacaagcaggtgacgtggaggagaatcccgggcctactagtatggactggatttggcgcatccttttccttgtcggcgctgctaccggcgcgcattccgggccccagctccagctgcaagagtctggacctggcctggtcaagcctagcgagacactgagcctgacctgtaccgtgtccggcgatagcatcagcagcggcgattactactggggctggatcagacagcctcctggcaaaggactggaatggatcggccacatctactacagcggcgtgacctactacaaccccagcctgaagtccagagtgaccatcagcgtggacaccagccggaaccagttctccctgaagctgtctagcgtgacagccgccgataccgccgtgtactactgcaccagagaggacagcagcaactggcggagtagaggccagggaacactggtcacagttagctctggatccggcggaggcggaagtggaggcggaggatctggcggcggaggctctttcgaacaggtgcaactccagcagtccggaagcgagcttatgatgccaggggcatcagtgaagatcagctgcaaggctactggctacaccttctctaattactggatagagtgggttaaacaaaggccagggcacggcctggaatggatcggcgagatcctgcctgggacaggccgaaccatttataacgagaagttcaaaggcaaggctactttcaccgcagatataagctctaatacagtgcaaatgcagctctcttccctgacaagtgaggatagtgccgtgtattattgcgcacgaagagattactatggaaatttttattacgctatggattattggggtcaaggaacaagtgtgaccgttagcagcacgcgtatccagaaccctgatcctgccgtgtaccagctgcgggatagcaagagcagcgacaagagcgtgtgtctgttcaccgacttcgacagccagaccaacgtgtcccagagcaaggactccgacgtgtacatcaccgataagtgcgtgctggacatgcggagcatggacttcaagagcaactccgccgtggcctggtccaacaagtccgatttcgcctgcgccaacgccttcaacaacagcattatccccgaggacacattcttcccaagccccgagagcagctgcgacgtgaagctggtggaaaagagcttcgagacagacaccaacctgaacttccagatcctgtacgagatcctgctgggcaaggccaccctgtacgccgtgctggtgtctgccctggtgctgatggctatggtcaagcggaaggacagccgggga

SEQ ID NO: 5656 - DNA, 2667 bp, synthetic construct
  source 1..2667: mol_type = other DNA
atggccttaccagtgaccgccttgctcctgccgctggccttgctgctccacgccgccaggccggaagtgcagctggttgaatctggcggaggactggttcagcctggcggatctctgagactgtcttgtgccgccagcggcttcagcttcagcgacttttggatgagctgggtccgacaggcccctggcaaaggacttgaatgggtcgccacaatcagccaggccggcagcgagaaggactacgtggactctgtgaagggcagattcaccatcagccgggacaacgccaagaagtccctgtacctccagatgaacagcctgagagccgaggacaccgccgtgtactattgtgcctctggcgtgtacagcttcgactacagaggccagggcaccctggtcacagtctcttctggtaccggcggaggcggatctggcggcggaggtagcggtggcggaggatctgaattcgacatccagatgacccagagccctgccagcctgtccgtgtctgtgggcgagacagtgaccatcacctgtcgggccagcgagaacatctacagcaacctggcctggtatcagcagaagcagggcaagagcccccaactgctggtgtacgccgccaccaatctggccgatggcgtgcccagcagattttccggctctggcagcggcacccagtacagcctgaagatcaacagcctccagagcgaggacttcggcagctactactgccagcacttctggggcacctggacctttggaggaggcaccaccctggaaatcaagctcgaggacctgaagaacgtgttcccacctgaggtggccgtgttcgagcctagcgaggccgagatcagccacacccagaaagccaccctcgtgtgcctggctaccggcttctaccccgaccatgtggaactgtcttggtgggtcaacggcaaagaggtgcacagcggcgtgtgtaccgacccccagccactgaaagaacagcccgccctgaacgacagccggtactgcctgagcagcagactgagagtgtccgccaccttctggcagaacccccggaaccacttcagatgccaggtgcagttctacggcctgagcgagaacgacgagtggacccaggacagagccaagcccgtgacccagatcgtgtctgccgaagcctggggcagagccgattgcggctttaccagcgagagctaccagcagggcgtgctgagcgccaccaacctgagcgtgatcggcttcagaatcctgctgctgaaagtggccggctttaacctgctgatgaccctgcggctgtggtccagcagggccaagcgatctggatctggagcaacaaacttctcactactcaaacaagcaggtgacgtggaggagaatcccgggcctactagtatggactggatttggcgcatccttttccttgtcggcgctgctaccggcgcgcattccgggccccagctccagctgcaagagtctggacctggcctggtcaagcctagcgagacactgagcctgacctgtaccgtgtccggcgatagcatcagcagcggcgattactactggggctggatcagacagcctcctggcaaaggactggaatggatcggccacatctactacagcggcgtgacctactacaaccccagcctgaagtccagagtgaccatcagcgtggacaccagccggaaccagttctccctgaagctgtctagcgtgacagccgccgataccgccgtgtactactgcaccagagaggacagcagcaactggcggagtagaggccagggaacactggtcacagttagctctggatccggcggaggcggaagtggaggcggaggatctggcggcggaggctctttcgaagaagtgcaactccagcagagcggccctgagcttgtgaagcctggcgcttccgtgaagatgagctgcaaggccagcggctacaccttcaccgactactacatgaagtggatgaagcagagccacggcaagtccctggaatggatcggcgacatcaaccccaacaacggcggcaccacctacaaccagaagttcaagggcaaggccaccctgaccgtggacaagagcagcagcaccgcctacatgcaactgaacagcctgaccagcgaggacagcgccgtgtactactgcgccagagactacggctacggctatttcgactactggggccagggcacaaccctgacagtgtcctctacgcgtatccagaaccctgatcctgccgtgtaccagctgcgggatagcaagagcagcgacaagagcgtgtgtctgttcaccgacttcgacagccagaccaacgtgtcccagagcaaggactccgacgtgtacatcaccgataagtgcgtgctggacatgcggagcatggacttcaagagcaactccgccgtggcctggtccaacaagtccgatttcgcctgcgccaacgccttcaacaacagcattatccccgaggacacattcttcccaagccccgagagcagctgcgacgtgaagctggtggaaaagagcttcgagacagacaccaacctgaacttccagatcctgtacgagatcctgctgggcaaggccaccctgtacgccgtgctggtgtctgccctggtgctgatggctatggtcaagcggaaggacagccgggga

SEQ ID NO: 5657 - DNA, 2676 bp, synthetic construct
  source 1..2676: mol_type = other DNA
atggccttaccagtgaccgccttgctcctgccgctggccttgctgctccacgccgccaggccggaagtgcagctggttgaatctggcggaggactggttcagcctggcggatctctgagactgtcttgtgccgccagcggcttcagcttcagcgacttttggatgagctgggtccgacaggcccctggcaaaggacttgaatgggtcgccacaatcagccaggccggcagcgagaaggactacgtggactctgtgaagggcagattcaccatcagccgggacaacgccaagaagtccctgtacctccagatgaacagcctgagagccgaggacaccgccgtgtactattgtgcctctggcgtgtacagcttcgactacagaggccagggcaccctggtcacagtctcttctggtaccggcggaggcggatctggcggcggaggtagcggtggcggaggatctgaattcgagatcgtgctgacacagagccctggcaccctgagcctgtctccaggcgaaagagccacactgagctgtcgggcctctcagagcgtgggaggctacctggcttggtatcagcagaagccaggccaggcccccagactgctgatctacgacgccagcaatcgggccacaggcatccccgccagattttctggcagcggctccggcaccgacttcaccctgacaatcagcagcctggaacccgaggacttcgccgtgtactactgccagcagcggaacaactggccccccatgtacacattcggccagggcaccaagctggaaatcaagagactcgaggacctgaagaacgtgttcccacctgaggtggccgtgttcgagcctagcgaggccgagatcagccacacccagaaagccaccctcgtgtgcctggctaccggcttctaccccgaccatgtggaactgtcttggtgggtcaacggcaaagaggtgcacagcggcgtgtgtaccgacccccagccactgaaagaacagcccgccctgaacgacagccggtactgcctgagcagcagactgagagtgtccgccaccttctggcagaacccccggaaccacttcagatgccaggtgcagttctacggcctgagcgagaacgacgagtggacccaggacagagccaagcccgtgacccagatcgtgtctgccgaagcctggggcagagccgattgcggctttaccagcgagagctaccagcagggcgtgctgagcgccaccaacctgagcgtgatcggcttcagaatcctgctgctgaaagtggccggctttaacctgctgatgaccctgcggctgtggtccagcagggccaagcgatctggatctggagcaacaaacttctcactactcaaacaagcaggtgacgtggaggagaatcccgggcctactagtatggactggatttggcgcatccttttccttgtcggcgctgctaccggcgcgcattccgggccccagctccagctgcaagagtctggacctggcctggtcaagcctagcgagacactgagcctgacctgtaccgtgtccggcgatagcatcagcagcggcgattactactggggctggatcagacagcctcctggcaaaggactggaatggatcggccacatctactacagcggcgtgacctactacaaccccagcctgaagtccagagtgaccatcagcgtggacaccagccggaaccagttctccctgaagctgtctagcgtgacagccgccgataccgccgtgtactactgcaccagagaggacagcagcaactggcggagtagaggccagggaacactggtcacagttagctctggatccggcggaggcggaagtggaggcggaggatctggcggcggaggctctttcgaacaggtgcaactggtgcagagcggagccgaagtgaagaaacccggcagcagcgtgaaggtgtcctgcaaggcttccggcggcaccttcagcagctacgccatttcttgggtgcgccaggctcctggacagggcctggaatggatgggcggcatcatccctatcctgggcaccgccaactacgcccagaaattccagggcagagtgaccatcaccgccgacgagagcaccagcaccgcctacatggaactgagcagcctgcggagcgaggacacagccgtgtattattgcgccagatggggcggaggggccttcgacatttggggccagggaacaatggtcaccgtgtccagcacgcgtatccagaaccctgatcctgccgtgtaccagctgcgggatagcaagagcagcgacaagagcgtgtgtctgttcaccgacttcgacagccagaccaacgtgtcccagagcaaggactccgacgtgtacatcaccgataagtgcgtgctggacatgcggagcatggacttcaagagcaactccgccgtggcctggtccaacaagtccgatttcgcctgcgccaacgccttcaacaacagcattatccccgaggacacattcttcccaagccccgagagcagctgcgacgtgaagctggtggaaaagagcttcgagacagacaccaacctgaacttccagatcctgtacgagatcctgctgggcaaggccaccctgtacgccgtgctggtgtctgccctggtgctgatggctatggtcaagcggaaggacagccgggga

SEQ ID NO: 5658 - DNA, 2661 bp, synthetic construct
  source 1..2661: mol_type = other DNA
atggccttaccagtgaccgccttgctcctgccgctggccttgctgctccacgccgccaggccggaagtgcagctggttgaatctggcggaggactggttcagcctggcggatctctgagactgtcttgtgccgccagcggcttcagcttcagcgacttttggatgagctgggtccgacaggcccctggcaaaggacttgaatgggtcgccacaatcagccaggccggcagcgagaaggactacgtggactctgtgaagggcagattcaccatcagccgggacaacgccaagaagtccctgtacctccagatgaacagcctgagagccgaggacaccgccgtgtactattgtgcctctggcgtgtacagcttcgactacagaggccagggcaccctggtcacagtctcttctggtaccggcggaggcggatctggcggcggaggtagcggtggcggaggatctgaattccagatcgtgctgacacagagccctgccctgatgagcgccagccctggcgagaaagtgaccatgacctgtagcgccagcagcagcgtgcgctacatgtactggtatcagcagaagcccagaagcagccccaagccctggattcacctgaccagcaatctggcctctggcgtgcccgctagattttccggctctggcagcggcaccagctacagcctgaccatcagcagcatggaagccgaggacgccgccacctactactgccagcagtggtccagccaccccttcacatttggctccggcaccaagctggaaatcaagctcgaggacctgaagaacgtgttcccacctgaggtggccgtgttcgagcctagcgaggccgagatcagccacacccagaaagccaccctcgtgtgcctggctaccggcttctaccccgaccatgtggaactgtcttggtgggtcaacggcaaagaggtgcacagcggcgtgtgtaccgacccccagccactgaaagaacagcccgccctgaacgacagccggtactgcctgagcagcagactgagagtgtccgccaccttctggcagaacccccggaaccacttcagatgccaggtgcagttctacggcctgagcgagaacgacgagtggacccaggacagagccaagcccgtgacccagatcgtgtctgccgaagcctggggcagagccgattgcggctttaccagcgagagctaccagcagggcgtgctgagcgccaccaacctgagcgtgatcggcttcagaatcctgctgctgaaagtggccggctttaacctgctgatgaccctgcggctgtggtccagcagggccaagcgatctggatctggagcaacaaacttctcactactcaaacaagcaggtgacgtggaggagaatcccgggcctactagtatggactggatttggcgcatccttttccttgtcggcgctgctaccggcgcgcattccgggccccagctccagctgcaagagtctggacctggcctggtcaagcctagcgagacactgagcctgacctgtaccgtgtccggcgatagcatcagcagcggcgattactactggggctggatcagacagcctcctggcaaaggactggaatggatcggccacatctactacagcggcgtgacctactacaaccccagcctgaagtccagagtgaccatcagcgtggacaccagccggaaccagttctccctgaagctgtctagcgtgacagccgccgataccgccgtgtactactgcaccagagaggacagcagcaactggcggagtagaggccagggaacactggtcacagttagctctggatccggcggaggcggaagtggaggcggaggatctggcggcggaggctctttcgaagatgtgcaactccaggaaagcggccctggccttgtgaagcctagccagagcctgtccctgacctgtaccgtgaccggcttcagcatcaccagcgactactcttggaactggatcagacagttccctggcaacaaactggaatggatgggctacatcagctactccggccacacctcctacaaccccagcctggaaagccggatctccatcaccagagacaccagcaagaaccagttcttcttgcaactgaacagcgtgaccaccgaggataccgccacatattactgtaccagaggcaactgggacgtggtgtactggggccagggcacacttgtgaccgtgtctgctacgcgtatccagaaccctgatcctgccgtgtaccagctgcgggatagcaagagcagcgacaagagcgtgtgtctgttcaccgacttcgacagccagaccaacgtgtcccagagcaaggactccgacgtgtacatcaccgataagtgcgtgctggacatgcggagcatggacttcaagagcaactccgccgtggcctggtccaacaagtccgatttcgcctgcgccaacgccttcaacaacagcattatccccgaggacacattcttcccaagccccgagagcagctgcgacgtgaagctggtggaaaagagcttcgagacagacaccaacctgaacttccagatcctgtacgagatcctgctgggcaaggccaccctgtacgccgtgctggtgtctgccctggtgctgatggctatggtcaagcggaaggacagccgggga

SEQ ID NO: 5659 - DNA, 2691 bp, synthetic construct
  source 1..2691: mol_type = other DNA
atggccttaccagtgaccgccttgctcctgccgctggccttgctgctccacgccgccaggccggaagtgcagctggttgaatctggcggaggactggttcagcctggcggatctctgagactgtcttgtgccgccagcggcttcagcttcagcgacttttggatgagctgggtccgacaggcccctggcaaaggacttgaatgggtcgccacaatcagccaggccggcagcgagaaggactacgtggactctgtgaagggcagattcaccatcagccgggacaacgccaagaagtccctgtacctccagatgaacagcctgagagccgaggacaccgccgtgtactattgtgcctctggcgtgtacagcttcgactacagaggccagggcaccctggtcacagtctcttctggtaccggcggaggcggatctggcggcggaggtagcggtggcggaggatctgaattcgacgtcgtgatgacccagagccctctgagcctgcctgtgacactgggacagcctgccagcatctcctgtcggagcagccagagcatcgtgcacagcgacggcaacacctacctggaatggtatcagcagcggccaggccagagccccagacggctgatctacaaggtgtccaacagattcagcggcgtgcccgacagattctccggcagcggctctggcaccgacttcaccctgaagatcagcagagtggaagccgaggacgtgggcgtgtactactgttttcaaggcagccacgccccctggacctttggcggaggaacaaaggtggaaatcaagctcgaggacctgaagaacgtgttcccacctgaggtggccgtgttcgagcctagcgaggccgagatcagccacacccagaaagccaccctcgtgtgcctggctaccggcttctaccccgaccatgtggaactgtcttggtgggtcaacggcaaagaggtgcacagcggcgtgtgtaccgacccccagccactgaaagaacagcccgccctgaacgacagccggtactgcctgagcagcagactgagagtgtccgccaccttctggcagaacccccggaaccacttcagatgccaggtgcagttctacggcctgagcgagaacgacgagtggacccaggacagagccaagcccgtgacccagatcgtgtctgccgaagcctggggcagagccgattgcggctttaccagcgagagctaccagcagggcgtgctgagcgccaccaacctgagcgtgatcggcttcagaatcctgctgctgaaagtggccggctttaacctgctgatgaccctgcggctgtggtccagcagggccaagcgatctggatctggagcaacaaacttctcactactcaaacaagcaggtgacgtggaggagaatcccgggcctactagtatggactggatttggcgcatccttttccttgtcggcgctgctaccggcgcgcattccgggccccagctccagctgcaagagtctggacctggcctggtcaagcctagcgagacactgagcctgacctgtaccgtgtccggcgatagcatcagcagcggcgattactactggggctggatcagacagcctcctggcaaaggactggaatggatcggccacatctactacagcggcgtgacctactacaaccccagcctgaagtccagagtgaccatcagcgtggacaccagccggaaccagttctccctgaagctgtctagcgtgacagccgccgataccgccgtgtactactgcaccagagaggacagcagcaactggcggagtagaggccagggaacactggtcacagttagctctggatccggcggaggcggaagtggaggcggaggatctggcggcggaggctctttcgaagaagtgcaactggtggaatcaggcggcggactggtgcagcctggcggatctctgagactgagctgtgccgccagcggcttcaccttcagcagctacggaatgcactgggtgcgccaggcccctggcaaaggactggaatgggtggcctacatcaccaccagaagcagcaccatctactacgccgacagcgtgaagggccggttcaccatctccagagacaacgccaagaacagcctgtacctccagatgaactccctgcgggccgaggacaccgccgtgtactattgcaccagagagcccctgaccggctactacgctatggactattggggccagggcaccagcgtgaccgtgtctagtacgcgtatccagaaccctgatcctgccgtgtaccagctgcgggatagcaagagcagcgacaagagcgtgtgtctgttcaccgacttcgacagccagaccaacgtgtcccagagcaaggactccgacgtgtacatcaccgataagtgcgtgctggacatgcggagcatggacttcaagagcaactccgccgtggcctggtccaacaagtccgatttcgcctgcgccaacgccttcaacaacagcattatccccgaggacacattcttcccaagccccgagagcagctgcgacgtgaagctggtggaaaagagcttcgagacagacaccaacctgaacttccagatcctgtacgagatcctgctgggcaaggccaccctgtacgccgtgctggtgtctgccctggtgctgatggctatggtcaagcggaaggacagccgggga

SEQ ID NO: 5660 - DNA, 2667 bp, synthetic construct
  source 1..2667: mol_type = other DNA
atggccttaccagtgaccgccttgctcctgccgctggccttgctgctccacgccgccaggccggaagtgcagctggttgaatctggcggaggactggttcagcctggcggatctctgagactgtcttgtgccgccagcggcttcagcttcagcgacttttggatgagctgggtccgacaggcccctggcaaaggacttgaatgggtcgccacaatcagccaggccggcagcgagaaggactacgtggactctgtgaagggcagattcaccatcagccgggacaacgccaagaagtccctgtacctccagatgaacagcctgagagccgaggacaccgccgtgtactattgtgcctctggcgtgtacagcttcgactacagaggccagggcaccctggtcacagtctcttctggtaccggcggaggcggatctggcggcggaggtagcggtggcggaggatctgaattcgacatccagatgacccagagccccagcagcctgtctgccagcgtgggcgacagagtgaccatcacctgtagagccagccagagcatcagcctgtggctgaactggtatcagcagaagcccggcaaggcccccaagctgctgatctacgccgccagcacactccagagcggcgtgccaagcagattttccggcagcggctccggcaccgacttcaccctgacaatcagctccctccagcccgaggacttcgccacctactactgccagcagtactacaccagcccctacaccttcggccagggcaccaaggtggaaatcaagagactcgaggacctgaagaacgtgttcccacctgaggtggccgtgttcgagcctagcgaggccgagatcagccacacccagaaagccaccctcgtgtgcctggctaccggcttctaccccgaccatgtggaactgtcttggtgggtcaacggcaaagaggtgcacagcggcgtgtgtaccgacccccagccactgaaagaacagcccgccctgaacgacagccggtactgcctgagcagcagactgagagtgtccgccaccttctggcagaacccccggaaccacttcagatgccaggtgcagttctacggcctgagcgagaacgacgagtggacccaggacagagccaagcccgtgacccagatcgtgtctgccgaagcctggggcagagccgattgcggctttaccagcgagagctaccagcagggcgtgctgagcgccaccaacctgagcgtgatcggcttcagaatcctgctgctgaaagtggccggctttaacctgctgatgaccctgcggctgtggtccagcagggccaagcgatctggatctggagcaacaaacttctcactactcaaacaagcaggtgacgtggaggagaatcccgggcctactagtatggactggatttggcgcatccttttccttgtcggcgctgctaccggcgcgcattccgggccccagctccagctgcaagagtctggacctggcctggtcaagcctagcgagacactgagcctgacctgtaccgtgtccggcgatagcatcagcagcggcgattactactggggctggatcagacagcctcctggcaaaggactggaatggatcggccacatctactacagcggcgtgacctactacaaccccagcctgaagtccagagtgaccatcagcgtggacaccagccggaaccagttctccctgaagctgtctagcgtgacagccgccgataccgccgtgtactactgcaccagagaggacagcagcaactggcggagtagaggccagggaacactggtcacagttagctctggatccggcggaggcggaagtggaggcggaggatctggcggcggaggctctttcgaacaggtgcaactgctggaatctggcggcggactggtgcagcctggcggatctctgagactgagctgtgccgccagcggcttcaccttcagcagctacgccatgagctgggtgcgccaggcccctggaaaaggactggaatgggtgtccgtgatccggtccagcggcagcagcacctattacgccgatagcgtgaagggccggttcaccatcagccgggacaacagcaagaacaccctgtacctccagatgaacagcctgcgggccgaggacaccgccgtgtactattgtgctaggggaggcggctacttcgactactggggccagggaacactcgtgaccgtgtcctctacgcgtatccagaaccctgatcctgccgtgtaccagctgcgggatagcaagagcagcgacaagagcgtgtgtctgttcaccgacttcgacagccagaccaacgtgtcccagagcaaggactccgacgtgtacatcaccgataagtgcgtgctggacatgcggagcatggacttcaagagcaactccgccgtggcctggtccaacaagtccgatttcgcctgcgccaacgccttcaacaacagcattatccccgaggacacattcttcccaagccccgagagcagctgcgacgtgaagctggtggaaaagagcttcgagacagacaccaacctgaacttccagatcctgtacgagatcctgctgggcaaggccaccctgtacgccgtgctggtgtctgccctggtgctgatggctatggtcaagcggaaggacagccgggga

SEQ ID NO: 5661 - DNA, 2676 bp, synthetic construct
  source 1..2676: mol_type = other DNA
atggccttaccagtgaccgccttgctcctgccgctggccttgctgctccacgccgccaggccggaagtgcagctggttgaatctggcggaggactggttcagcctggcggatctctgagactgtcttgtgccgccagcggcttcagcttcagcgacttttggatgagctgggtccgacaggcccctggcaaaggacttgaatgggtcgccacaatcagccaggccggcagcgagaaggactacgtggactctgtgaagggcagattcaccatcagccgggacaacgccaagaagtccctgtacctccagatgaacagcctgagagccgaggacaccgccgtgtactattgtgcctctggcgtgtacagcttcgactacagaggccagggcaccctggtcacagtctcttctggtaccggcggaggcggatctggcggcggaggtagcggtggcggaggatctgaattcgacatccagatgacccagagccccagcagcctgtctgccagcgtgggcgacagagtgaccatcacctgtagagccagccagagcatcagcagctacctgaactggtatcagcagaagcccggcaaggcccccaaactgctgatctacgccgtgtccacactccagagcggcgtgcccagcagattttctggcagcggctccggcaccgacttcaccctgacaatcagctccctccagcccgaggacttcgccacctactactgtcagcagagcggcaccttccctcccaccacatttggacagggcaccaaggtggaaatcaagagactcgaggacctgaagaacgtgttcccacctgaggtggccgtgttcgagcctagcgaggccgagatcagccacacccagaaagccaccctcgtgtgcctggctaccggcttctaccccgaccatgtggaactgtcttggtgggtcaacggcaaagaggtgcacagcggcgtgtgtaccgacccccagccactgaaagaacagcccgccctgaacgacagccggtactgcctgagcagcagactgagagtgtccgccaccttctggcagaacccccggaaccacttcagatgccaggtgcagttctacggcctgagcgagaacgacgagtggacccaggacagagccaagcccgtgacccagatcgtgtctgccgaagcctggggcagagccgattgcggctttaccagcgagagctaccagcagggcgtgctgagcgccaccaacctgagcgtgatcggcttcagaatcctgctgctgaaagtggccggctttaacctgctgatgaccctgcggctgtggtccagcagggccaagcgatctggatctggagcaacaaacttctcactactcaaacaagcaggtgacgtggaggagaatcccgggcctactagtatggactggatttggcgcatccttttccttgtcggcgctgctaccggcgcgcattccgggccccagctccagctgcaagagtctggacctggcctggtcaagcctagcgagacactgagcctgacctgtaccgtgtccggcgatagcatcagcagcggcgattactactggggctggatcagacagcctcctggcaaaggactggaatggatcggccacatctactacagcggcgtgacctactacaaccccagcctgaagtccagagtgaccatcagcgtggacaccagccggaaccagttctccctgaagctgtctagcgtgacagccgccgataccgccgtgtactactgcaccagagaggacagcagcaactggcggagtagaggccagggaacactggtcacagttagctctggatccggcggaggcggaagtggaggcggaggatctggcggcggaggctctttcgaacaggtgcaactgctggaatctggcggcggactggtgcagcctggcggatctctgagactgagctgtgccgccagcggcttcaccttcagcagccacggaatgcactgggtgcgccaggcccctggaaagggactggaatgggtgtccgtgatctccggcagcggcagcaataccggctacgccgatagcgtgaagggccggttcaccatcagccgggacaacagcaagaacaccctgtacctccagatgaacagcctgcgggccgaggacaccgccgtgtactattgtgccagacagtggggcagctacgccttcgattcttggggccagggcaccctcgtgaccgtgtcatctacgcgtatccagaaccctgatcctgccgtgtaccagctgcgggatagcaagagcagcgacaagagcgtgtgtctgttcaccgacttcgacagccagaccaacgtgtcccagagcaaggactccgacgtgtacatcaccgataagtgcgtgctggacatgcggagcatggacttcaagagcaactccgccgtggcctggtccaacaagtccgatttcgcctgcgccaacgccttcaacaacagcattatccccgaggacacattcttcccaagccccgagagcagctgcgacgtgaagctggtggaaaagagcttcgagacagacaccaacctgaacttccagatcctgtacgagatcctgctgggcaaggccaccctgtacgccgtgctggtgtctgccctggtgctgatggctatggtcaagcggaaggacagccgggga

SEQ ID NO: 5662 - DNA, 2706 bp, synthetic construct
  source 1..2706: mol_type = other DNA
atggccttaccagtgaccgccttgctcctgccgctggccttgctgctccacgccgccaggccggaagtgcagctggttgaatctggcggaggactggttcagcctggcggatctctgagactgtcttgtgccgccagcggcttcagcttcagcgacttttggatgagctgggtccgacaggcccctggcaaaggacttgaatgggtcgccacaatcagccaggccggcagcgagaaggactacgtggactctgtgaagggcagattcaccatcagccgggacaacgccaagaagtccctgtacctccagatgaacagcctgagagccgaggacaccgccgtgtactattgtgcctctggcgtgtacagcttcgactacagaggccagggcaccctggtcacagtctcttctggtaccggcggaggcggatctggcggcggaggtagcggtggcggaggatctgaattcgacatcgtgatgagccagagccctagcagcctggccgtgtccgtgggcgagaaagtgaccatgagctgcaagagcagccagtccctgctgcacagcagcaaccagaagaactacctggcctggtatcagcagaagcccggccagtcccccaaggtgctgatctactgggccagcaccagagaaagcggcgtgcccgatagattcaccggcagcggctctggcaccgacttcaccctgaccatcaccagcgtgaagtccgaggacctggctgtgtactactgccagcagtattacagctacccctggaccttcggcggaggcacccggctggaaatcaaaagactcgaggacctgaagaacgtgttcccacctgaggtggccgtgttcgagcctagcgaggccgagatcagccacacccagaaagccaccctcgtgtgcctggctaccggcttctaccccgaccatgtggaactgtcttggtgggtcaacggcaaagaggtgcacagcggcgtgtgtaccgacccccagccactgaaagaacagcccgccctgaacgacagccggtactgcctgagcagcagactgagagtgtccgccaccttctggcagaacccccggaaccacttcagatgccaggtgcagttctacggcctgagcgagaacgacgagtggacccaggacagagccaagcccgtgacccagatcgtgtctgccgaagcctggggcagagccgattgcggctttaccagcgagagctaccagcagggcgtgctgagcgccaccaacctgagcgtgatcggcttcagaatcctgctgctgaaagtggccggctttaacctgctgatgaccctgcggctgtggtccagcagggccaagcgatctggatctggagcaacaaacttctcactactcaaacaagcaggtgacgtggaggagaatcccgggcctactagtatggactggatttggcgcatccttttccttgtcggcgctgctaccggcgcgcattccgggccccagctccagctgcaagagtctggacctggcctggtcaagcctagcgagacactgagcctgacctgtaccgtgtccggcgatagcatcagcagcggcgattactactggggctggatcagacagcctcctggcaaaggactggaatggatcggccacatctactacagcggcgtgacctactacaaccccagcctgaagtccagagtgaccatcagcgtggacaccagccggaaccagttctccctgaagctgtctagcgtgacagccgccgataccgccgtgtactactgcaccagagaggacagcagcaactggcggagtagaggccagggaacactggtcacagttagctctggatccggcggaggcggaagtggaggcggaggatctggcggcggaggctctttcgaagaagtgcaactccagcagagcgtggccgagcttgtgaagcctggcgcttccgtgaagatgtcctgcaaggtgtccggctacaccctgacagaccacaccatccactggatgaagcagcggcctgagcagggcctggaatggatcggctacatctaccccagggacggcatcaccggctacaacgagaagttcaagggcaaggccacactgaccgccgacaccagcagcagcacagcctacatgcaactgaacagcctgaccagcgaggacagcgccgtgtacttctgtgccagatggggctacagctacagaaactacgcctactactacgactactggggccagggcacaaccctgaccgtgtctagtacgcgtatccagaaccctgatcctgccgtgtaccagctgcgggatagcaagagcagcgacaagagcgtgtgtctgttcaccgacttcgacagccagaccaacgtgtcccagagcaaggactccgacgtgtacatcaccgataagtgcgtgctggacatgcggagcatggacttcaagagcaactccgccgtggcctggtccaacaagtccgatttcgcctgcgccaacgccttcaacaacagcattatccccgaggacacattcttcccaagccccgagagcagctgcgacgtgaagctggtggaaaagagcttcgagacagacaccaacctgaacttccagatcctgtacgagatcctgctgggcaaggccaccctgtacgccgtgctggtgtctgccctggtgctgatggctatggtcaagcggaaggacagccgggga

SEQ ID NO: 5663 - DNA, 2697 bp, synthetic construct
  source 1..2697: mol_type = other DNA
atggccttaccagtgaccgccttgctcctgccgctggccttgctgctccacgccgccaggccggaagtgcagctggttgaatctggcggaggactggttcagcctggcggatctctgagactgtcttgtgccgccagcggcttcagcttcagcgacttttggatgagctgggtccgacaggcccctggcaaaggacttgaatgggtcgccacaatcagccaggccggcagcgagaaggactacgtggactctgtgaagggcagattcaccatcagccgggacaacgccaagaagtccctgtacctccagatgaacagcctgagagccgaggacaccgccgtgtactattgtgcctctggcgtgtacagcttcgactacagaggccagggcaccctggtcacagtctcttctggtaccggcggaggcggatctggcggcggaggtagcggtggcggaggatctgaattcgagatcgtgctgacacagagccctggcaccctgagcctgtctccaggcgaaagagccacactgagctgtcgggccagccagagcgtgtccagctcttacctggcctggtatcagcagaagcccggccaggctccccggctgctgatctacggaacaagcagcagagccaccggcatccccgacagattttctggcagcggctccggcaccgacttcaccctgacaatcagcagactggaacccgaggacttcgccgtgtactactgccagcagtacggcagcagccccttcacctttggcggaggcaccaaggtggaaatcaagagactcgaggacctgaagaacgtgttcccacctgaggtggccgtgttcgagcctagcgaggccgagatcagccacacccagaaagccaccctcgtgtgcctggctaccggcttctaccccgaccatgtggaactgtcttggtgggtcaacggcaaagaggtgcacagcggcgtgtgtaccgacccccagccactgaaagaacagcccgccctgaacgacagccggtactgcctgagcagcagactgagagtgtccgccaccttctggcagaacccccggaaccacttcagatgccaggtgcagttctacggcctgagcgagaacgacgagtggacccaggacagagccaagcccgtgacccagatcgtgtctgccgaagcctggggcagagccgattgcggctttaccagcgagagctaccagcagggcgtgctgagcgccaccaacctgagcgtgatcggcttcagaatcctgctgctgaaagtggccggctttaacctgctgatgaccctgcggctgtggtccagcagggccaagcgatctggatctggagcaacaaacttctcactactcaaacaagcaggtgacgtggaggagaatcccgggcctactagtatggactggatttggcgcatccttttccttgtcggcgctgctaccggcgcgcattccgggccccagctccagctgcaagagtctggacctggcctggtcaagcctagcgagacactgagcctgacctgtaccgtgtccggcgatagcatcagcagcggcgattactactggggctggatcagacagcctcctggcaaaggactggaatggatcggccacatctactacagcggcgtgacctactacaaccccagcctgaagtccagagtgaccatcagcgtggacaccagccggaaccagttctccctgaagctgtctagcgtgacagccgccgataccgccgtgtactactgcaccagagaggacagcagcaactggcggagtagaggccagggaacactggtcacagttagctctggatccggcggaggcggaagtggaggcggaggatctggcggcggaggctctttcgaacaggtgcaactccaggaatctggccccggactggctaagcccagcgagacactgagcctgacctgtaccgtgtccggcgacagcatcaccagctactactggtcctggatcagacagccccctggcaagggcctggaatggatcggctacatctactacagcggcagcaccaactacaaccccagcctgaagtccagagtgaccatcagcgtggacaccagcaagaaccagttctccctgaagctgagcagcgtgacagccgccgacaccgccgtgtattattgcgccagagatcagcggagaatcgccgctgccggcacccacttttacggcatggatgtgtggggccagggcaccaccgtgaccgtgtcatctacgcgtatccagaaccctgatcctgccgtgtaccagctgcgggatagcaagagcagcgacaagagcgtgtgtctgttcaccgacttcgacagccagaccaacgtgtcccagagcaaggactccgacgtgtacatcaccgataagtgcgtgctggacatgcggagcatggacttcaagagcaactccgccgtggcctggtccaacaagtccgatttcgcctgcgccaacgccttcaacaacagcattatccccgaggacacattcttcccaagccccgagagcagctgcgacgtgaagctggtggaaaagagcttcgagacagacaccaacctgaacttccagatcctgtacgagatcctgctgggcaaggccaccctgtacgccgtgctggtgtctgccctggtgctgatggctatggtcaagcggaaggacagccgggga

SEQ ID NO: 5664 - DNA, 2673 bp, synthetic construct
  source 1..2673: mol_type = other DNA
atggccttaccagtgaccgccttgctcctgccgctggccttgctgctccacgccgccaggccggaagtgcagctggttgaatctggcggaggactggttcagcctggcggatctctgagactgtcttgtgccgccagcggcttcagcttcagcgacttttggatgagctgggtccgacaggcccctggcaaaggacttgaatgggtcgccacaatcagccaggccggcagcgagaaggactacgtggactctgtgaagggcagattcaccatcagccgggacaacgccaagaagtccctgtacctccagatgaacagcctgagagccgaggacaccgccgtgtactattgtgcctctggcgtgtacagcttcgactacagaggccagggcaccctggtcacagtctcttctggtaccggcggaggcggatctggcggcggaggtagcggtggcggaggatctgaattcgacatcctgctgacccagagccccgtgatcctgtccgtgtctcctggcgagagagtgtccttcagctgtcgggccagccagagcatcggcaccaacatccactggtatcagcagcggaccaacggcagccccagactgctgattaagtacgccagcgagtccatcagcggcatccccagcagattttccggcagcggctccggcaccgacttcaccctgagcatcaacagcgtggaaagcgaggacattgccgactactactgccagcagaacaacaactggcccaccaccttcggagccggcaccaagctggaactgaagctcgaggacctgaagaacgtgttcccacctgaggtggccgtgttcgagcctagcgaggccgagatcagccacacccagaaagccaccctcgtgtgcctggctaccggcttctaccccgaccatgtggaactgtcttggtgggtcaacggcaaagaggtgcacagcggcgtgtgtaccgacccccagccactgaaagaacagcccgccctgaacgacagccggtactgcctgagcagcagactgagagtgtccgccaccttctggcagaacccccggaaccacttcagatgccaggtgcagttctacggcctgagcgagaacgacgagtggacccaggacagagccaagcccgtgacccagatcgtgtctgccgaagcctggggcagagccgattgcggctttaccagcgagagctaccagcagggcgtgctgagcgccaccaacctgagcgtgatcggcttcagaatcctgctgctgaaagtggccggctttaacctgctgatgaccctgcggctgtggtccagcagggccaagcgatctggatctggagcaacaaacttctcactactcaaacaagcaggtgacgtggaggagaatcccgggcctactagtatggactggatttggcgcatccttttccttgtcggcgctgctaccggcgcgcattccgggccccagctccagctgcaagagtctggacctggcctggtcaagcctagcgagacactgagcctgacctgtaccgtgtccggcgatagcatcagcagcggcgattactactggggctggatcagacagcctcctggcaaaggactggaatggatcggccacatctactacagcggcgtgacctactacaaccccagcctgaagtccagagtgaccatcagcgtggacaccagccggaaccagttctccctgaagctgtctagcgtgacagccgccgataccgccgtgtactactgcaccagagaggacagcagcaactggcggagtagaggccagggaacactggtcacagttagctctggatccggcggaggcggaagtggaggcggaggatctggcggcggaggctctttcgaacaggtgcagctgaagcagagcggacctggcctggtgcagcctagccagagcctgtccatcacctgtaccgtgtccggcttcagcctgaccaactacggcgtgcactgggtgcgccagagccctggaaaaggactggaatggctgggagtgatttggagcggcggcaacaccgactacaacacccccttcaccagcagactgtctatcaacaaggacaacagcaagagccaggtgttcttcaagatgaacagcctccagagcaacgacaccgccatctactactgtgctagagccctgacctactatgactacgagttcgcctactggggccagggcacactcgtgacagtgtctgctacgcgtatccagaaccctgatcctgccgtgtaccagctgcgggatagcaagagcagcgacaagagcgtgtgtctgttcaccgacttcgacagccagaccaacgtgtcccagagcaaggactccgacgtgtacatcaccgataagtgcgtgctggacatgcggagcatggacttcaagagcaactccgccgtggcctggtccaacaagtccgatttcgcctgcgccaacgccttcaacaacagcattatccccgaggacacattcttcccaagccccgagagcagctgcgacgtgaagctggtggaaaagagcttcgagacagacaccaacctgaacttccagatcctgtacgagatcctgctgggcaaggccaccctgtacgccgtgctggtgtctgccctggtgctgatggctatggtcaagcggaaggacagccgggga

SEQ ID NO: 5665 - DNA, 2652 bp, synthetic construct
  source 1..2652: mol_type = other DNA
atggccttaccagtgaccgccttgctcctgccgctggccttgctgctccacgccgccaggccggaagtgcagctggttgaatctggcggaggactggttcagcctggcggatctctgagactgtcttgtgccgccagcggcttcagcttcagcgacttttggatgagctgggtccgacaggcccctggcaaaggacttgaatgggtcgccacaatcagccaggccggcagcgagaaggactacgtggactctgtgaagggcagattcaccatcagccgggacaacgccaagaagtccctgtacctccagatgaacagcctgagagccgaggacaccgccgtgtactattgtgcctctggcgtgtacagcttcgactacagaggccagggcaccctggtcacagtctcttctggtaccggcggaggcggatctggcggcggaggtagcggtggcggaggatctgaattcatgacccagagccccaagttcctgctggtgtctgccggcgacagagtgaccctgacatgcaaggccagccagagcgtgaacaacgacgtgtactggtatcagcaggaacccggccagtcccccaagctgctgatctactgggccagcaccagagaaagcggcgtgcccgatagattcaccggcagcggctctggcaccgacttcaccctgacaatcagcagcgtgcaggccgaggacctggccgtgtactactgcaagcagagctacaacctgtacaccttcggcggaggcaccaagctggaaatcaagagactcgaggacctgaagaacgtgttcccacctgaggtggccgtgttcgagcctagcgaggccgagatcagccacacccagaaagccaccctcgtgtgcctggctaccggcttctaccccgaccatgtggaactgtcttggtgggtcaacggcaaagaggtgcacagcggcgtgtgtaccgacccccagccactgaaagaacagcccgccctgaacgacagccggtactgcctgagcagcagactgagagtgtccgccaccttctggcagaacccccggaaccacttcagatgccaggtgcagttctacggcctgagcgagaacgacgagtggacccaggacagagccaagcccgtgacccagatcgtgtctgccgaagcctggggcagagccgattgcggctttaccagcgagagctaccagcagggcgtgctgagcgccaccaacctgagcgtgatcggcttcagaatcctgctgctgaaagtggccggctttaacctgctgatgaccctgcggctgtggtccagcagggccaagcgatctggatctggagcaacaaacttctcactactcaaacaagcaggtgacgtggaggagaatcccgggcctactagtatggactggatttggcgcatccttttccttgtcggcgctgctaccggcgcgcattccgggccccagctccagctgcaagagtctggacctggcctggtcaagcctagcgagacactgagcctgacctgtaccgtgtccggcgatagcatcagcagcggcgattactactggggctggatcagacagcctcctggcaaaggactggaatggatcggccacatctactacagcggcgtgacctactacaaccccagcctgaagtccagagtgaccatcagcgtggacaccagccggaaccagttctccctgaagctgtctagcgtgacagccgccgataccgccgtgtactactgcaccagagaggacagcagcaactggcggagtagaggccagggaacactggtcacagttagctctggatccggcggaggcggaagtggaggcggaggatctggcggcggaggctctttcgaagaatctggaagaggactggtgcagcctggcggcagcagaaagctgtcttgtgccgccagcggcttcaccttcagcaccagcggaatgcactgggtgcgccaggcccctgagaagggactggaatgggtggcctacatcagctccggcagcaccaccatctaccacgccgataccgtgaagggccggttcaccatcagccgggacaaccccaagaataccctgttcctccagatgaccagcctgcggagcgaggacaccgccatgtactattgctgcgccagaagcggccagttcggcaactacttcgactactggggccagggcaccaccctgaccgtgtcatctacgcgtatccagaaccctgatcctgccgtgtaccagctgcgggatagcaagagcagcgacaagagcgtgtgtctgttcaccgacttcgacagccagaccaacgtgtcccagagcaaggactccgacgtgtacatcaccgataagtgcgtgctggacatgcggagcatggacttcaagagcaactccgccgtggcctggtccaacaagtccgatttcgcctgcgccaacgccttcaacaacagcattatccccgaggacacattcttcccaagccccgagagcagctgcgacgtgaagctggtggaaaagagcttcgagacagacaccaacctgaacttccagatcctgtacgagatcctgctgggcaaggccaccctgtacgccgtgctggtgtctgccctggtgctgatggctatggtcaagcggaaggacagccgggga

SEQ ID NO: 5666 - DNA, 2667 bp, synthetic construct
  source 1..2667: mol_type = other DNA
atggccttaccagtgaccgccttgctcctgccgctggccttgctgctccacgccgccaggccggaagtgcagctggttgaatctggcggaggactggttcagcctggcggatctctgagactgtcttgtgccgccagcggcttcagcttcagcgacttttggatgagctgggtccgacaggcccctggcaaaggacttgaatgggtcgccacaatcagccaggccggcagcgagaaggactacgtggactctgtgaagggcagattcaccatcagccgggacaacgccaagaagtccctgtacctccagatgaacagcctgagagccgaggacaccgccgtgtactattgtgcctctggcgtgtacagcttcgactacagaggccagggcaccctggtcacagtctcttctggtaccggcggaggcggatctggcggcggaggtagcggtggcggaggatctgaattccagagcccatctagcctggctgtgtctgccggcgagaaagtgaccatgagctgcaagagcagccagagcctgctgaacagccggacccggaagaactacctggcctggtatcagcagaagcccggccagagccccaagctgctgatctactgggccagcaccagagaaagcggcgtgcccgatagattcaccggctctggcagcggcaccgacttcaccctgacaatcagcagcgtgcaggccgaggacctggccgtgtactactgcaagcagagcaacctgtacaccttcggcggaggcaccaagctggaaatcaagctcgaggacctgaagaacgtgttcccacctgaggtggccgtgttcgagcctagcgaggccgagatcagccacacccagaaagccaccctcgtgtgcctggctaccggcttctaccccgaccatgtggaactgtcttggtgggtcaacggcaaagaggtgcacagcggcgtgtgtaccgacccccagccactgaaagaacagcccgccctgaacgacagccggtactgcctgagcagcagactgagagtgtccgccaccttctggcagaacccccggaaccacttcagatgccaggtgcagttctacggcctgagcgagaacgacgagtggacccaggacagagccaagcccgtgacccagatcgtgtctgccgaagcctggggcagagccgattgcggctttaccagcgagagctaccagcagggcgtgctgagcgccaccaacctgagcgtgatcggcttcagaatcctgctgctgaaagtggccggctttaacctgctgatgaccctgcggctgtggtccagcagggccaagcgatctggatctggagcaacaaacttctcactactcaaacaagcaggtgacgtggaggagaatcccgggcctactagtatggactggatttggcgcatccttttccttgtcggcgctgctaccggcgcgcattccgggccccagctccagctgcaagagtctggacctggcctggtcaagcctagcgagacactgagcctgacctgtaccgtgtccggcgatagcatcagcagcggcgattactactggggctggatcagacagcctcctggcaaaggactggaatggatcggccacatctactacagcggcgtgacctactacaaccccagcctgaagtccagagtgaccatcagcgtggacaccagccggaaccagttctccctgaagctgtctagcgtgacagccgccgataccgccgtgtactactgcaccagagaggacagcagcaactggcggagtagaggccagggaacactggtcacagttagctctggatccggcggaggcggaagtggaggcggaggatctggcggcggaggctctttcgaacaggtgcagctggaagagtctggacccgagcttgtgaagcctggggccagcgtgaagctgtcctgtaaagccagcggctacaccttcaccgagtacatcatccactgggtcaagcagcggagcggccagggcctggaatggatcggctggttttaccctggctccggcagcatcaagtacaacgagaagttcaaggacaaggccaccctgaccgccgacaagtccagcagcaccgtgtacatggaactgagcggcctgaccagcgaggacagcgccgtgtatttctgcgccagacacgacggctacagctacttcgactattggggccagggcaccacactgaccgtgtcctctacgcgtatccagaaccctgatcctgccgtgtaccagctgcgggatagcaagagcagcgacaagagcgtgtgtctgttcaccgacttcgacagccagaccaacgtgtcccagagcaaggactccgacgtgtacatcaccgataagtgcgtgctggacatgcggagcatggacttcaagagcaactccgccgtggcctggtccaacaagtccgatttcgcctgcgccaacgccttcaacaacagcattatccccgaggacacattcttcccaagccccgagagcagctgcgacgtgaagctggtggaaaagagcttcgagacagacaccaacctgaacttccagatcctgtacgagatcctgctgggcaaggccaccctgtacgccgtgctggtgtctgccctggtgctgatggctatggtcaagcggaaggacagccgggga

SEQ ID NO: 5667 - DNA, 2676 bp, synthetic construct
  source 1..2676: mol_type = other DNA
atggccttaccagtgaccgccttgctcctgccgctggccttgctgctccacgccgccaggccggaagtgcagctggttgaatctggcggaggactggttcagcctggcggatctctgagactgtcttgtgccgccagcggcttcagcttcagcgacttttggatgagctgggtccgacaggcccctggcaaaggacttgaatgggtcgccacaatcagccaggccggcagcgagaaggactacgtggactctgtgaagggcagattcaccatcagccgggacaacgccaagaagtccctgtacctccagatgaacagcctgagagccgaggacaccgccgtgtactattgtgcctctggcgtgtacagcttcgactacagaggccagggcaccctggtcacagtctcttctggtaccggcggaggcggatctggcggcggaggtagcggtggcggaggatctgaattcgacatccagatgacccagagccccagcagcctgtctgcctctctgggcgagagagtgtccctgacctgtcgggccacacaggaactgagcggctacctgtcttggctgcagcagaagcccgacggcaccatcaagcggctgatctacgccgccagcaccctggatagcggcgtgcccaagagattcagcggcaacagaagcggcagcgactacagcctgaccatcagctccctggaaagcgaggacttcgccgactactactgcctgcagtacgccatctacccctacaccttcggcggaggcaccaagctggaaatcaagctcgaggacctgaagaacgtgttcccacctgaggtggccgtgttcgagcctagcgaggccgagatcagccacacccagaaagccaccctcgtgtgcctggctaccggcttctaccccgaccatgtggaactgtcttggtgggtcaacggcaaagaggtgcacagcggcgtgtgtaccgacccccagccactgaaagaacagcccgccctgaacgacagccggtactgcctgagcagcagactgagagtgtccgccaccttctggcagaacccccggaaccacttcagatgccaggtgcagttctacggcctgagcgagaacgacgagtggacccaggacagagccaagcccgtgacccagatcgtgtctgccgaagcctggggcagagccgattgcggctttaccagcgagagctaccagcagggcgtgctgagcgccaccaacctgagcgtgatcggcttcagaatcctgctgctgaaagtggccggctttaacctgctgatgaccctgcggctgtggtccagcagggccaagcgatctggatctggagcaacaaacttctcactactcaaacaagcaggtgacgtggaggagaatcccgggcctactagtatggactggatttggcgcatccttttccttgtcggcgctgctaccggcgcgcattccgggccccagctccagctgcaagagtctggacctggcctggtcaagcctagcgagacactgagcctgacctgtaccgtgtccggcgatagcatcagcagcggcgattactactggggctggatcagacagcctcctggcaaaggactggaatggatcggccacatctactacagcggcgtgacctactacaaccccagcctgaagtccagagtgaccatcagcgtggacaccagccggaaccagttctccctgaagctgtctagcgtgacagccgccgataccgccgtgtactactgcaccagagaggacagcagcaactggcggagtagaggccagggaacactggtcacagttagctctggatccggcggaggcggaagtggaggcggaggatctggcggcggaggctctttcgaagaggtgcaactgcagcagtctggccccgagcttgtgaagcctggcgcctccgtgaagatgagctgcaaggccagcggctacacctttaccagctacttcatccactgggtcaagcagaaacccggccagggcctggaatggatcggcttcatcaacccttacaacgacggcagcaagtacaacgagaagttcaagggcaaggccaccctgaccagcgacaagagcagcagcaccgcctacatggaactgtccagcctgacatccgaggacagcgccgtgtactactgcaccagggacgacggctactacggctacgccatggactactggggccagggaacaagcgtcaccgtgtcctctacgcgtatccagaaccctgatcctgccgtgtaccagctgcgggatagcaagagcagcgacaagagcgtgtgtctgttcaccgacttcgacagccagaccaacgtgtcccagagcaaggactccgacgtgtacatcaccgataagtgcgtgctggacatgcggagcatggacttcaagagcaactccgccgtggcctggtccaacaagtccgatttcgcctgcgccaacgccttcaacaacagcattatccccgaggacacattcttcccaagccccgagagcagctgcgacgtgaagctggtggaaaagagcttcgagacagacaccaacctgaacttccagatcctgtacgagatcctgctgggcaaggccaccctgtacgccgtgctggtgtctgccctggtgctgatggctatggtcaagcggaaggacagccgggga

SEQ ID NO: 5668 - DNA, 2691 bp, synthetic construct
  source 1..2691: mol_type = other DNA
atggccttaccagtgaccgccttgctcctgccgctggccttgctgctccacgccgccaggccggaagtgcagctggttgaatctggcggaggactggttcagcctggcggatctctgagactgtcttgtgccgccagcggcttcagcttcagcgacttttggatgagctgggtccgacaggcccctggcaaaggacttgaatgggtcgccacaatcagccaggccggcagcgagaaggactacgtggactctgtgaagggcagattcaccatcagccgggacaacgccaagaagtccctgtacctccagatgaacagcctgagagccgaggacaccgccgtgtactattgtgcctctggcgtgtacagcttcgactacagaggccagggcaccctggtcacagtctcttctggtaccggcggaggcggatctggcggcggaggtagcggtggcggaggatctgaattcgacaccatcgtgctgacacagagccctgcttccctggccgtgtccctgggacagagagccaccatctcttgcagagccagcgagagcgtggacagctacggcaacagcttcatgcactggtatcagcagaagcccggccagccccccaagctgctgatctacctggcctccaacctggaaagcggcgtgcccgccagattttctggcagcggcagcagaaccgacttcaccctgaccatcgaccccgtggaagccgatgatgccgccacctactactgccagcagaacaactacgacccctggaccttcggcggaggcaccaagctggaaatcaagctcgaggacctgaagaacgtgttcccacctgaggtggccgtgttcgagcctagcgaggccgagatcagccacacccagaaagccaccctcgtgtgcctggctaccggcttctaccccgaccatgtggaactgtcttggtgggtcaacggcaaagaggtgcacagcggcgtgtgtaccgacccccagccactgaaagaacagcccgccctgaacgacagccggtactgcctgagcagcagactgagagtgtccgccaccttctggcagaacccccggaaccacttcagatgccaggtgcagttctacggcctgagcgagaacgacgagtggacccaggacagagccaagcccgtgacccagatcgtgtctgccgaagcctggggcagagccgattgcggctttaccagcgagagctaccagcagggcgtgctgagcgccaccaacctgagcgtgatcggcttcagaatcctgctgctgaaagtggccggctttaacctgctgatgaccctgcggctgtggtccagcagggccaagcgatctggatctggagcaacaaacttctcactactcaaacaagcaggtgacgtggaggagaatcccgggcctactagtatggactggatttggcgcatccttttccttgtcggcgctgctaccggcgcgcattccgggccccagctccagctgcaagagtctggacctggcctggtcaagcctagcgagacactgagcctgacctgtaccgtgtccggcgatagcatcagcagcggcgattactactggggctggatcagacagcctcctggcaaaggactggaatggatcggccacatctactacagcggcgtgacctactacaaccccagcctgaagtccagagtgaccatcagcgtggacaccagccggaaccagttctccctgaagctgtctagcgtgacagccgccgataccgccgtgtactactgcaccagagaggacagcagcaactggcggagtagaggccagggaacactggtcacagttagctctggatccggcggaggcggaagtggaggcggaggatctggcggcggaggctctttcgaagaagtgcaactccagcagagcggccctgagcttgtgaagcctggcgcttccgtgaagatgagctgcaaggccagcggctacaccttcaccagctacgtgatgcactgggtcaagcagaaacctggacagggcctggaatggatcggctacatcaacccctacaacgacggcaccaagtacaacgagaagttcaagggcaaggccaccctgacaagcgacaccagcagcagcaccgcctacatggaactgaacagcctgaccagcgaggacagcgccgtgtacttctgcgccagacccatctacttcgacaacgactacttcgattactggggccagggcaccaccctgaaggtgtcctctacgcgtatccagaaccctgatcctgccgtgtaccagctgcgggatagcaagagcagcgacaagagcgtgtgtctgttcaccgacttcgacagccagaccaacgtgtcccagagcaaggactccgacgtgtacatcaccgataagtgcgtgctggacatgcggagcatggacttcaagagcaactccgccgtggcctggtccaacaagtccgatttcgcctgcgccaacgccttcaacaacagcattatccccgaggacacattcttcccaagccccgagagcagctgcgacgtgaagctggtggaaaagagcttcgagacagacaccaacctgaacttccagatcctgtacgagatcctgctgggcaaggccaccctgtacgccgtgctggtgtctgccctggtgctgatggctatggtcaagcggaaggacagccgggga

SEQ ID NO: 5669 - DNA, 2676 bp, synthetic construct
  source 1..2676: mol_type = other DNA
atggccttaccagtgaccgccttgctcctgccgctggccttgctgctccacgccgccaggccggaagtgcagctggttgaatctggcggaggactggttcagcctggcggatctctgagactgtcttgtgccgccagcggcttcagcttcagcgacttttggatgagctgggtccgacaggcccctggcaaaggacttgaatgggtcgccacaatcagccaggccggcagcgagaaggactacgtggactctgtgaagggcagattcaccatcagccgggacaacgccaagaagtccctgtacctccagatgaacagcctgagagccgaggacaccgccgtgtactattgtgcctctggcgtgtacagcttcgactacagaggccagggcaccctggtcacagtctcttctggtaccggcggaggcggatctggcggcggaggtagcggtggcggaggatctgaattcgacatccagatgacccagagccccagcagcctgtctgccagcgtgggcgacagagtgaccatcacatgcaaggccagccaggacgtgggaatcgccgtggcctggtatcagcagaaacccggcaaggtgcccaagctgctgatctactgggccagcaccagacacaccggcgtgcccgatagattttccggcagcggctccggcaccgacttcaccctgacaatcagctccctccagcccgaggacgtggcaacctactactgccagcagtacagcagctacccctacaccttcggccagggcaccaaggtggaaatcaagagactcgaggacctgaagaacgtgttcccacctgaggtggccgtgttcgagcctagcgaggccgagatcagccacacccagaaagccaccctcgtgtgcctggctaccggcttctaccccgaccatgtggaactgtcttggtgggtcaacggcaaagaggtgcacagcggcgtgtgtaccgacccccagccactgaaagaacagcccgccctgaacgacagccggtactgcctgagcagcagactgagagtgtccgccaccttctggcagaacccccggaaccacttcagatgccaggtgcagttctacggcctgagcgagaacgacgagtggacccaggacagagccaagcccgtgacccagatcgtgtctgccgaagcctggggcagagccgattgcggctttaccagcgagagctaccagcagggcgtgctgagcgccaccaacctgagcgtgatcggcttcagaatcctgctgctgaaagtggccggctttaacctgctgatgaccctgcggctgtggtccagcagggccaagcgatctggatctggagcaacaaacttctcactactcaaacaagcaggtgacgtggaggagaatcccgggcctactagtatggactggatttggcgcatccttttccttgtcggcgctgctaccggcgcgcattccgggccccagctccagctgcaagagtctggacctggcctggtcaagcctagcgagacactgagcctgacctgtaccgtgtccggcgatagcatcagcagcggcgattactactggggctggatcagacagcctcctggcaaaggactggaatggatcggccacatctactacagcggcgtgacctactacaaccccagcctgaagtccagagtgaccatcagcgtggacaccagccggaaccagttctccctgaagctgtctagcgtgacagccgccgataccgccgtgtactactgcaccagagaggacagcagcaactggcggagtagaggccagggaacactggtcacagttagctctggatccggcggaggcggaagtggaggcggaggatctggcggcggaggctctttcgaagaagtgcaactggtggaatcaggcggcggactggtgcagcctggcggatctctgagactgagctgtgccgccagcggcttcgacttcagccggtactggatgagctgggtgcgccaggcccctggcaaaggactggaatggatcggcgagatcaaccccgacagcagcaccatcaactacgcccccagcctgaaggacaagttcatcatcagccgggacaacgccaagaacagcctgtacctccagatgaactccctgcgggccgaggacaccgccgtgtactattgcgccagacccgacggcaactactggtacttcgacgtgtggggccagggaaccctcgtgaccgtgtcatctacgcgtatccagaaccctgatcctgccgtgtaccagctgcgggatagcaagagcagcgacaagagcgtgtgtctgttcaccgacttcgacagccagaccaacgtgtcccagagcaaggactccgacgtgtacatcaccgataagtgcgtgctggacatgcggagcatggacttcaagagcaactccgccgtggcctggtccaacaagtccgatttcgcctgcgccaacgccttcaacaacagcattatccccgaggacacattcttcccaagccccgagagcagctgcgacgtgaagctggtggaaaagagcttcgagacagacaccaacctgaacttccagatcctgtacgagatcctgctgggcaaggccaccctgtacgccgtgctggtgtctgccctggtgctgatggctatggtcaagcggaaggacagccgggga

SEQ ID NO: 5670 - DNA, 2676 bp, synthetic construct
  source 1..2676: mol_type = other DNA
atggccttaccagtgaccgccttgctcctgccgctggccttgctgctccacgccgccaggccggaagtgcagctggttgaatctggcggaggactggttcagcctggcggatctctgagactgtcttgtgccgccagcggcttcagcttcagcgacttttggatgagctgggtccgacaggcccctggcaaaggacttgaatgggtcgccacaatcagccaggccggcagcgagaaggactacgtggactctgtgaagggcagattcaccatcagccgggacaacgccaagaagtccctgtacctccagatgaacagcctgagagccgaggacaccgccgtgtactattgtgcctctggcgtgtacagcttcgactacagaggccagggcaccctggtcacagtctcttctggtaccggcggaggcggatctggcggcggaggtagcggtggcggaggatctgaattcgacatcgtgatgacccagagccagaagagcatgagcaccagcgtgggcgacagagtgagcatcacctgcaaggccagccaggacgtgatcaccggcgtggcctggtaccagcagaagcccggccagagccccaagctgctgatctacagcgccagctacagatacaccggcgtgcccgacagattcaccggcagcggcagcggcaccgacttcaccttcaccatcagcaacgtgcaggccgaggacctggccgtgtactactgccagcagcactacagcacccccctgaccttcggcgccggcaccaagctggagctgaagctcgaggacctgaagaacgtgttcccacctgaggtggccgtgttcgagcctagcgaggccgagatcagccacacccagaaagccaccctcgtgtgcctggctaccggcttctaccccgaccatgtggaactgtcttggtgggtcaacggcaaagaggtgcacagcggcgtgtgtaccgacccccagccactgaaagaacagcccgccctgaacgacagccggtactgcctgagcagcagactgagagtgtccgccaccttctggcagaacccccggaaccacttcagatgccaggtgcagttctacggcctgagcgagaacgacgagtggacccaggacagagccaagcccgtgacccagatcgtgtctgccgaagcctggggcagagccgattgcggctttaccagcgagagctaccagcagggcgtgctgagcgccaccaacctgagcgtgatcggcttcagaatcctgctgctgaaagtggccggctttaacctgctgatgaccctgcggctgtggtccagcagggccaagcgatctggatctggagcaacaaacttctcactactcaaacaagcaggtgacgtggaggagaatcccgggcctactagtatggactggatttggcgcatccttttccttgtcggcgctgctaccggcgcgcattccgggccccagctccagctgcaagagtctggacctggcctggtcaagcctagcgagacactgagcctgacctgtaccgtgtccggcgatagcatcagcagcggcgattactactggggctggatcagacagcctcctggcaaaggactggaatggatcggccacatctactacagcggcgtgacctactacaaccccagcctgaagtccagagtgaccatcagcgtggacaccagccggaaccagttctccctgaagctgtctagcgtgacagccgccgataccgccgtgtactactgcaccagagaggacagcagcaactggcggagtagaggccagggaacactggtcacagttagctctggatccggcggaggcggaagtggaggcggaggatctggcggcggaggctctttcgaacaggtgcagctgcagcagcccggcgccgagctggtgagacccggcgccagcgtgaagctgagctgcaaggccagcggctacagcttcaccacctactggatgaactgggtgaagcagagacccggccagggcctggagtggatcggcatgatccaccccagcgacagcgagaccagactgaaccagaagttcaaggacaaggccaccctgaccgtggacaagagcagcagcaccgcctacatgcagctgagcagccccaccagcgaggacagcgccgtgtactactgcgccagaagcaccatgatcgccaccagagccatggactactggggccagggcaccagcgtgaccgtgagcagcacgcgtatccagaaccctgatcctgccgtgtaccagctgcgggatagcaagagcagcgacaagagcgtgtgtctgttcaccgacttcgacagccagaccaacgtgtcccagagcaaggactccgacgtgtacatcaccgataagtgcgtgctggacatgcggagcatggacttcaagagcaactccgccgtggcctggtccaacaagtccgatttcgcctgcgccaacgccttcaacaacagcattatccccgaggacacattcttcccaagccccgagagcagctgcgacgtgaagctggtggaaaagagcttcgagacagacaccaacctgaacttccagatcctgtacgagatcctgctgggcaaggccaccctgtacgccgtgctggtgtctgccctggtgctgatggctatggtcaagcggaaggacagccgggga

SEQ ID NO: 5671 - DNA, 2694 bp, synthetic construct
  source 1..2694: mol_type = other DNA
atggccttaccagtgaccgccttgctcctgccgctggccttgctgctccacgccgccaggccggaagtgcagctggttgaatctggcggaggactggttcagcctggcggatctctgagactgtcttgtgccgccagcggcttcagcttcagcgacttttggatgagctgggtccgacaggcccctggcaaaggacttgaatgggtcgccacaatcagccaggccggcagcgagaaggactacgtggactctgtgaagggcagattcaccatcagccgggacaacgccaagaagtccctgtacctccagatgaacagcctgagagccgaggacaccgccgtgtactattgtgcctctggcgtgtacagcttcgactacagaggccagggcaccctggtcacagtctcttctggtaccggcggaggcggatctggcggcggaggtagcggtggcggaggatctgaattccagagcgtgctgacacagcctccatccgtgtctggcgctccaggccagagagtgaccatctcctgtaccggcagcggcagcaacatcggagccccctacgacgtgtcctggtatcagcaactgcctggcaccgcccccaagctgctgatctaccacaacaacaagcggcccagcggcgtgcccgatagattcagcggctctaagagcggcaccagcgccagcctggctatcactggactccaggccgaggacgaggccgactactactgtgccacagtggaagccggcctgagcggctctgtgtttggcggcggaacaaagctgaccgtgctgggagctctcgaggacctgaagaacgtgttcccacctgaggtggccgtgttcgagcctagcgaggccgagatcagccacacccagaaagccaccctcgtgtgcctggctaccggcttctaccccgaccatgtggaactgtcttggtgggtcaacggcaaagaggtgcacagcggcgtgtgtaccgacccccagccactgaaagaacagcccgccctgaacgacagccggtactgcctgagcagcagactgagagtgtccgccaccttctggcagaacccccggaaccacttcagatgccaggtgcagttctacggcctgagcgagaacgacgagtggacccaggacagagccaagcccgtgacccagatcgtgtctgccgaagcctggggcagagccgattgcggctttaccagcgagagctaccagcagggcgtgctgagcgccaccaacctgagcgtgatcggcttcagaatcctgctgctgaaagtggccggctttaacctgctgatgaccctgcggctgtggtccagcagggccaagcgatctggatctggagcaacaaacttctcactactcaaacaagcaggtgacgtggaggagaatcccgggcctactagtatggactggatttggcgcatccttttccttgtcggcgctgctaccggcgcgcattccgggccccagctccagctgcaagagtctggacctggcctggtcaagcctagcgagacactgagcctgacctgtaccgtgtccggcgatagcatcagcagcggcgattactactggggctggatcagacagcctcctggcaaaggactggaatggatcggccacatctactacagcggcgtgacctactacaaccccagcctgaagtccagagtgaccatcagcgtggacaccagccggaaccagttctccctgaagctgtctagcgtgacagccgccgataccgccgtgtactactgcaccagagaggacagcagcaactggcggagtagaggccagggaacactggtcacagttagctctggatccggcggaggcggaagtggaggcggaggatctggcggcggaggctctttcgaacaggtgcaactggtgcagagcggagccgaagtgaagaaacctggggccagcgtgaaggtgtcctgcaaggtgtccggctacaccctgaccgagctgagcattcactgggtgcgccaggcccctggcaagggactggaatggatgggcggcttcgaccccgaagagaacgagatcgtgtacgcccagcggttccagggcagagtgacaatgaccgaggacaccagcaccgacaccgcctacatggaactgagcagcctgcggagcgaggataccgccgtgtactactgcgccatcgtgggcagcttcagccctctgacactgggcctgtggggccagggaactatggtcaccgtgtccagcacgcgtatccagaaccctgatcctgccgtgtaccagctgcgggatagcaagagcagcgacaagagcgtgtgtctgttcaccgacttcgacagccagaccaacgtgtcccagagcaaggactccgacgtgtacatcaccgataagtgcgtgctggacatgcggagcatggacttcaagagcaactccgccgtggcctggtccaacaagtccgatttcgcctgcgccaacgccttcaacaacagcattatccccgaggacacattcttcccaagccccgagagcagctgcgacgtgaagctggtggaaaagagcttcgagacagacaccaacctgaacttccagatcctgtacgagatcctgctgggcaaggccaccctgtacgccgtgctggtgtctgccctggtgctgatggctatggtcaagcggaaggacagccgggga

SEQ ID NO: 5672 - DNA, 2694 bp, synthetic construct
  source 1..2694: mol_type = other DNA
atggccttaccagtgaccgccttgctcctgccgctggccttgctgctccacgccgccaggccggaagtgcagctggttgaatctggcggaggactggttcagcctggcggatctctgagactgtcttgtgccgccagcggcttcagcttcagcgacttttggatgagctgggtccgacaggcccctggcaaaggacttgaatgggtcgccacaatcagccaggccggcagcgagaaggactacgtggactctgtgaagggcagattcaccatcagccgggacaacgccaagaagtccctgtacctccagatgaacagcctgagagccgaggacaccgccgtgtactattgtgcctctggcgtgtacagcttcgactacagaggccagggcaccctggtcacagtctcttctggtaccggcggaggcggatctggcggcggaggtagcggtggcggaggatctgaattccagagcgtgctgacacagcctccatccgtgtctggcgctccaggccagagagtgaccatctcctgtaccggcagcggcagcaacatcggagccccctacgacgtgtcctggtatcagcaactgcctggcaccgcccccaagctgctgatctaccacaacaacaagcggcccagcggcgtgcccgatagattcagcggctctaagagcggcaccagcgccagcctggctatcactggactccaggccgaggacgaggccgactactactgccagagctacgacagcagcagcatcagcaccatcttcggcggaggcaccaagctgacagtgctgggagctctcgaggacctgaagaacgtgttcccacctgaggtggccgtgttcgagcctagcgaggccgagatcagccacacccagaaagccaccctcgtgtgcctggctaccggcttctaccccgaccatgtggaactgtcttggtgggtcaacggcaaagaggtgcacagcggcgtgtgtaccgacccccagccactgaaagaacagcccgccctgaacgacagccggtactgcctgagcagcagactgagagtgtccgccaccttctggcagaacccccggaaccacttcagatgccaggtgcagttctacggcctgagcgagaacgacgagtggacccaggacagagccaagcccgtgacccagatcgtgtctgccgaagcctggggcagagccgattgcggctttaccagcgagagctaccagcagggcgtgctgagcgccaccaacctgagcgtgatcggcttcagaatcctgctgctgaaagtggccggctttaacctgctgatgaccctgcggctgtggtccagcagggccaagcgatctggatctggagcaacaaacttctcactactcaaacaagcaggtgacgtggaggagaatcccgggcctactagtatggactggatttggcgcatccttttccttgtcggcgctgctaccggcgcgcattccgggccccagctccagctgcaagagtctggacctggcctggtcaagcctagcgagacactgagcctgacctgtaccgtgtccggcgatagcatcagcagcggcgattactactggggctggatcagacagcctcctggcaaaggactggaatggatcggccacatctactacagcggcgtgacctactacaaccccagcctgaagtccagagtgaccatcagcgtggacaccagccggaaccagttctccctgaagctgtctagcgtgacagccgccgataccgccgtgtactactgcaccagagaggacagcagcaactggcggagtagaggccagggaacactggtcacagttagctctggatccggcggaggcggaagtggaggcggaggatctggcggcggaggctctttcgaacaggtgcaactggtgcagagcggagccgaagtgaagaaacctggggccagcgtgaaggtgtcctgcaaggtgtccggctacaccctgaccgagctgagcattcactgggtgcgccaggcccctggcaagggactggaatggatgggcggcttcgaccccgaagagaacgagatcgtgtacgcccagcggttccagggcagagtgacaatgaccgaggacaccagcaccgacaccgcctacatggaactgagcagcctgcggagcgaggataccgccgtgtactactgtgccatcgtgggcagcttcagcggaatcgcctacagaccttggggccagggcacaatggtcaccgtgtctagcacgcgtatccagaaccctgatcctgccgtgtaccagctgcgggatagcaagagcagcgacaagagcgtgtgtctgttcaccgacttcgacagccagaccaacgtgtcccagagcaaggactccgacgtgtacatcaccgataagtgcgtgctggacatgcggagcatggacttcaagagcaactccgccgtggcctggtccaacaagtccgatttcgcctgcgccaacgccttcaacaacagcattatccccgaggacacattcttcccaagccccgagagcagctgcgacgtgaagctggtggaaaagagcttcgagacagacaccaacctgaacttccagatcctgtacgagatcctgctgggcaaggccaccctgtacgccgtgctggtgtctgccctggtgctgatggctatggtcaagcggaaggacagccgggga

SEQ ID NO: 5673 - DNA, 2658 bp, synthetic construct
  source 1..2658: mol_type = other DNA
atggccttaccagtgaccgccttgctcctgccgctggccttgctgctccacgccgccaggccggaagtgcagctggttgaatctggcggaggactggttcagcctggcggatctctgagactgtcttgtgccgccagcggcttcagcttcagcgacttttggatgagctgggtccgacaggcccctggcaaaggacttgaatgggtcgccacaatcagccaggccggcagcgagaaggactacgtggactctgtgaagggcagattcaccatcagccgggacaacgccaagaagtccctgtacctccagatgaacagcctgagagccgaggacaccgccgtgtactattgtgcctctggcgtgtacagcttcgactacagaggccagggcaccctggtcacagtctcttctggtaccggcggaggcggatctggcggcggaggtagcggtggcggaggatctgaattcgacatccagatgacccagagccccagcagcctgtctgccagcgtgggcgacagagtgaccatcacctgtagagccagccagggcatcagaaacaacctggcctggtatcagcagaagcccggcaaggcccccaagcggctgatctacgccgccagcaatctccagagcggcgtgcccagcagattcacaggctctggcagcggcaccgagttcaccctgatcgtgtctagcctccagcccgaggacttcgccacctactactgcctccagcaccacagctaccccctgacatctggcggaggcaccaaggtggaactcgaggacctgaagaacgtgttcccacctgaggtggccgtgttcgagcctagcgaggccgagatcagccacacccagaaagccaccctcgtgtgcctggctaccggcttctaccccgaccatgtggaactgtcttggtgggtcaacggcaaagaggtgcacagcggcgtgtgtaccgacccccagccactgaaagaacagcccgccctgaacgacagccggtactgcctgagcagcagactgagagtgtccgccaccttctggcagaacccccggaaccacttcagatgccaggtgcagttctacggcctgagcgagaacgacgagtggacccaggacagagccaagcccgtgacccagatcgtgtctgccgaagcctggggcagagccgattgcggctttaccagcgagagctaccagcagggcgtgctgagcgccaccaacctgagcgtgatcggcttcagaatcctgctgctgaaagtggccggctttaacctgctgatgaccctgcggctgtggtccagcagggccaagcgatctggatctggagcaacaaacttctcactactcaaacaagcaggtgacgtggaggagaatcccgggcctactagtatggactggatttggcgcatccttttccttgtcggcgctgctaccggcgcgcattccgggccccagctccagctgcaagagtctggacctggcctggtcaagcctagcgagacactgagcctgacctgtaccgtgtccggcgatagcatcagcagcggcgattactactggggctggatcagacagcctcctggcaaaggactggaatggatcggccacatctactacagcggcgtgacctactacaaccccagcctgaagtccagagtgaccatcagcgtggacaccagccggaaccagttctccctgaagctgtctagcgtgacagccgccgataccgccgtgtactactgcaccagagaggacagcagcaactggcggagtagaggccagggaacactggtcacagttagctctggatccggcggaggcggaagtggaggcggaggatctggcggcggaggctctttcgaagaggtgcaggtgctggaaagtggcggaggactggtgcagcctggcggctctctgagactgtcttgtgccgccagcggcttcaccttcagcagctacgccatgagctgggtgcgccaggcccctggaaaaggactggaatgggtgtccgccatcagcggctctggcgggtctaccaactacgccgatagcgtgaagggccggttcaccatcagccgggacaacagcaagaacaccctgtacctccagatgaacagcctgcgggccgaggacaccgccgtgtattattgtgccggcagcagcgggtggagcgagtattggggacagggcaccctcgtgaccgtgtcctctacgcgtatccagaaccctgatcctgccgtgtaccagctgcgggatagcaagagcagcgacaagagcgtgtgtctgttcaccgacttcgacagccagaccaacgtgtcccagagcaaggactccgacgtgtacatcaccgataagtgcgtgctggacatgcggagcatggacttcaagagcaactccgccgtggcctggtccaacaagtccgatttcgcctgcgccaacgccttcaacaacagcattatccccgaggacacattcttcccaagccccgagagcagctgcgacgtgaagctggtggaaaagagcttcgagacagacaccaacctgaacttccagatcctgtacgagatcctgctgggcaaggccaccctgtacgccgtgctggtgtctgccctggtgctgatggctatggtcaagcggaaggacagccgggga

SEQ ID NO: 5674 - DNA, 2676 bp, synthetic construct
  source 1..2676: mol_type = other DNA
atggccttaccagtgaccgccttgctcctgccgctggccttgctgctccacgccgccaggccggaagtgcagctggttgaatctggcggaggactggttcagcctggcggatctctgagactgtcttgtgccgccagcggcttcagcttcagcgacttttggatgagctgggtccgacaggcccctggcaaaggacttgaatgggtcgccacaatcagccaggccggcagcgagaaggactacgtggactctgtgaagggcagattcaccatcagccgggacaacgccaagaagtccctgtacctccagatgaacagcctgagagccgaggacaccgccgtgtactattgtgcctctggcgtgtacagcttcgactacagaggccagggcaccctggtcacagtctcttctggtaccggcggaggcggatctggcggcggaggtagcggtggcggaggatctgaattcgacgagatccagctggtgcagagcggagccgaagtgaagaagcctggcgagagcctgcggatcagctgcaagggcagcggcttcaacatcgaggactactacatccactgggtgcgccagatgcccggcaagggcctggaatggatgggcagaatcgaccccgagaacgacgagactaagtacggccccatcttccagggccacgtgaccatcagcgccgacaccagcatcaacaccgtgtacctccagtggtccagcctgaaggccagcgacaccgccatgtactactgcgcctttagaggcggcgtgtactggggccagggcaccacagtgacagtgtctagcctcgaggacctgaagaacgtgttcccacctgaggtggccgtgttcgagcctagcgaggccgagatcagccacacccagaaagccaccctcgtgtgcctggctaccggcttctaccccgaccatgtggaactgtcttggtgggtcaacggcaaagaggtgcacagcggcgtgtgtaccgacccccagccactgaaagaacagcccgccctgaacgacagccggtactgcctgagcagcagactgagagtgtccgccaccttctggcagaacccccggaaccacttcagatgccaggtgcagttctacggcctgagcgagaacgacgagtggacccaggacagagccaagcccgtgacccagatcgtgtctgccgaagcctggggcagagccgattgcggctttaccagcgagagctaccagcagggcgtgctgagcgccaccaacctgagcgtgatcggcttcagaatcctgctgctgaaagtggccggctttaacctgctgatgaccctgcggctgtggtccagcagggccaagcgatctggatctggagcaacaaacttctcactactcaaacaagcaggtgacgtggaggagaatcccgggcctactagtatggactggatttggcgcatccttttccttgtcggcgctgctaccggcgcgcattccgggccccagctccagctgcaagagtctggacctggcctggtcaagcctagcgagacactgagcctgacctgtaccgtgtccggcgatagcatcagcagcggcgattactactggggctggatcagacagcctcctggcaaaggactggaatggatcggccacatctactacagcggcgtgacctactacaaccccagcctgaagtccagagtgaccatcagcgtggacaccagccggaaccagttctccctgaagctgtctagcgtgacagccgccgataccgccgtgtactactgcaccagagaggacagcagcaactggcggagtagaggccagggaacactggtcacagttagctctggatccggcggaggcggaagtggaggcggaggatctggcggcggaggctctttcgaagatgtcgtgatgacccagagccccgacagcctggctgtgtctctgggagagagagccaccatcaactgcaagtccagccagtccctgctggacagcgacggcaagacctacctgaactggctccagcagaagcccggccagccccccaagagactgatctccctggtgtccaagctggactccggcgtgcccgatagattttccggctctggcagcggcaccgacttcaccctgacaatcagctcccttcaggccgaggacgtggccgtgtactattgctggcagggcacacacttccccggcacctttggcggaggcaccaaggtggaaatcaagacgcgtatccagaaccctgatcctgccgtgtaccagctgcgggatagcaagagcagcgacaagagcgtgtgtctgttcaccgacttcgacagccagaccaacgtgtcccagagcaaggactccgacgtgtacatcaccgataagtgcgtgctggacatgcggagcatggacttcaagagcaactccgccgtggcctggtccaacaagtccgatttcgcctgcgccaacgccttcaacaacagcattatccccgaggacacattcttcccaagccccgagagcagctgcgacgtgaagctggtggaaaagagcttcgagacagacaccaacctgaacttccagatcctgtacgagatcctgctgggcaaggccaccctgtacgccgtgctggtgtctgccctggtgctgatggctatggtcaagcggaaggacagccgggga

SEQ ID NO: 5675 - DNA, 2697 bp, synthetic construct
  source 1..2697: mol_type = other DNA
atggccttaccagtgaccgccttgctcctgccgctggccttgctgctccacgccgccaggccggaagtgcagctggttgaatctggcggaggactggttcagcctggcggatctctgagactgtcttgtgccgccagcggcttcagcttcagcgacttttggatgagctgggtccgacaggcccctggcaaaggacttgaatgggtcgccacaatcagccaggccggcagcgagaaggactacgtggactctgtgaagggcagattcaccatcagccgggacaacgccaagaagtccctgtacctccagatgaacagcctgagagccgaggacaccgccgtgtactattgtgcctctggcgtgtacagcttcgactacagaggccagggcaccctggtcacagtctcttctggtaccggcggaggcggatctggcggcggaggtagcggtggcggaggatctgaattcgacgagcttgtgatgacccagagccccagcagcctgacagtgacagccggcgagaaagtgaccatgagctgcaagagcagccagagcctgctgaacagcggcaaccagaagaactacctgacctggtatcagcagaagcccggccagccccccaagctgctgatctactgggccagcaccagagaaagcggcgtgcccgatagattcaccggctctggcagcggcaccgacttcaccctgacaatcagcagcgtgcaggccgaggacctggccgtgtactactgccagaacgactacagctaccccctgaccttcggagccggcaccaagctggaaatcaagctcgaggacctgaagaacgtgttcccacctgaggtggccgtgttcgagcctagcgaggccgagatcagccacacccagaaagccaccctcgtgtgcctggctaccggcttctaccccgaccatgtggaactgtcttggtgggtcaacggcaaagaggtgcacagcggcgtgtgtaccgacccccagccactgaaagaacagcccgccctgaacgacagccggtactgcctgagcagcagactgagagtgtccgccaccttctggcagaacccccggaaccacttcagatgccaggtgcagttctacggcctgagcgagaacgacgagtggacccaggacagagccaagcccgtgacccagatcgtgtctgccgaagcctggggcagagccgattgcggctttaccagcgagagctaccagcagggcgtgctgagcgccaccaacctgagcgtgatcggcttcagaatcctgctgctgaaagtggccggctttaacctgctgatgaccctgcggctgtggtccagcagggccaagcgatctggatctggagcaacaaacttctcactactcaaacaagcaggtgacgtggaggagaatcccgggcctactagtatggactggatttggcgcatccttttccttgtcggcgctgctaccggcgcgcattccgggccccagctccagctgcaagagtctggacctggcctggtcaagcctagcgagacactgagcctgacctgtaccgtgtccggcgatagcatcagcagcggcgattactactggggctggatcagacagcctcctggcaaaggactggaatggatcggccacatctactacagcggcgtgacctactacaaccccagcctgaagtccagagtgaccatcagcgtggacaccagccggaaccagttctccctgaagctgtctagcgtgacagccgccgataccgccgtgtactactgcaccagagaggacagcagcaactggcggagtagaggccagggaacactggtcacagttagctctggatccggcggaggcggaagtggaggcggaggatctggcggcggaggctctttcgaagaagtgcagctgctggaacagtctggcgccgaacttgtgcggcctggcaccagcgtgaagatcagctgtaaagccagcggctacgccttcaccaactactggctgggctgggtcaagcagaggcctggacacggcctggaatggatcggcgacatctttcccggctccggcaacatccactacaacgagaagttcaagggcaaggccaccctgaccgccgacaagtctagcagcaccgcctacatgcagctgtccagcctgacctttgaggacagcgccgtgtatttctgtgcccggctgcggaactgggacgagcccatggattattggggccagggcaccaccgtgaccgtgtctagtacgcgtatccagaaccctgatcctgccgtgtaccagctgcgggatagcaagagcagcgacaagagcgtgtgtctgttcaccgacttcgacagccagaccaacgtgtcccagagcaaggactccgacgtgtacatcaccgataagtgcgtgctggacatgcggagcatggacttcaagagcaactccgccgtggcctggtccaacaagtccgatttcgcctgcgccaacgccttcaacaacagcattatccccgaggacacattcttcccaagccccgagagcagctgcgacgtgaagctggtggaaaagagcttcgagacagacaccaacctgaacttccagatcctgtacgagatcctgctgggcaaggccaccctgtacgccgtgctggtgtctgccctggtgctgatggctatggtcaagcggaaggacagccgggga

SEQ ID NO: 5676 - DNA, 2700 bp, synthetic construct
  source 1..2700: mol_type = other DNA
atggccttaccagtgaccgccttgctcctgccgctggccttgctgctccacgccgccaggccggaagtgcagctggttgaatctggcggaggactggttcagcctggcggatctctgagactgtcttgtgccgccagcggcttcagcttcagcgacttttggatgagctgggtccgacaggcccctggcaaaggacttgaatgggtcgccacaatcagccaggccggcagcgagaaggactacgtggactctgtgaagggcagattcaccatcagccgggacaacgccaagaagtccctgtacctccagatgaacagcctgagagccgaggacaccgccgtgtactattgtgcctctggcgtgtacagcttcgactacagaggccagggcaccctggtcacagtctcttctggtaccggcggaggcggatctggcggcggaggtagcggtggcggaggatctgaattcgacgagctgcagatgacccagagccctagcagcctgtctgccagcgtgggcgacagagtgaccatcacctgtagagccagccagagcatcagcagctacctgaactggtatcagcagaagcccggccagccccccaaactgctgatctactgggccagcaccagagaaagcggcgtgcccgatagattcagcggcagcgagagcggcaccaactacaccctgaccatcagctccctgcagcccgaggacttcgccacctacttttgccagcagagcgacagcctgcccatcacctttggacagggcacccggctggacattcagctcgaggacctgaagaacgtgttcccacctgaggtggccgtgttcgagcctagcgaggccgagatcagccacacccagaaagccaccctcgtgtgcctggctaccggcttctaccccgaccatgtggaactgtcttggtgggtcaacggcaaagaggtgcacagcggcgtgtgtaccgacccccagccactgaaagaacagcccgccctgaacgacagccggtactgcctgagcagcagactgagagtgtccgccaccttctggcagaacccccggaaccacttcagatgccaggtgcagttctacggcctgagcgagaacgacgagtggacccaggacagagccaagcccgtgacccagatcgtgtctgccgaagcctggggcagagccgattgcggctttaccagcgagagctaccagcagggcgtgctgagcgccaccaacctgagcgtgatcggcttcagaatcctgctgctgaaagtggccggctttaacctgctgatgaccctgcggctgtggtccagcagggccaagcgatctggatctggagcaacaaacttctcactactcaaacaagcaggtgacgtggaggagaatcccgggcctactagtatggactggatttggcgcatccttttccttgtcggcgctgctaccggcgcgcattccgggccccagctccagctgcaagagtctggacctggcctggtcaagcctagcgagacactgagcctgacctgtaccgtgtccggcgatagcatcagcagcggcgattactactggggctggatcagacagcctcctggcaaaggactggaatggatcggccacatctactacagcggcgtgacctactacaaccccagcctgaagtccagagtgaccatcagcgtggacaccagccggaaccagttctccctgaagctgtctagcgtgacagccgccgataccgccgtgtactactgcaccagagaggacagcagcaactggcggagtagaggccagggaacactggtcacagttagctctggatccggcggaggcggaagtggaggcggaggatctggcggcggaggctctttcgaagaggtgcaactgctggaatctgggggcggagtggtgcagcctggcagaagcctgagactgagctgtgccgccagcggcttcaccttcagctcctacggaatgcactgggtgcgccaggcccctggcaaaggactggaatgggtggccgtgatctcctacgacggcagcaacaagtactacgccgacagcgtgaagggccggttcaccatcagccgggacaacagcaagaacaccctgtacctgcagatgaacagcctgcgggccgaggacaccgccgtgtactactgcgccaaggatatgggctggggcagcggctggcggccttactactactacggcatggacgtgtggggccagggcaccaccgtgacagtgtcatctacgcgtatccagaaccctgatcctgccgtgtaccagctgcgggatagcaagagcagcgacaagagcgtgtgtctgttcaccgacttcgacagccagaccaacgtgtcccagagcaaggactccgacgtgtacatcaccgataagtgcgtgctggacatgcggagcatggacttcaagagcaactccgccgtggcctggtccaacaagtccgatttcgcctgcgccaacgccttcaacaacagcattatccccgaggacacattcttcccaagccccgagagcagctgcgacgtgaagctggtggaaaagagcttcgagacagacaccaacctgaacttccagatcctgtacgagatcctgctgggcaaggccaccctgtacgccgtgctggtgtctgccctggtgctgatggctatggtcaagcggaaggacagccgggga

SEQ ID NO: 5677 - DNA, 2691 bp, synthetic construct
  source 1..2691: mol_type = other DNA
atggccttaccagtgaccgccttgctcctgccgctggccttgctgctccacgccgccaggccggaagtgcagctggttgaatctggcggaggactggttcagcctggcggatctctgagactgtcttgtgccgccagcggcttcagcttcagcgacttttggatgagctgggtccgacaggcccctggcaaaggacttgaatgggtcgccacaatcagccaggccggcagcgagaaggactacgtggactctgtgaagggcagattcaccatcagccgggacaacgccaagaagtccctgtacctccagatgaacagcctgagagccgaggacaccgccgtgtactattgtgcctctggcgtgtacagcttcgactacagaggccagggcaccctggtcacagtctcttctggtaccggcggaggcggatctggcggcggaggtagcggtggcggaggatctgaattcgacgacatccaaatgacacagagtccttctagtttgagtgcgagcgtgggggacagggtgaccattacctgcagggccagccagagcataagctcataccttaattggtaccagcaaaaaccaggtaaggcccctaagctcctgatctacgcggcctcttcacttcaatctggggtcccttcccgcttcagtggctccggcagcggcaccgacttcacgctcactatatcaagtctgcagcctgaggatctcgccacctattactgtcaacaaagttattccacccctttcacctttggaccgggcacgaaagtggatattaagctcgaggacctgaagaacgtgttcccacctgaggtggccgtgttcgagcctagcgaggccgagatcagccacacccagaaagccaccctcgtgtgcctggctaccggcttctaccccgaccatgtggaactgtcttggtgggtcaacggcaaagaggtgcacagcggcgtgtgtaccgacccccagccactgaaagaacagcccgccctgaacgacagccggtactgcctgagcagcagactgagagtgtccgccaccttctggcagaacccccggaaccacttcagatgccaggtgcagttctacggcctgagcgagaacgacgagtggacccaggacagagccaagcccgtgacccagatcgtgtctgccgaagcctggggcagagccgattgcggctttaccagcgagagctaccagcagggcgtgctgagcgccaccaacctgagcgtgatcggcttcagaatcctgctgctgaaagtggccggctttaacctgctgatgaccctgcggctgtggtccagcagggccaagcgatctggatctggagcaacaaacttctcactactcaaacaagcaggtgacgtggaggagaatcccgggcctactagtatggactggatttggcgcatccttttccttgtcggcgctgctaccggcgcgcattccgggccccagctccagctgcaagagtctggacctggcctggtcaagcctagcgagacactgagcctgacctgtaccgtgtccggcgatagcatcagcagcggcgattactactggggctggatcagacagcctcctggcaaaggactggaatggatcggccacatctactacagcggcgtgacctactacaaccccagcctgaagtccagagtgaccatcagcgtggacaccagccggaaccagttctccctgaagctgtctagcgtgacagccgccgataccgccgtgtactactgcaccagagaggacagcagcaactggcggagtagaggccagggaacactggtcacagttagctctggatccggcggaggcggaagtggaggcggaggatctggcggcggaggctctttcgaagtgcacgaggtccagcttgtgcagtccggggcagaggtcaagaagcctggttctagcgtaaaagtgagttgcaaagcctcaggtgggacattttcatcctacgcgatcagttgggttagacaggctcctggtcaagggctggaatggatgggcggaattattccaatcttcggaacagcgaattacgcgcagaagttccagggtagagtaaccatcactgctgacaagtccacctccaccgcatacatggaattgtctagtctccggagcgaggatacggcggtgtattattgtgctacgttcgccctgtttggcttccgcgaacaggctttcgacatctgggggcagggcacgacagtcacggttagtagtacgcgtatccagaaccctgatcctgccgtgtaccagctgcgggatagcaagagcagcgacaagagcgtgtgtctgttcaccgacttcgacagccagaccaacgtgtcccagagcaaggactccgacgtgtacatcaccgataagtgcgtgctggacatgcggagcatggacttcaagagcaactccgccgtggcctggtccaacaagtccgatttcgcctgcgccaacgccttcaacaacagcattatccccgaggacacattcttcccaagccccgagagcagctgcgacgtgaagctggtggaaaagagcttcgagacagacaccaacctgaacttccagatcctgtacgagatcctgctgggcaaggccaccctgtacgccgtgctggtgtctgccctggtgctgatggctatggtcaagcggaaggacagccgggga

SEQ ID NO: 5678 - DNA, 2685 bp, synthetic construct
  source 1..2685: mol_type = other DNA
atggccttaccagtgaccgccttgctcctgccgctggccttgctgctccacgccgccaggccggaagtgcagctggttgaatctggcggaggactggttcagcctggcggatctctgagactgtcttgtgccgccagcggcttcagcttcagcgacttttggatgagctgggtccgacaggcccctggcaaaggacttgaatgggtcgccacaatcagccaggccggcagcgagaaggactacgtggactctgtgaagggcagattcaccatcagccgggacaacgccaagaagtccctgtacctccagatgaacagcctgagagccgaggacaccgccgtgtactattgtgcctctggcgtgtacagcttcgactacagaggccagggcaccctggtcacagtctcttctggtaccggcggaggcggatctggcggcggaggtagcggtggcggaggatctgaattcgacatcgtgctgacccagagccctctgagcctggccgtgtctctgggacagcctgccatcatcagctgcaaggccagccagagcgtgtcctttgccggcacctctctgatgcactggtatcaccagaagcccggccagcagcccagactgctgatctacagagccagcaacctggaagccggcgtgcccgatagattttccggcagcggcagcaagaccgacttcaccctgaccatcagccccgtggaagccgaagatgccgccacctactactgccagcagagcagagagtacccctacaccttcggcggaggcaccaagctggaaatcaagaggctcgaggacctgaagaacgtgttcccacctgaggtggccgtgttcgagcctagcgaggccgagatcagccacacccagaaagccaccctcgtgtgcctggctaccggcttctaccccgaccatgtggaactgtcttggtgggtcaacggcaaagaggtgcacagcggcgtgtgtaccgacccccagccactgaaagaacagcccgccctgaacgacagccggtactgcctgagcagcagactgagagtgtccgccaccttctggcagaacccccggaaccacttcagatgccaggtgcagttctacggcctgagcgagaacgacgagtggacccaggacagagccaagcccgtgacccagatcgtgtctgccgaagcctggggcagagccgattgcggctttaccagcgagagctaccagcagggcgtgctgagcgccaccaacctgagcgtgatcggcttcagaatcctgctgctgaaagtggccggctttaacctgctgatgaccctgcggctgtggtccagcagggccaagcgatctggatctggagcaacaaacttctcactactcaaacaagcaggtgacgtggaggagaatcccgggcctactagtatggactggatttggcgcatccttttccttgtcggcgctgctaccggcgcgcattccgggccccagctccagctgcaagagtctggacctggcctggtcaagcctagcgagacactgagcctgacctgtaccgtgtccggcgatagcatcagcagcggcgattactactggggctggatcagacagcctcctggcaaaggactggaatggatcggccacatctactacagcggcgtgacctactacaaccccagcctgaagtccagagtgaccatcagcgtggacaccagccggaaccagttctccctgaagctgtctagcgtgacagccgccgataccgccgtgtactactgcaccagagaggacagcagcaactggcggagtagaggccagggaacactggtcacagttagctctggatccggcggaggcggaagtggaggcggaggatctggcggcggaggctctttcgaacaggtccaactggtgcagagcggagccgaggtcgtgaagcctggcgcttccgtgaagattagctgcaaagccagcggctacacctttaccggctactttatgaactgggtcaagcagagccctggccagagcctggaatggatcggcagaatccacccctacgacggcgacaccttctacaaccagaagttccagggcaaggccaccctgacagtggacaagagcagcaacaccgcccacatggaactgctgagcctgaccagcgaggacttcgccgtgtactactgcaccagatacgacggcagccgggctatggactattggggccagggcaccaccgtgaccgtgtctagtacgcgtatccagaaccctgatcctgccgtgtaccagctgcgggatagcaagagcagcgacaagagcgtgtgtctgttcaccgacttcgacagccagaccaacgtgtcccagagcaaggactccgacgtgtacatcaccgataagtgcgtgctggacatgcggagcatggacttcaagagcaactccgccgtggcctggtccaacaagtccgatttcgcctgcgccaacgccttcaacaacagcattatccccgaggacacattcttcccaagccccgagagcagctgcgacgtgaagctggtggaaaagagcttcgagacagacaccaacctgaacttccagatcctgtacgagatcctgctgggcaaggccaccctgtacgccgtgctggtgtctgccctggtgctgatggctatggtcaagcggaaggacagccgggga

SEQ ID NO: 5679 - DNA, 2676 bp, synthetic construct
  source 1..2676: mol_type = other DNA
atggccttaccagtgaccgccttgctcctgccgctggccttgctgctccacgccgccaggccggaagtgcagctggttgaatctggcggaggactggttcagcctggcggatctctgagactgtcttgtgccgccagcggcttcagcttcagcgacttttggatgagctgggtccgacaggcccctggcaaaggacttgaatgggtcgccacaatcagccaggccggcagcgagaaggactacgtggactctgtgaagggcagattcaccatcagccgggacaacgccaagaagtccctgtacctccagatgaacagcctgagagccgaggacaccgccgtgtactattgtgcctctggcgtgtacagcttcgactacagaggccagggcaccctggtcacagtctcttctggtaccggcggaggcggatctggcggcggaggtagcggtggcggaggatctgaattcgacgacgttgtgatgacccagacccccctgagcctgcctgtgacacctggcgaacctgccagcatcagctgtcggagcagccagagcctggtgcacagaaacggcaacacctacctgcactggtatctccagaagcccggccagagccccaagctgctgatccacaaggtgtccaacagattcagcggcgtgcccgacagattctccggcagcggctctggcaccgacttcaccctgaagatcagccgggtggaagccgaggacctgggcgtgtacttctgtagccagagcacccatgtgccccccctgacatttggagccggcaccaagctggaactgaagctcgaggacctgaagaacgtgttcccacctgaggtggccgtgttcgagcctagcgaggccgagatcagccacacccagaaagccaccctcgtgtgcctggctaccggcttctaccccgaccatgtggaactgtcttggtgggtcaacggcaaagaggtgcacagcggcgtgtgtaccgacccccagccactgaaagaacagcccgccctgaacgacagccggtactgcctgagcagcagactgagagtgtccgccaccttctggcagaacccccggaaccacttcagatgccaggtgcagttctacggcctgagcgagaacgacgagtggacccaggacagagccaagcccgtgacccagatcgtgtctgccgaagcctggggcagagccgattgcggctttaccagcgagagctaccagcagggcgtgctgagcgccaccaacctgagcgtgatcggcttcagaatcctgctgctgaaagtggccggctttaacctgctgatgaccctgcggctgtggtccagcagggccaagcgatctggatctggagcaacaaacttctcactactcaaacaagcaggtgacgtggaggagaatcccgggcctactagtatggactggatttggcgcatccttttccttgtcggcgctgctaccggcgcgcattccgggccccagctccagctgcaagagtctggacctggcctggtcaagcctagcgagacactgagcctgacctgtaccgtgtccggcgatagcatcagcagcggcgattactactggggctggatcagacagcctcctggcaaaggactggaatggatcggccacatctactacagcggcgtgacctactacaaccccagcctgaagtccagagtgaccatcagcgtggacaccagccggaaccagttctccctgaagctgtctagcgtgacagccgccgataccgccgtgtactactgcaccagagaggacagcagcaactggcggagtagaggccagggaacactggtcacagttagctctggatccggcggaggcggaagtggaggcggaggatctggcggcggaggctctttcgaagaagtgcagctggtgcagtctggcgctgaggtggaaaagcctggggccagcgtgaagattagctgcaaggccagcggcagcagcttcaccggctacaacatgaactgggtgcgccagaacatcggcaagagcctggaatggatcggagccatcgacccctactacggcggcaccagctacaaccagaagttcaagggcagagccaccctgaccgtggacaagagcaccagcaccgcctacatgcacctgaagtccctgcggagcgaggacaccgccgtgtactactgtgtgtccggcatggaatattggggccagggcaccagcgtgaccgtgtctagtacgcgtatccagaaccctgatcctgccgtgtaccagctgcgggatagcaagagcagcgacaagagcgtgtgtctgttcaccgacttcgacagccagaccaacgtgtcccagagcaaggactccgacgtgtacatcaccgataagtgcgtgctggacatgcggagcatggacttcaagagcaactccgccgtggcctggtccaacaagtccgatttcgcctgcgccaacgccttcaacaacagcattatccccgaggacacattcttcccaagccccgagagcagctgcgacgtgaagctggtggaaaagagcttcgagacagacaccaacctgaacttccagatcctgtacgagatcctgctgggcaaggccaccctgtacgccgtgctggtgtctgccctggtgctgatggctatggtcaagcggaaggacagccgggga

SEQ ID NO: 5680 - DNA, 2670 bp, synthetic construct
  source 1..2670: mol_type = other DNA
atggccttaccagtgaccgccttgctcctgccgctggccttgctgctccacgccgccaggccggaagtgcagctggttgaatctggcggaggactggttcagcctggcggatctctgagactgtcttgtgccgccagcggcttcagcttcagcgacttttggatgagctgggtccgacaggcccctggcaaaggacttgaatgggtcgccacaatcagccaggccggcagcgagaaggactacgtggactctgtgaagggcagattcaccatcagccgggacaacgccaagaagtccctgtacctccagatgaacagcctgagagccgaggacaccgccgtgtactattgtgcctctggcgtgtacagcttcgactacagaggccagggcaccctggtcacagtctcttctggtaccggcggaggcggatctggcggcggaggtagcggtggcggaggatctgaattcgacgagatcgtgatgacccagacccctgccaccctgtctgtgtctgccggcgagagagtgaccattacctgcaaggccagccagagcgtgtccaacgacgtgacctggtatcagcagaagcccggccaggcccccagactgctgatctacagcgccagcaacagatacagcggcgtgcccgccagattttccggcagcggctacggcaccgagttcaccttcaccatcagcagcgtgcagagcgaggacttcgccgtgtacttctgtcagcaagactacagcagcttcggccagggcaccaagctggaaatcaagaggctcgaggacctgaagaacgtgttcccacctgaggtggccgtgttcgagcctagcgaggccgagatcagccacacccagaaagccaccctcgtgtgcctggctaccggcttctaccccgaccatgtggaactgtcttggtgggtcaacggcaaagaggtgcacagcggcgtgtgtaccgacccccagccactgaaagaacagcccgccctgaacgacagccggtactgcctgagcagcagactgagagtgtccgccaccttctggcagaacccccggaaccacttcagatgccaggtgcagttctacggcctgagcgagaacgacgagtggacccaggacagagccaagcccgtgacccagatcgtgtctgccgaagcctggggcagagccgattgcggctttaccagcgagagctaccagcagggcgtgctgagcgccaccaacctgagcgtgatcggcttcagaatcctgctgctgaaagtggccggctttaacctgctgatgaccctgcggctgtggtccagcagggccaagcgatctggatctggagcaacaaacttctcactactcaaacaagcaggtgacgtggaggagaatcccgggcctactagtatggactggatttggcgcatccttttccttgtcggcgctgctaccggcgcgcattccgggccccagctccagctgcaagagtctggacctggcctggtcaagcctagcgagacactgagcctgacctgtaccgtgtccggcgatagcatcagcagcggcgattactactggggctggatcagacagcctcctggcaaaggactggaatggatcggccacatctactacagcggcgtgacctactacaaccccagcctgaagtccagagtgaccatcagcgtggacaccagccggaaccagttctccctgaagctgtctagcgtgacagccgccgataccgccgtgtactactgcaccagagaggacagcagcaactggcggagtagaggccagggaacactggtcacagttagctctggatccggcggaggcggaagtggaggcggaggatctggcggcggaggctctttcgaacaggtgcagctggtggaatctggacctggcgtggtgcagcctggcagaagcctgagaatcagctgtgccgtgtccggcttcagcgtgaccaactacggcgtgcactgggtgcgccagccacctggaaaaggactggaatggctgggcgtgatctgggctggcggcatcaccaactacaacagcgccttcatgtcccggctgaccatctccaaggacaacagcaagaacaccgtgtacctccagatgaacagcctgcgggccgaggacaccgccatgtactactgtgcttccagaggcggccactacggctacgccctggattattggggccagggaaccctcgtgaccgtgtcctctacgcgtatccagaaccctgatcctgccgtgtaccagctgcgggatagcaagagcagcgacaagagcgtgtgtctgttcaccgacttcgacagccagaccaacgtgtcccagagcaaggactccgacgtgtacatcaccgataagtgcgtgctggacatgcggagcatggacttcaagagcaactccgccgtggcctggtccaacaagtccgatttcgcctgcgccaacgccttcaacaacagcattatccccgaggacacattcttcccaagccccgagagcagctgcgacgtgaagctggtggaaaagagcttcgagacagacaccaacctgaacttccagatcctgtacgagatcctgctgggcaaggccaccctgtacgccgtgctggtgtctgccctggtgctgatggctatggtcaagcggaaggacagccgggga

SEQ ID NO: 5681 - DNA, 2676 bp, synthetic construct
  source 1..2676: mol_type = other DNA
atggccttaccagtgaccgccttgctcctgccgctggccttgctgctccacgccgccaggccggaagtgcagctggttgaatctggcggaggactggttcagcctggcggatctctgagactgtcttgtgccgccagcggcttcagcttcagcgacttttggatgagctgggtccgacaggcccctggcaaaggacttgaatgggtcgccacaatcagccaggccggcagcgagaaggactacgtggactctgtgaagggcagattcaccatcagccgggacaacgccaagaagtccctgtacctccagatgaacagcctgagagccgaggacaccgccgtgtactattgtgcctctggcgtgtacagcttcgactacagaggccagggcaccctggtcacagtctcttctggtaccggcggaggcggatctggcggcggaggtagcggtggcggaggatctgaattcgacatccagatgacccagaccgccagcagcctgcctgcctctctgggcgacagagtgaccatctcctgtagcgccagccaggacatcagcaactacctgaactggtatcagcagaaacccgacggcaccgtgaagctgctgatcttctacagcagcaacctgcacagcggcgtgcccagcagattttctggcggcggaagcggcaccgactacagcctgaccatcagcaatctggaacccgaggacattgccacctacttttgccaccagtacagcaagctgccctggacctttggcggaggcaccaagctggaaatcaagagactcgaggacctgaagaacgtgttcccacctgaggtggccgtgttcgagcctagcgaggccgagatcagccacacccagaaagccaccctcgtgtgcctggctaccggcttctaccccgaccatgtggaactgtcttggtgggtcaacggcaaagaggtgcacagcggcgtgtgtaccgacccccagccactgaaagaacagcccgccctgaacgacagccggtactgcctgagcagcagactgagagtgtccgccaccttctggcagaacccccggaaccacttcagatgccaggtgcagttctacggcctgagcgagaacgacgagtggacccaggacagagccaagcccgtgacccagatcgtgtctgccgaagcctggggcagagccgattgcggctttaccagcgagagctaccagcagggcgtgctgagcgccaccaacctgagcgtgatcggcttcagaatcctgctgctgaaagtggccggctttaacctgctgatgaccctgcggctgtggtccagcagggccaagcgatctggatctggagcaacaaacttctcactactcaaacaagcaggtgacgtggaggagaatcccgggcctactagtatggactggatttggcgcatccttttccttgtcggcgctgctaccggcgcgcattccgggccccagctccagctgcaagagtctggacctggcctggtcaagcctagcgagacactgagcctgacctgtaccgtgtccggcgatagcatcagcagcggcgattactactggggctggatcagacagcctcctggcaaaggactggaatggatcggccacatctactacagcggcgtgacctactacaaccccagcctgaagtccagagtgaccatcagcgtggacaccagccggaaccagttctccctgaagctgtctagcgtgacagccgccgataccgccgtgtactactgcaccagagaggacagcagcaactggcggagtagaggccagggaacactggtcacagttagctctggatccggcggaggcggaagtggaggcggaggatctggcggcggaggctctttcgaagaagtgaccctggtggaaagcggcggagacttcgtgaagcctggcggctctctgaaggtgtcctgtgccgccagcggcttcgcctttagccactacgccatgagctgggtgcgccagacccctgccaagagactggaatgggtggcctacatcagcagcggcggctccggcacctactactccgatagcgtgaagggccggttcaccatcagccgggacaacgccaagaacaccctgtacctccagatgcggagcctgcggagcgaggacagcgccatgtatttctgcaccagagtgaagctgggcacctattacttcgactcttggggccagggcaccaccctgaccgtgtcatctacgcgtatccagaaccctgatcctgccgtgtaccagctgcgggatagcaagagcagcgacaagagcgtgtgtctgttcaccgacttcgacagccagaccaacgtgtcccagagcaaggactccgacgtgtacatcaccgataagtgcgtgctggacatgcggagcatggacttcaagagcaactccgccgtggcctggtccaacaagtccgatttcgcctgcgccaacgccttcaacaacagcattatccccgaggacacattcttcccaagccccgagagcagctgcgacgtgaagctggtggaaaagagcttcgagacagacaccaacctgaacttccagatcctgtacgagatcctgctgggcaaggccaccctgtacgccgtgctggtgtctgccctggtgctgatggctatggtcaagcggaaggacagccgggga

SEQ ID NO: 5682 - DNA, 2682 bp, synthetic construct
  source 1..2682: mol_type = other DNA
atggccttaccagtgaccgccttgctcctgccgctggccttgctgctccacgccgccaggccggaagtgcagctggttgaatctggcggaggactggttcagcctggcggatctctgagactgtcttgtgccgccagcggcttcagcttcagcgacttttggatgagctgggtccgacaggcccctggcaaaggacttgaatgggtcgccacaatcagccaggccggcagcgagaaggactacgtggactctgtgaagggcagattcaccatcagccgggacaacgccaagaagtccctgtacctccagatgaacagcctgagagccgaggacaccgccgtgtactattgtgcctctggcgtgtacagcttcgactacagaggccagggcaccctggtcacagtctcttctggtaccggcggaggcggatctggcggcggaggtagcggtggcggaggatctgaattccagttcgtgctgacccagagcccttctgcctctgctgccctgggagcctctgccaagctgacctgtacactgagcagcgcccacaagacctacaccatcgactggtatcagcagcagaagggaaaggcccccagatacctgatccaagtgaagtccgacggcacctacacaaaggccaccggcgtgcccgatagattcagcggcagtagcagcggagccgatagatacctgattatccccagcgtgcaggccgacgacgaggccgattactactgcggcaccgattacaccggcggctacgtgttcggcggaggcacacaactgaccgtgacactcgaggacctgaagaacgtgttcccacctgaggtggccgtgttcgagcctagcgaggccgagatcagccacacccagaaagccaccctcgtgtgcctggctaccggcttctaccccgaccatgtggaactgtcttggtgggtcaacggcaaagaggtgcacagcggcgtgtgtaccgacccccagccactgaaagaacagcccgccctgaacgacagccggtactgcctgagcagcagactgagagtgtccgccaccttctggcagaacccccggaaccacttcagatgccaggtgcagttctacggcctgagcgagaacgacgagtggacccaggacagagccaagcccgtgacccagatcgtgtctgccgaagcctggggcagagccgattgcggctttaccagcgagagctaccagcagggcgtgctgagcgccaccaacctgagcgtgatcggcttcagaatcctgctgctgaaagtggccggctttaacctgctgatgaccctgcggctgtggtccagcagggccaagcgatctggatctggagcaacaaacttctcactactcaaacaagcaggtgacgtggaggagaatcccgggcctactagtatggactggatttggcgcatccttttccttgtcggcgctgctaccggcgcgcattccgggccccagctccagctgcaagagtctggacctggcctggtcaagcctagcgagacactgagcctgacctgtaccgtgtccggcgatagcatcagcagcggcgattactactggggctggatcagacagcctcctggcaaaggactggaatggatcggccacatctactacagcggcgtgacctactacaaccccagcctgaagtccagagtgaccatcagcgtggacaccagccggaaccagttctccctgaagctgtctagcgtgacagccgccgataccgccgtgtactactgcaccagagaggacagcagcaactggcggagtagaggccagggaacactggtcacagttagctctggatccggcggaggcggaagtggaggcggaggatctggcggcggaggctctttcgaagagcaactgaaagagtctggcggcggactgttcaagcccaccgataccctgaccctgacctgcaccgtgtccggcttcagcctgagctactacggcgtgaactgggtgcgccaggcccctggcaatggcctggaatggatcggcacaatcggcggcagcggcgacacctactatgcctcttgggccaagtccagaagcaccatcatcagaaacaccaacgagaacaccgtgaccctgaagatgaccagcctgacagccgccgacaccgccacctacttttgcgtcagatacgccaacatcggctacgagtatttcaacgtgtggggacccggcaccctcgtgaccgtgtcatctacgcgtatccagaaccctgatcctgccgtgtaccagctgcgggatagcaagagcagcgacaagagcgtgtgtctgttcaccgacttcgacagccagaccaacgtgtcccagagcaaggactccgacgtgtacatcaccgataagtgcgtgctggacatgcggagcatggacttcaagagcaactccgccgtggcctggtccaacaagtccgatttcgcctgcgccaacgccttcaacaacagcattatccccgaggacacattcttcccaagccccgagagcagctgcgacgtgaagctggtggaaaagagcttcgagacagacaccaacctgaacttccagatcctgtacgagatcctgctgggcaaggccaccctgtacgccgtgctggtgtctgccctggtgctgatggctatggtcaagcggaaggacagccgggga

SEQ ID NO: 5683 - DNA, 2697 bp, synthetic construct
  source 1..2697: mol_type = other DNA
atggccttaccagtgaccgccttgctcctgccgctggccttgctgctccacgccgccaggccggaagtgcagctggttgaatctggcggaggactggttcagcctggcggatctctgagactgtcttgtgccgccagcggcttcagcttcagcgacttttggatgagctgggtccgacaggcccctggcaaaggacttgaatgggtcgccacaatcagccaggccggcagcgagaaggactacgtggactctgtgaagggcagattcaccatcagccgggacaacgccaagaagtccctgtacctccagatgaacagcctgagagccgaggacaccgccgtgtactattgtgcctctggcgtgtacagcttcgactacagaggccagggcaccctggtcacagtctcttctggtaccggcggaggcggatctggcggcggaggtagcggtggcggaggatctgaattccagttcgtgctgacccagagcccttctgtgtctgccgccctgggagcctctgccaagctgacctgtacactgagcagcgcccacaagacctacaccatcgactggtatcagcagcagcagggcgaggcccccagatacctgatgcaagtgaagtccgacggcagctacaccaagggcaccggcgtgcccgatagattcagcggcagtagcagcggagccgatagatacctgattatccccagcgtgcaggccgacgacgaggccggatatgtgtgcggcgctgacgacaatggcggctacgtgttcggcggaggcacccaactgacagtgacactcgaggacctgaagaacgtgttcccacctgaggtggccgtgttcgagcctagcgaggccgagatcagccacacccagaaagccaccctcgtgtgcctggctaccggcttctaccccgaccatgtggaactgtcttggtgggtcaacggcaaagaggtgcacagcggcgtgtgtaccgacccccagccactgaaagaacagcccgccctgaacgacagccggtactgcctgagcagcagactgagagtgtccgccaccttctggcagaacccccggaaccacttcagatgccaggtgcagttctacggcctgagcgagaacgacgagtggacccaggacagagccaagcccgtgacccagatcgtgtctgccgaagcctggggcagagccgattgcggctttaccagcgagagctaccagcagggcgtgctgagcgccaccaacctgagcgtgatcggcttcagaatcctgctgctgaaagtggccggctttaacctgctgatgaccctgcggctgtggtccagcagggccaagcgatctggatctggagcaacaaacttctcactactcaaacaagcaggtgacgtggaggagaatcccgggcctactagtatggactggatttggcgcatccttttccttgtcggcgctgctaccggcgcgcattccgggccccagctccagctgcaagagtctggacctggcctggtcaagcctagcgagacactgagcctgacctgtaccgtgtccggcgatagcatcagcagcggcgattactactggggctggatcagacagcctcctggcaaaggactggaatggatcggccacatctactacagcggcgtgacctactacaaccccagcctgaagtccagagtgaccatcagcgtggacaccagccggaaccagttctccctgaagctgtctagcgtgacagccgccgataccgccgtgtactactgcaccagagaggacagcagcaactggcggagtagaggccagggaacactggtcacagttagctctggatccggcggaggcggaagtggaggcggaggatctggcggcggaggctctttcgaacagagcgtgaaagagtctgagggcggcctgttcaagcccaccgataccctgaccctgacctgcaccgtgtccggcttcagcctgagcagacacgccctgacatgggtgcgccaggcccctggaaatggcctggaatggatcggagccatcgacaacgccggcaccacctactatgcctcttgggccaagtccagaagcaccatcacccggaacaccgacctgcacaccgtgaccctgaagatgaccagcctgaccgccagcgacaccgccacctacttttgcgccagagtgttctacgacatcaacagcggctactacctggacggcatggacctgtggggacctggcacacttgtgaccgtgtccagcacgcgtatccagaaccctgatcctgccgtgtaccagctgcgggatagcaagagcagcgacaagagcgtgtgtctgttcaccgacttcgacagccagaccaacgtgtcccagagcaaggactccgacgtgtacatcaccgataagtgcgtgctggacatgcggagcatggacttcaagagcaactccgccgtggcctggtccaacaagtccgatttcgcctgcgccaacgccttcaacaacagcattatccccgaggacacattcttcccaagccccgagagcagctgcgacgtgaagctggtggaaaagagcttcgagacagacaccaacctgaacttccagatcctgtacgagatcctgctgggcaaggccaccctgtacgccgtgctggtgtctgccctggtgctgatggctatggtcaagcggaaggacagccgggga

SEQ ID NO: 5684 - DNA, 2679 bp, synthetic construct
  source 1..2679: mol_type = other DNA
atggccttaccagtgaccgccttgctcctgccgctggccttgctgctccacgccgccaggccggaagtgcagctggttgaatctggcggaggactggttcagcctggcggatctctgagactgtcttgtgccgccagcggcttcagcttcagcgacttttggatgagctgggtccgacaggcccctggcaaaggacttgaatgggtcgccacaatcagccaggccggcagcgagaaggactacgtggactctgtgaagggcagattcaccatcagccgggacaacgccaagaagtccctgtacctccagatgaacagcctgagagccgaggacaccgccgtgtactattgtgcctctggcgtgtacagcttcgactacagaggccagggcaccctggtcacagtctcttctggtaccggcggaggcggatctggcggcggaggtagcggtggcggaggatctgaattcgacatccagatgacccagagccccagcagcctgtctgccagcgtgggcgacagagtgaccatcacctgtagagccagccagggcatcagctcttggctggcctggtatcagcagaagcccgagaaggcccccaagagcctgatctacgccgcctctagtctccagagcggcgtgcccagcagattttctggcagcggctccggcaccgacttcaccctgacaatcagctccctccagcccgaggacttcgccacctactactgccagcagtacaacagctacccccccacctttggcggaggcaccaaggtggaaatcaagctcgaggacctgaagaacgtgttcccacctgaggtggccgtgttcgagcctagcgaggccgagatcagccacacccagaaagccaccctcgtgtgcctggctaccggcttctaccccgaccatgtggaactgtcttggtgggtcaacggcaaagaggtgcacagcggcgtgtgtaccgacccccagccactgaaagaacagcccgccctgaacgacagccggtactgcctgagcagcagactgagagtgtccgccaccttctggcagaacccccggaaccacttcagatgccaggtgcagttctacggcctgagcgagaacgacgagtggacccaggacagagccaagcccgtgacccagatcgtgtctgccgaagcctggggcagagccgattgcggctttaccagcgagagctaccagcagggcgtgctgagcgccaccaacctgagcgtgatcggcttcagaatcctgctgctgaaagtggccggctttaacctgctgatgaccctgcggctgtggtccagcagggccaagcgatctggatctggagcaacaaacttctcactactcaaacaagcaggtgacgtggaggagaatcccgggcctactagtatggactggatttggcgcatccttttccttgtcggcgctgctaccggcgcgcattccgggccccagctccagctgcaagagtctggacctggcctggtcaagcctagcgagacactgagcctgacctgtaccgtgtccggcgatagcatcagcagcggcgattactactggggctggatcagacagcctcctggcaaaggactggaatggatcggccacatctactacagcggcgtgacctactacaaccccagcctgaagtccagagtgaccatcagcgtggacaccagccggaaccagttctccctgaagctgtctagcgtgacagccgccgataccgccgtgtactactgcaccagagaggacagcagcaactggcggagtagaggccagggaacactggtcacagttagctctggatccggcggaggcggaagtggaggcggaggatctggcggcggaggctctttcgaagaagtgcaactggtggaatcaggcggcggactggtgcagcctggcgagtctctgagactgagctgtgtggcctccggcttcaccttcagccggtacaagatgaactgggtgcgccaggcccctggcaagggactggaatgggtgtcctacatcagccgcagcggcagagacatctactacgccgacagcgtgaagggccggttcaccatcagcagagacaacgccaagaacagcctgtacctccagatgaactccctgcgggacgaggacaccgccgtgtactactgtgccggaaccgtgaccacctattactacttcggcatggacgtgtggggccacggcaccaccgtgacagtgtcatctacgcgtatccagaaccctgatcctgccgtgtaccagctgcgggatagcaagagcagcgacaagagcgtgtgtctgttcaccgacttcgacagccagaccaacgtgtcccagagcaaggactccgacgtgtacatcaccgataagtgcgtgctggacatgcggagcatggacttcaagagcaactccgccgtggcctggtccaacaagtccgatttcgcctgcgccaacgccttcaacaacagcattatccccgaggacacattcttcccaagccccgagagcagctgcgacgtgaagctggtggaaaagagcttcgagacagacaccaacctgaacttccagatcctgtacgagatcctgctgggcaaggccaccctgtacgccgtgctggtgtctgccctggtgctgatggctatggtcaagcggaaggacagccgggga

SEQ ID NO: 5685 - DNA, 2682 bp, synthetic construct
  source 1..2682: mol_type = other DNA
atggccttaccagtgaccgccttgctcctgccgctggccttgctgctccacgccgccaggccggaagtgcagctggttgaatctggcggaggactggttcagcctggcggatctctgagactgtcttgtgccgccagcggcttcagcttcagcgacttttggatgagctgggtccgacaggcccctggcaaaggacttgaatgggtcgccacaatcagccaggccggcagcgagaaggactacgtggactctgtgaagggcagattcaccatcagccgggacaacgccaagaagtccctgtacctccagatgaacagcctgagagccgaggacaccgccgtgtactattgtgcctctggcgtgtacagcttcgactacagaggccagggcaccctggtcacagtctcttctggtaccggcggaggcggatctggcggcggaggtagcggtggcggaggatctgaattcgacatccagatgacccagagccccagcagcctgtctgccagcgtgggcgacagagtgaccatcacctgtagagccagccagggcatcagctcttggctggcctggtatcagcagaagcccgagaaggcccccaagagcctgatctacgccgcctctagtctccagagcggcgtgcccagcagattttctggcagcggctccggcaccgacttcaccctgacaatcagctccctccagcccgaggacttcgccacctactactgccagcagtacaacagctaccctcccacctttggcggaggcaccaaggtggaaatcaagctcgaggacctgaagaacgtgttcccacctgaggtggccgtgttcgagcctagcgaggccgagatcagccacacccagaaagccaccctcgtgtgcctggctaccggcttctaccccgaccatgtggaactgtcttggtgggtcaacggcaaagaggtgcacagcggcgtgtgtaccgacccccagccactgaaagaacagcccgccctgaacgacagccggtactgcctgagcagcagactgagagtgtccgccaccttctggcagaacccccggaaccacttcagatgccaggtgcagttctacggcctgagcgagaacgacgagtggacccaggacagagccaagcccgtgacccagatcgtgtctgccgaagcctggggcagagccgattgcggctttaccagcgagagctaccagcagggcgtgctgagcgccaccaacctgagcgtgatcggcttcagaatcctgctgctgaaagtggccggctttaacctgctgatgaccctgcggctgtggtccagcagggccaagcgatctggatctggagcaacaaacttctcactactcaaacaagcaggtgacgtggaggagaatcccgggcctactagtatggactggatttggcgcatccttttccttgtcggcgctgctaccggcgcgcattccgggccccagctccagctgcaagagtctggacctggcctggtcaagcctagcgagacactgagcctgacctgtaccgtgtccggcgatagcatcagcagcggcgattactactggggctggatcagacagcctcctggcaaaggactggaatggatcggccacatctactacagcggcgtgacctactacaaccccagcctgaagtccagagtgaccatcagcgtggacaccagccggaaccagttctccctgaagctgtctagcgtgacagccgccgataccgccgtgtactactgcaccagagaggacagcagcaactggcggagtagaggccagggaacactggtcacagttagctctggatccggcggaggcggaagtggaggcggaggatctggcggcggaggctctttcgaagaagtgcaactggtggaatccgggggaggctctgtgcagcctggcgagtctctgagactgagctgtgtggcctccggcttcaccttcagccggtacaagatgaactgggtgcgccaggcccctggcaagggactggaatgggtgtcctacatcagccgcagcggcagagacatctactacgccgacagcgtgaagggccggttcaccatcagcagagacaacgccaagaacagcctgtacctccagatgaactccctgcgggacgaggacaccgccgtgtactactgtgccggaaccgtgaccacctattactacgacttcggcatggacgtgtggggccagggcacaaccgtgacagtgtctagcacgcgtatccagaaccctgatcctgccgtgtaccagctgcgggatagcaagagcagcgacaagagcgtgtgtctgttcaccgacttcgacagccagaccaacgtgtcccagagcaaggactccgacgtgtacatcaccgataagtgcgtgctggacatgcggagcatggacttcaagagcaactccgccgtggcctggtccaacaagtccgatttcgcctgcgccaacgccttcaacaacagcattatccccgaggacacattcttcccaagccccgagagcagctgcgacgtgaagctggtggaaaagagcttcgagacagacaccaacctgaacttccagatcctgtacgagatcctgctgggcaaggccaccctgtacgccgtgctggtgtctgccctggtgctgatggctatggtcaagcggaaggacagccgggga

SEQ ID NO: 5686 - DNA, 2676 bp, synthetic construct
  source 1..2676: mol_type = other DNA
atggccttaccagtgaccgccttgctcctgccgctggccttgctgctccacgccgccaggccggaagtgcagctggttgaatctggcggaggactggttcagcctggcggatctctgagactgtcttgtgccgccagcggcttcagcttcagcgacttttggatgagctgggtccgacaggcccctggcaaaggacttgaatgggtcgccacaatcagccaggccggcagcgagaaggactacgtggactctgtgaagggcagattcaccatcagccgggacaacgccaagaagtccctgtacctccagatgaacagcctgagagccgaggacaccgccgtgtactattgtgcctctggcgtgtacagcttcgactacagaggccagggcaccctggtcacagtctcttctggtaccggcggaggcggatctggcggcggaggtagcggtggcggaggatctgaattccagtctgtgctgacacagcctccatctgcctctggcacacctggacagagagtgaccatcagctgtagcggcagcagaagcaacgtcggcggcaactacgtgttctggtatcagcaggtcccaggcgctacccctaagctgctgatctacagaagcaatcagcggcctagcggcgtgcccgatagatttgccggaagcaagagcggcagctctgccagccttgccatctctggactgagaagcgaggacgaggccgactactactgtgccacctgggatgatagcctgagcggcttcgtgtttggcaccggcaccaaagtgacagtgcttggtctcgaggacctgaagaacgtgttcccacctgaggtggccgtgttcgagcctagcgaggccgagatcagccacacccagaaagccaccctcgtgtgcctggctaccggcttctaccccgaccatgtggaactgtcttggtgggtcaacggcaaagaggtgcacagcggcgtgtgtaccgacccccagccactgaaagaacagcccgccctgaacgacagccggtactgcctgagcagcagactgagagtgtccgccaccttctggcagaacccccggaaccacttcagatgccaggtgcagttctacggcctgagcgagaacgacgagtggacccaggacagagccaagcccgtgacccagatcgtgtctgccgaagcctggggcagagccgattgcggctttaccagcgagagctaccagcagggcgtgctgagcgccaccaacctgagcgtgatcggcttcagaatcctgctgctgaaagtggccggctttaacctgctgatgaccctgcggctgtggtccagcagggccaagcgatctggatctggagcaacaaacttctcactactcaaacaagcaggtgacgtggaggagaatcccgggcctactagtatggactggatttggcgcatccttttccttgtcggcgctgctaccggcgcgcattccgggccccagctccagctgcaagagtctggacctggcctggtcaagcctagcgagacactgagcctgacctgtaccgtgtccggcgatagcatcagcagcggcgattactactggggctggatcagacagcctcctggcaaaggactggaatggatcggccacatctactacagcggcgtgacctactacaaccccagcctgaagtccagagtgaccatcagcgtggacaccagccggaaccagttctccctgaagctgtctagcgtgacagccgccgataccgccgtgtactactgcaccagagaggacagcagcaactggcggagtagaggccagggaacactggtcacagttagctctggatccggcggaggcggaagtggaggcggaggatctggcggcggaggctctttcgaagttcagctggttgaatctggcggcggactggttaagcctggcggatctctgagactgtcttgtgccgccagcggcttcaccttcagcgattactacatgagctggatcagacaggcccctggcaaaggactggaatgggtgtcctacatcagcagcagcggctccaccatctactacgccgatagcgtgaagggcagattcaccatcagccgggacaacgccaagaacagcctgtacctccagatgaactccctgagagccgaggacaccgccgtgtactattgcgccagaggctacggcaaagcctacgatcaatggggccagggcacactggtcaccgtttcttctacgcgtatccagaaccctgatcctgccgtgtaccagctgcgggatagcaagagcagcgacaagagcgtgtgtctgttcaccgacttcgacagccagaccaacgtgtcccagagcaaggactccgacgtgtacatcaccgataagtgcgtgctggacatgcggagcatggacttcaagagcaactccgccgtggcctggtccaacaagtccgatttcgcctgcgccaacgccttcaacaacagcattatccccgaggacacattcttcccaagccccgagagcagctgcgacgtgaagctggtggaaaagagcttcgagacagacaccaacctgaacttccagatcctgtacgagatcctgctgggcaaggccaccctgtacgccgtgctggtgtctgccctggtgctgatggctatggtcaagcggaaggacagccgggga

SEQ ID NO: 5687 - DNA, 2673 bp, synthetic construct
  source 1..2673: mol_type = other DNA
atggccttaccagtgaccgccttgctcctgccgctggccttgctgctccacgccgccaggccggaagtgcagctggttgaatctggcggaggactggttcagcctggcggatctctgagactgtcttgtgccgccagcggcttcagcttcagcgacttttggatgagctgggtccgacaggcccctggcaaaggacttgaatgggtcgccacaatcagccaggccggcagcgagaaggactacgtggactctgtgaagggcagattcaccatcagccgggacaacgccaagaagtccctgtacctccagatgaacagcctgagagccgaggacaccgccgtgtactattgtgcctctggcgtgtacagcttcgactacagaggccagggcaccctggtcacagtctcttctggtaccggcggaggcggatctggcggcggaggtagcggtggcggaggatctgaattccagtctgtggtcacacagccacctagcatgtctgccgctccaggccagcaagtgaccatctcttgtagcggcggcaacagcaacatcgagcggaactacgtgtcctggtatctgcaactgcctggcacagcccctaagctggtcatcttcgacaacgacagacggcccagcggcatccccgatagattttctggcagcaagagcggcaccagcgccacactgggaattaccggacttcagacaggcgacgaggccgactactactgtggcacatgggactctagcctgagaggctgggttttcggcggaggcacaaagctgacagtgcttggtctcgaggacctgaagaacgtgttcccacctgaggtggccgtgttcgagcctagcgaggccgagatcagccacacccagaaagccaccctcgtgtgcctggctaccggcttctaccccgaccatgtggaactgtcttggtgggtcaacggcaaagaggtgcacagcggcgtgtgtaccgacccccagccactgaaagaacagcccgccctgaacgacagccggtactgcctgagcagcagactgagagtgtccgccaccttctggcagaacccccggaaccacttcagatgccaggtgcagttctacggcctgagcgagaacgacgagtggacccaggacagagccaagcccgtgacccagatcgtgtctgccgaagcctggggcagagccgattgcggctttaccagcgagagctaccagcagggcgtgctgagcgccaccaacctgagcgtgatcggcttcagaatcctgctgctgaaagtggccggctttaacctgctgatgaccctgcggctgtggtccagcagggccaagcgatctggatctggagcaacaaacttctcactactcaaacaagcaggtgacgtggaggagaatcccgggcctactagtatggactggatttggcgcatccttttccttgtcggcgctgctaccggcgcgcattccgggccccagctccagctgcaagagtctggacctggcctggtcaagcctagcgagacactgagcctgacctgtaccgtgtccggcgatagcatcagcagcggcgattactactggggctggatcagacagcctcctggcaaaggactggaatggatcggccacatctactacagcggcgtgacctactacaaccccagcctgaagtccagagtgaccatcagcgtggacaccagccggaaccagttctccctgaagctgtctagcgtgacagccgccgataccgccgtgtactactgcaccagagaggacagcagcaactggcggagtagaggccagggaacactggtcacagttagctctggatccggcggaggcggaagtggaggcggaggatctggcggcggaggctctttcgaagtgcagctcgttgagtctggcggcggactgattcaacctggcggaagcctgagactgagctgtgccgcttccggcttcaccttcagcaactacgccatgaactgggttcgacaggcccctggcaaaggactggaatgggtgtccaccatcaacggcagaggcagcagcaccatctacgccgattctgtgaagggcagattcaccatcagccgggacaacagcaagaacaccctgtacctccagatgaactccctgagagccgaggacaccgccacctattactgtgcccggtacatcagcagaggactgggcgattcttggggccagggcacactggttacagtgacgcgtatccagaaccctgatcctgccgtgtaccagctgcgggatagcaagagcagcgacaagagcgtgtgtctgttcaccgacttcgacagccagaccaacgtgtcccagagcaaggactccgacgtgtacatcaccgataagtgcgtgctggacatgcggagcatggacttcaagagcaactccgccgtggcctggtccaacaagtccgatttcgcctgcgccaacgccttcaacaacagcattatccccgaggacacattcttcccaagccccgagagcagctgcgacgtgaagctggtggaaaagagcttcgagacagacaccaacctgaacttccagatcctgtacgagatcctgctgggcaaggccaccctgtacgccgtgctggtgtctgccctggtgctgatggctatggtcaagcggaaggacagccgggga

SEQ ID NO: 5688 - DNA, 2676 bp, synthetic construct
  source 1..2676: mol_type = other DNA
atggccttaccagtgaccgccttgctcctgccgctggccttgctgctccacgccgccaggccggaagtgcagctggttgaatctggcggaggactggttcagcctggcggatctctgagactgtcttgtgccgccagcggcttcagcttcagcgacttttggatgagctgggtccgacaggcccctggcaaaggacttgaatgggtcgccacaatcagccaggccggcagcgagaaggactacgtggactctgtgaagggcagattcaccatcagccgggacaacgccaagaagtccctgtacctccagatgaacagcctgagagccgaggacaccgccgtgtactattgtgcctctggcgtgtacagcttcgactacagaggccagggcaccctggtcacagtctcttctggtaccggcggaggcggatctggcggcggaggtagcggtggcggaggatctgaattcgacgtcgtgatgacccagacccctctgagcctgcctgtgtccctgggcgatcaggccagcatcagctgtagaagcagccagagcctggtgcacagcaacggcaacacctacctgcactggtatctccagaagcccggccagagccccaagctgctgatctacaaggtgtccaacagattcagcggcgtgcccgacagattctccggcagcggctctggcaccgacttcaccctgaagatcagccgggtggaagccgaggacctgggcgtgtacttctgtagccagaacacccccgtgccccccaagtttggcagcggcaccaagctggaaatcaagctcgaggacctgaagaacgtgttcccacctgaggtggccgtgttcgagcctagcgaggccgagatcagccacacccagaaagccaccctcgtgtgcctggctaccggcttctaccccgaccatgtggaactgtcttggtgggtcaacggcaaagaggtgcacagcggcgtgtgtaccgacccccagccactgaaagaacagcccgccctgaacgacagccggtactgcctgagcagcagactgagagtgtccgccaccttctggcagaacccccggaaccacttcagatgccaggtgcagttctacggcctgagcgagaacgacgagtggacccaggacagagccaagcccgtgacccagatcgtgtctgccgaagcctggggcagagccgattgcggctttaccagcgagagctaccagcagggcgtgctgagcgccaccaacctgagcgtgatcggcttcagaatcctgctgctgaaagtggccggctttaacctgctgatgaccctgcggctgtggtccagcagggccaagcgatctggatctggagcaacaaacttctcactactcaaacaagcaggtgacgtggaggagaatcccgggcctactagtatggactggatttggcgcatccttttccttgtcggcgctgctaccggcgcgcattccgggccccagctccagctgcaagagtctggacctggcctggtcaagcctagcgagacactgagcctgacctgtaccgtgtccggcgatagcatcagcagcggcgattactactggggctggatcagacagcctcctggcaaaggactggaatggatcggccacatctactacagcggcgtgacctactacaaccccagcctgaagtccagagtgaccatcagcgtggacaccagccggaaccagttctccctgaagctgtctagcgtgacagccgccgataccgccgtgtactactgcaccagagaggacagcagcaactggcggagtagaggccagggaacactggtcacagttagctctggatccggcggaggcggaagtggaggcggaggatctggcggcggaggctctttcgaacaggtgcagctccagcagtctggcgctgaactcgtgcggcctggcgcttctgtgaagctgtcttgcaaggccagcggctacaccttcaacgactacgagatgcactgggtcaagcagacccctgtgcacggcctgaagtggatcggagccctggaacccaagaccggcgataccgcctacagccagaagttcaagggcaaggccaccctgaccgccgacaagagcagcagcacagcctacatggaactgcggagcctgaccagcgaggacagcgccgtgtactactgcaccagctgctactactacacctacagcggccagggcaccctcgtgacagtgtctgctacgcgtatccagaaccctgatcctgccgtgtaccagctgcgggatagcaagagcagcgacaagagcgtgtgtctgttcaccgacttcgacagccagaccaacgtgtcccagagcaaggactccgacgtgtacatcaccgataagtgcgtgctggacatgcggagcatggacttcaagagcaactccgccgtggcctggtccaacaagtccgatttcgcctgcgccaacgccttcaacaacagcattatccccgaggacacattcttcccaagccccgagagcagctgcgacgtgaagctggtggaaaagagcttcgagacagacaccaacctgaacttccagatcctgtacgagatcctgctgggcaaggccaccctgtacgccgtgctggtgtctgccctggtgctgatggctatggtcaagcggaaggacagccgggga

SEQ ID NO: 5689 - DNA, 2673 bp, synthetic construct
  source 1..2673: mol_type = other DNA
atggccttaccagtgaccgccttgctcctgccgctggccttgctgctccacgccgccaggccggaagtgcagctggttgaatctggcggaggactggttcagcctggcggatctctgagactgtcttgtgccgccagcggcttcagcttcagcgacttttggatgagctgggtccgacaggcccctggcaaaggacttgaatgggtcgccacaatcagccaggccggcagcgagaaggactacgtggactctgtgaagggcagattcaccatcagccgggacaacgccaagaagtccctgtacctccagatgaacagcctgagagccgaggacaccgccgtgtactattgtgcctctggcgtgtacagcttcgactacagaggccagggcaccctggtcacagtctcttctggtaccggcggaggcggatctggcggcggaggtagcggtggcggaggatctgaattcgacatccaactgacccagagccccagcagcctgtctgcctctgtgggcgacagagtgaccatcacctgtagagccagccagggcatcagaaacgacctgggctggtatcagcagaagcccggcaaggcccccaagcggctgatctatgctgccagctccctccagaatggcgtgcccagcagattttccggcagcggctctggcaccgagttcaccctgaccatcagctccctccagcccgaggacttcgccacctactactgcctccagcacaacacctaccccgccttcggccagggcaccaaggtggaaatcaagagactcgaggacctgaagaacgtgttcccacctgaggtggccgtgttcgagcctagcgaggccgagatcagccacacccagaaagccaccctcgtgtgcctggctaccggcttctaccccgaccatgtggaactgtcttggtgggtcaacggcaaagaggtgcacagcggcgtgtgtaccgacccccagccactgaaagaacagcccgccctgaacgacagccggtactgcctgagcagcagactgagagtgtccgccaccttctggcagaacccccggaaccacttcagatgccaggtgcagttctacggcctgagcgagaacgacgagtggacccaggacagagccaagcccgtgacccagatcgtgtctgccgaagcctggggcagagccgattgcggctttaccagcgagagctaccagcagggcgtgctgagcgccaccaacctgagcgtgatcggcttcagaatcctgctgctgaaagtggccggctttaacctgctgatgaccctgcggctgtggtccagcagggccaagcgatctggatctggagcaacaaacttctcactactcaaacaagcaggtgacgtggaggagaatcccgggcctactagtatggactggatttggcgcatccttttccttgtcggcgctgctaccggcgcgcattccgggccccagctccagctgcaagagtctggacctggcctggtcaagcctagcgagacactgagcctgacctgtaccgtgtccggcgatagcatcagcagcggcgattactactggggctggatcagacagcctcctggcaaaggactggaatggatcggccacatctactacagcggcgtgacctactacaaccccagcctgaagtccagagtgaccatcagcgtggacaccagccggaaccagttctccctgaagctgtctagcgtgacagccgccgataccgccgtgtactactgcaccagagaggacagcagcaactggcggagtagaggccagggaacactggtcacagttagctctggatccggcggaggcggaagtggaggcggaggatctggcggcggaggctctttcgaacaggtgcaactccaggaatctggccctggcctcgtgaagcctagccagaccctgagcctgacctgtaccgtgtctggcggcagcatcagcagcttcaactactactggtcctggatcagacaccaccctggcaagggcctggaatggatcggctacatctactacagcggcagcacctacagcaaccccagcctgaagtcccgcgtgaccatctccgtggacaccagcaagaaccagtttagcctgaccctgtccagcgtgacagccgccgataccgccgtgtactactgcgccagaggctacaactggaactacttcgactactggggccagggaaccctcgtgaccgtgtctagtacgcgtatccagaaccctgatcctgccgtgtaccagctgcgggatagcaagagcagcgacaagagcgtgtgtctgttcaccgacttcgacagccagaccaacgtgtcccagagcaaggactccgacgtgtacatcaccgataagtgcgtgctggacatgcggagcatggacttcaagagcaactccgccgtggcctggtccaacaagtccgatttcgcctgcgccaacgccttcaacaacagcattatccccgaggacacattcttcccaagccccgagagcagctgcgacgtgaagctggtggaaaagagcttcgagacagacaccaacctgaacttccagatcctgtacgagatcctgctgggcaaggccaccctgtacgccgtgctggtgtctgccctggtgctgatggctatggtcaagcggaaggacagccgggga

SEQ ID NO: 5690 - DNA, 2679 bp, synthetic construct
  source 1..2679: mol_type = other DNA
atggccttaccagtgaccgccttgctcctgccgctggccttgctgctccacgccgccaggccggaagtgcagctggttgaatctggcggaggactggttcagcctggcggatctctgagactgtcttgtgccgccagcggcttcagcttcagcgacttttggatgagctgggtccgacaggcccctggcaaaggacttgaatgggtcgccacaatcagccaggccggcagcgagaaggactacgtggactctgtgaagggcagattcaccatcagccgggacaacgccaagaagtccctgtacctccagatgaacagcctgagagccgaggacaccgccgtgtactattgtgcctctggcgtgtacagcttcgactacagaggccagggcaccctggtcacagtctcttctggtaccggcggaggcggatctggcggcggaggtagcggtggcggaggatctgaattcgacgacatcgtgctgacccagagccccgccagcctggccgtgagcctgggccagagcgtgaccatcagctgcagagccagcgagagcgtggagtactacggcaccagcctgatgcagtggtaccagcagaagcccggccagccccccaagctgctgatctacgccaccagcaacgtggagagcggcgtgcccgccagattcagcggcagcggcagcggcaccgacttcagcctgaacatccaccccgtggaggaggacgacatcgccatgtacttctgccagcagagcagaaagctgcccagcaccttcggcggcggcaccaagctggagatcaagctcgaggacctgaagaacgtgttcccacctgaggtggccgtgttcgagcctagcgaggccgagatcagccacacccagaaagccaccctcgtgtgcctggctaccggcttctaccccgaccatgtggaactgtcttggtgggtcaacggcaaagaggtgcacagcggcgtgtgtaccgacccccagccactgaaagaacagcccgccctgaacgacagccggtactgcctgagcagcagactgagagtgtccgccaccttctggcagaacccccggaaccacttcagatgccaggtgcagttctacggcctgagcgagaacgacgagtggacccaggacagagccaagcccgtgacccagatcgtgtctgccgaagcctggggcagagccgattgcggctttaccagcgagagctaccagcagggcgtgctgagcgccaccaacctgagcgtgatcggcttcagaatcctgctgctgaaagtggccggctttaacctgctgatgaccctgcggctgtggtccagcagggccaagcgatctggatctggagcaacaaacttctcactactcaaacaagcaggtgacgtggaggagaatcccgggcctactagtatggactggatttggcgcatccttttccttgtcggcgctgctaccggcgcgcattccgggccccagctccagctgcaagagtctggacctggcctggtcaagcctagcgagacactgagcctgacctgtaccgtgtccggcgatagcatcagcagcggcgattactactggggctggatcagacagcctcctggcaaaggactggaatggatcggccacatctactacagcggcgtgacctactacaaccccagcctgaagtccagagtgaccatcagcgtggacaccagccggaaccagttctccctgaagctgtctagcgtgacagccgccgataccgccgtgtactactgcaccagagaggacagcagcaactggcggagtagaggccagggaacactggtcacagttagctctggatccggcggaggcggaagtggaggcggaggatctggcggcggaggctctttcgaagacgtgagactgcaggagagcggccccggccaggtgaagcccagccagaccgtgagcctgacctgcagcgtgaccggctacagcatcaccaacggcaaccactggtggaactggatcagacaggtgagcggcagcaagctggagtggatcggctacatcagcagcagcggcagcaccgacagcaaccccagcctgaagagcagaatcagcatcaccagagacaccagcaagaaccagctgttcctgcagctgaacagcgtgaccaccgaggacatcgccacctactactgcgccagaggctactacttcgactactggggccagggcaccaccctgaccgtgagcagcacgcgtatccagaaccctgatcctgccgtgtaccagctgcgggatagcaagagcagcgacaagagcgtgtgtctgttcaccgacttcgacagccagaccaacgtgtcccagagcaaggactccgacgtgtacatcaccgataagtgcgtgctggacatgcggagcatggacttcaagagcaactccgccgtggcctggtccaacaagtccgatttcgcctgcgccaacgccttcaacaacagcattatccccgaggacacattcttcccaagccccgagagcagctgcgacgtgaagctggtggaaaagagcttcgagacagacaccaacctgaacttccagatcctgtacgagatcctgctgggcaaggccaccctgtacgccgtgctggtgtctgccctggtgctgatggctatggtcaagcggaaggacagccgggga

SEQ ID NO: 5691 - DNA, 2676 bp, synthetic construct
  source 1..2676: mol_type = other DNA
atggccttaccagtgaccgccttgctcctgccgctggccttgctgctccacgccgccaggccggaagtgcagctggttgaatctggcggaggactggttcagcctggcggatctctgagactgtcttgtgccgccagcggcttcagcttcagcgacttttggatgagctgggtccgacaggcccctggcaaaggacttgaatgggtcgccacaatcagccaggccggcagcgagaaggactacgtggactctgtgaagggcagattcaccatcagccgggacaacgccaagaagtccctgtacctccagatgaacagcctgagagccgaggacaccgccgtgtactattgtgcctctggcgtgtacagcttcgactacagaggccagggcaccctggtcacagtctcttctggtaccggcggaggcggatctggcggcggaggtagcggtggcggaggatctgaattcgacatccagatgacccagagccccagcagcctgtctgccagcgtgggcgacagagtgaccatcacctgtagagccagccaggacgtgaacaccgccgtggcctggtatcagcagaagcctggcaaggcccccaagctgctgatctacagcgccagcttcctggaaagcggcgtgcccagcagattcagcggaagcagaagcggcaccgacttcaccctgaccatcagctccctccagcccgaggacttcgccacctactactgccagcagcactacaccacccctcccaccttcggccagaccaaggtggaaatcaagagactcgaggacctgaagaacgtgttcccacctgaggtggccgtgttcgagcctagcgaggccgagatcagccacacccagaaagccaccctcgtgtgcctggctaccggcttctaccccgaccatgtggaactgtcttggtgggtcaacggcaaagaggtgcacagcggcgtgtgtaccgacccccagccactgaaagaacagcccgccctgaacgacagccggtactgcctgagcagcagactgagagtgtccgccaccttctggcagaacccccggaaccacttcagatgccaggtgcagttctacggcctgagcgagaacgacgagtggacccaggacagagccaagcccgtgacccagatcgtgtctgccgaagcctggggcagagccgattgcggctttaccagcgagagctaccagcagggcgtgctgagcgccaccaacctgagcgtgatcggcttcagaatcctgctgctgaaagtggccggctttaacctgctgatgaccctgcggctgtggtccagcagggccaagcgatctggatctggagcaacaaacttctcactactcaaacaagcaggtgacgtggaggagaatcccgggcctactagtatggactggatttggcgcatccttttccttgtcggcgctgctaccggcgcgcattccgggccccagctccagctgcaagagtctggacctggcctggtcaagcctagcgagacactgagcctgacctgtaccgtgtccggcgatagcatcagcagcggcgattactactggggctggatcagacagcctcctggcaaaggactggaatggatcggccacatctactacagcggcgtgacctactacaaccccagcctgaagtccagagtgaccatcagcgtggacaccagccggaaccagttctccctgaagctgtctagcgtgacagccgccgataccgccgtgtactactgcaccagagaggacagcagcaactggcggagtagaggccagggaacactggtcacagttagctctggatccggcggaggcggaagtggaggcggaggatctggcggcggaggctctttcgaagaagtgcaactggtggaatctggcggcggactggtgcagcctggcggatctctgagactgagctgtgccgccagcggcttcaacatcaaggacacctacatccactgggtgcgccaggcccctggaaagggactggaatgggtggcccggatctaccccaccaacggctacaccagatacgccgacagcgtgaagggccggttcaccatcagcgccgacaccagcaagaataccgcctacctccagatgaacagcctgcgggccgaggataccgccgtgtactactgctcaagatggggaggcgacggcttctacgctatggacgtgtggggccagggcacccttgtgaccgtgtcatctacgcgtatccagaaccctgatcctgccgtgtaccagctgcgggatagcaagagcagcgacaagagcgtgtgtctgttcaccgacttcgacagccagaccaacgtgtcccagagcaaggactccgacgtgtacatcaccgataagtgcgtgctggacatgcggagcatggacttcaagagcaactccgccgtggcctggtccaacaagtccgatttcgcctgcgccaacgccttcaacaacagcattatccccgaggacacattcttcccaagccccgagagcagctgcgacgtgaagctggtggaaaagagcttcgagacagacaccaacctgaacttccagatcctgtacgagatcctgctgggcaaggccaccctgtacgccgtgctggtgtctgccctggtgctgatggctatggtcaagcggaaggacagccgggga

SEQ ID NO: 5692 - DNA, 2673 bp, synthetic construct
  source 1..2673: mol_type = other DNA
atggccttaccagtgaccgccttgctcctgccgctggccttgctgctccacgccgccaggccggaagtgcagctggttgaatctggcggaggactggttcagcctggcggatctctgagactgtcttgtgccgccagcggcttcagcttcagcgacttttggatgagctgggtccgacaggcccctggcaaaggacttgaatgggtcgccacaatcagccaggccggcagcgagaaggactacgtggactctgtgaagggcagattcaccatcagccgggacaacgccaagaagtccctgtacctccagatgaacagcctgagagccgaggacaccgccgtgtactattgtgcctctggcgtgtacagcttcgactacagaggccagggcaccctggtcacagtctcttctggtaccggcggaggcggatctggcggcggaggtagcggtggcggaggatctgaattcgaccagagcgtgctgacacagcctcctagcgtgtcagtggcccctggcaagaccgccagaatcccctgcgagggcaactacatcggcagcagcaacgtgcactggtatcagcagaagcccggccaggctcccgtgctcgtgatccacttcgacagcgacagacccagcggcatccccgacagattcagcggcagcaacagcggcaacatggctaccctgaccatcagcagagtggaagccggggacgaggccgactactactgtcaagtgtgggagaaccacggctgggtgttcggcggaggcaccaagctgacagtgctgtctctcgaggacctgaagaacgtgttcccacctgaggtggccgtgttcgagcctagcgaggccgagatcagccacacccagaaagccaccctcgtgtgcctggctaccggcttctaccccgaccatgtggaactgtcttggtgggtcaacggcaaagaggtgcacagcggcgtgtgtaccgacccccagccactgaaagaacagcccgccctgaacgacagccggtactgcctgagcagcagactgagagtgtccgccaccttctggcagaacccccggaaccacttcagatgccaggtgcagttctacggcctgagcgagaacgacgagtggacccaggacagagccaagcccgtgacccagatcgtgtctgccgaagcctggggcagagccgattgcggctttaccagcgagagctaccagcagggcgtgctgagcgccaccaacctgagcgtgatcggcttcagaatcctgctgctgaaagtggccggctttaacctgctgatgaccctgcggctgtggtccagcagggccaagcgatctggatctggagcaacaaacttctcactactcaaacaagcaggtgacgtggaggagaatcccgggcctactagtatggactggatttggcgcatccttttccttgtcggcgctgctaccggcgcgcattccgggccccagctccagctgcaagagtctggacctggcctggtcaagcctagcgagacactgagcctgacctgtaccgtgtccggcgatagcatcagcagcggcgattactactggggctggatcagacagcctcctggcaaaggactggaatggatcggccacatctactacagcggcgtgacctactacaaccccagcctgaagtccagagtgaccatcagcgtggacaccagccggaaccagttctccctgaagctgtctagcgtgacagccgccgataccgccgtgtactactgcaccagagaggacagcagcaactggcggagtagaggccagggaacactggtcacagttagctctggatccggcggaggcggaagtggaggcggaggatctggcggcggaggctctttcgaagaggtgcaactggtggaaacaggcggcggactggtgcagcctggcgagtctctgagactgagctgtgccgccagcggcttcaccttcagcgactacgagatgaactgggtgcgccaggcccctggaaagggcctggaatgggtgtcctacatcagcagctccggcagcaccatctactacgccgacagcgtgaagggccggtttaccatctaccgggacaacgccaagaacagcctgtacctccagatgaactccctgcgggccgaggacaccgccctgtactattgtgccagagcctggggcgtgggaccccctgattattggggacagggcaccctcgtgaccgtgtcctctacgcgtatccagaaccctgatcctgccgtgtaccagctgcgggatagcaagagcagcgacaagagcgtgtgtctgttcaccgacttcgacagccagaccaacgtgtcccagagcaaggactccgacgtgtacatcaccgataagtgcgtgctggacatgcggagcatggacttcaagagcaactccgccgtggcctggtccaacaagtccgatttcgcctgcgccaacgccttcaacaacagcattatccccgaggacacattcttcccaagccccgagagcagctgcgacgtgaagctggtggaaaagagcttcgagacagacaccaacctgaacttccagatcctgtacgagatcctgctgggcaaggccaccctgtacgccgtgctggtgtctgccctggtgctgatggctatggtcaagcggaaggacagccgggga

SEQ ID NO: 5693 - DNA, 2697 bp, synthetic construct
  source 1..2697: mol_type = other DNA
atggccttaccagtgaccgccttgctcctgccgctggccttgctgctccacgccgccaggccggaagtgcagctggttgaatctggcggaggactggttcagcctggcggatctctgagactgtcttgtgccgccagcggcttcagcttcagcgacttttggatgagctgggtccgacaggcccctggcaaaggacttgaatgggtcgccacaatcagccaggccggcagcgagaaggactacgtggactctgtgaagggcagattcaccatcagccgggacaacgccaagaagtccctgtacctccagatgaacagcctgagagccgaggacaccgccgtgtactattgtgcctctggcgtgtacagcttcgactacagaggccagggcaccctggtcacagtctcttctggtaccggcggaggcggatctggcggcggaggtagcggtggcggaggatctgaattcgacatccagatgacccagagccccagcagcctgtctgccagcgtgggcgataccgtgaccatcacctgtcaggccaacggctacctgaactggtatcagcagcggagaggcaaggcccccaagctgctgatctacgacggcagcaagctggaaagaggcgtgcccagcagattcagcggcagaagatggggccaggagtacaacctgaccatcaacaacctccagcccgaggatattgccacatacttttgccaggtgtacgagttcgtggtgcccggcacacggctggacctgaagagaacagtggctgctcctctcgaggacctgaagaacgtgttcccacctgaggtggccgtgttcgagcctagcgaggccgagatcagccacacccagaaagccaccctcgtgtgcctggctaccggcttctaccccgaccatgtggaactgtcttggtgggtcaacggcaaagaggtgcacagcggcgtgtgtaccgacccccagccactgaaagaacagcccgccctgaacgacagccggtactgcctgagcagcagactgagagtgtccgccaccttctggcagaacccccggaaccacttcagatgccaggtgcagttctacggcctgagcgagaacgacgagtggacccaggacagagccaagcccgtgacccagatcgtgtctgccgaagcctggggcagagccgattgcggctttaccagcgagagctaccagcagggcgtgctgagcgccaccaacctgagcgtgatcggcttcagaatcctgctgctgaaagtggccggctttaacctgctgatgaccctgcggctgtggtccagcagggccaagcgatctggatctggagcaacaaacttctcactactcaaacaagcaggtgacgtggaggagaatcccgggcctactagtatggactggatttggcgcatccttttccttgtcggcgctgctaccggcgcgcattccgggccccagctccagctgcaagagtctggacctggcctggtcaagcctagcgagacactgagcctgacctgtaccgtgtccggcgatagcatcagcagcggcgattactactggggctggatcagacagcctcctggcaaaggactggaatggatcggccacatctactacagcggcgtgacctactacaaccccagcctgaagtccagagtgaccatcagcgtggacaccagccggaaccagttctccctgaagctgtctagcgtgacagccgccgataccgccgtgtactactgcaccagagaggacagcagcaactggcggagtagaggccagggaacactggtcacagttagctctggatccggcggaggcggaagtggaggcggaggatctggcggcggaggctctttcgaacaggtgcagctgctccagtctggcgctgccgtgacaaagcctggcgcttctgtgcgggtgtcctgtgaagccagcggctacaacatccgggactacttcatccactggtggcggcaggctccaggccagggactccagtgggtgggatggatcaaccccaagaccggccagcccaacaaccccagacagttccagggcagagtgtccctgaccagacacgccagctgggacttcgacaccttcagcttctacatggatctgaaggccctgcggagcgacgataccgccgtgtacttctgcgccagacagagaagcgactactgggatttcgacgtgtggggcagcggcacccaagtgacagtgtctagcgccagcaccaagggacccacgcgtatccagaaccctgatcctgccgtgtaccagctgcgggatagcaagagcagcgacaagagcgtgtgtctgttcaccgacttcgacagccagaccaacgtgtcccagagcaaggactccgacgtgtacatcaccgataagtgcgtgctggacatgcggagcatggacttcaagagcaactccgccgtggcctggtccaacaagtccgatttcgcctgcgccaacgccttcaacaacagcattatccccgaggacacattcttcccaagccccgagagcagctgcgacgtgaagctggtggaaaagagcttcgagacagacaccaacctgaacttccagatcctgtacgagatcctgctgggcaaggccaccctgtacgccgtgctggtgtctgccctggtgctgatggctatggtcaagcggaaggacagccgggga

SEQ ID NO: 5694 - DNA, 2715 bp, synthetic construct
  source 1..2715: mol_type = other DNA
atggccttaccagtgaccgccttgctcctgccgctggccttgctgctccacgccgccaggccggaagtgcagctggttgaatctggcggaggactggttcagcctggcggatctctgagactgtcttgtgccgccagcggcttcagcttcagcgacttttggatgagctgggtccgacaggcccctggcaaaggacttgaatgggtcgccacaatcagccaggccggcagcgagaaggactacgtggactctgtgaagggcagattcaccatcagccgggacaacgccaagaagtccctgtacctccagatgaacagcctgagagccgaggacaccgccgtgtactattgtgcctctggcgtgtacagcttcgactacagaggccagggcaccctggtcacagtctcttctggtaccggcggaggcggatctggcggcggaggtagcggtggcggaggatctgaattccagtctgccctgacacagcctcctagcgcctctggctctcccggccagagcatcaccatcagctgtaccggcaccagcaacaacttcgtgtcctggtatcagcagcacgccggcaaggcccccaagctcgtgatctacgacgtgaacaagcggcccagcggcgtgcccgatagattcagcggcagcaagagcggcaacaccgccagcctgacagtgtctggcctccagaccgatgacgaggccgtgtactactgcggcagcctcgtgggcaactgggacgtgatctttggcggaggcaccaagctgaccgtgctgctcgaggacctgaagaacgtgttcccacctgaggtggccgtgttcgagcctagcgaggccgagatcagccacacccagaaagccaccctcgtgtgcctggctaccggcttctaccccgaccatgtggaactgtcttggtgggtcaacggcaaagaggtgcacagcggcgtgtgtaccgacccccagccactgaaagaacagcccgccctgaacgacagccggtactgcctgagcagcagactgagagtgtccgccaccttctggcagaacccccggaaccacttcagatgccaggtgcagttctacggcctgagcgagaacgacgagtggacccaggacagagccaagcccgtgacccagatcgtgtctgccgaagcctggggcagagccgattgcggctttaccagcgagagctaccagcagggcgtgctgagcgccaccaacctgagcgtgatcggcttcagaatcctgctgctgaaagtggccggctttaacctgctgatgaccctgcggctgtggtccagcagggccaagcgatctggatctggagcaacaaacttctcactactcaaacaagcaggtgacgtggaggagaatcccgggcctactagtatggactggatttggcgcatccttttccttgtcggcgctgctaccggcgcgcattccgggccccagctccagctgcaagagtctggacctggcctggtcaagcctagcgagacactgagcctgacctgtaccgtgtccggcgatagcatcagcagcggcgattactactggggctggatcagacagcctcctggcaaaggactggaatggatcggccacatctactacagcggcgtgacctactacaaccccagcctgaagtccagagtgaccatcagcgtggacaccagccggaaccagttctccctgaagctgtctagcgtgacagccgccgataccgccgtgtactactgcaccagagaggacagcagcaactggcggagtagaggccagggaacactggtcacagttagctctggatccggcggaggcggaagtggaggcggaggatctggcggcggaggctctttcgaacagccccagctccaggaatctggccccacactggtggaagccagcgagacactgagcctgacctgtgccgtgtccggcgattctaccgccgcctgcaatagcttctggggctgggtgcgccagcctcctggaaagggactggaatgggtgggaagcctgagccactgcgccagctattggaaccggggctggacctaccacaaccccagcctgaagtccagactgaccctggccctggacacccccaagaacctggtgttcctgaagctgaacagcgtgacagccgccgacaccgccacctactactgtgccagatttggcggcgaggtgctgcggtacaccgactggcctaaacctgcctgggtggacctgtggggcagaggaacactcgtgaccgtgtccagcacgcgtatccagaaccctgatcctgccgtgtaccagctgcgggatagcaagagcagcgacaagagcgtgtgtctgttcaccgacttcgacagccagaccaacgtgtcccagagcaaggactccgacgtgtacatcaccgataagtgcgtgctggacatgcggagcatggacttcaagagcaactccgccgtggcctggtccaacaagtccgatttcgcctgcgccaacgccttcaacaacagcattatccccgaggacacattcttcccaagccccgagagcagctgcgacgtgaagctggtggaaaagagcttcgagacagacaccaacctgaacttccagatcctgtacgagatcctgctgggcaaggccaccctgtacgccgtgctggtgtctgccctggtgctgatggctatggtcaagcggaaggacagccgggga

SEQ ID NO: 5695 - DNA, 2670 bp, synthetic construct
  source 1..2670: mol_type = other DNA
atggccttaccagtgaccgccttgctcctgccgctggccttgctgctccacgccgccaggccggaagtgcagctggttgaatctggcggaggactggttcagcctggcggatctctgagactgtcttgtgccgccagcggcttcagcttcagcgacttttggatgagctgggtccgacaggcccctggcaaaggacttgaatgggtcgccacaatcagccaggccggcagcgagaaggactacgtggactctgtgaagggcagattcaccatcagccgggacaacgccaagaagtccctgtacctccagatgaacagcctgagagccgaggacaccgccgtgtactattgtgcctctggcgtgtacagcttcgactacagaggccagggcaccctggtcacagtctcttctggtaccggcggaggcggatctggcggcggaggtagcggtggcggaggatctgaattcgagatcgtgctgacacagagccctggcaccctgagcctgtctccaggcgagacagccatcatcagctgccggacaagccagtacggcagcctggcctggtatcagcagaggccaggacaggcccccagactcgtgatctacagcggcagcacaagagccgccggaatccccgatagattcagcggctccagatggggacccgactacaacctgaccatcagcaacctggaaagcggcgacttcggcgtgtactactgccagcagtacgagttcttcggccagggcaccaaggtgcaggtggacatcaaaagactcgaggacctgaagaacgtgttcccacctgaggtggccgtgttcgagcctagcgaggccgagatcagccacacccagaaagccaccctcgtgtgcctggctaccggcttctaccccgaccatgtggaactgtcttggtgggtcaacggcaaagaggtgcacagcggcgtgtgtaccgacccccagccactgaaagaacagcccgccctgaacgacagccggtactgcctgagcagcagactgagagtgtccgccaccttctggcagaacccccggaaccacttcagatgccaggtgcagttctacggcctgagcgagaacgacgagtggacccaggacagagccaagcccgtgacccagatcgtgtctgccgaagcctggggcagagccgattgcggctttaccagcgagagctaccagcagggcgtgctgagcgccaccaacctgagcgtgatcggcttcagaatcctgctgctgaaagtggccggctttaacctgctgatgaccctgcggctgtggtccagcagggccaagcgatctggatctggagcaacaaacttctcactactcaaacaagcaggtgacgtggaggagaatcccgggcctactagtatggactggatttggcgcatccttttccttgtcggcgctgctaccggcgcgcattccgggccccagctccagctgcaagagtctggacctggcctggtcaagcctagcgagacactgagcctgacctgtaccgtgtccggcgatagcatcagcagcggcgattactactggggctggatcagacagcctcctggcaaaggactggaatggatcggccacatctactacagcggcgtgacctactacaaccccagcctgaagtccagagtgaccatcagcgtggacaccagccggaaccagttctccctgaagctgtctagcgtgacagccgccgataccgccgtgtactactgcaccagagaggacagcagcaactggcggagtagaggccagggaacactggtcacagttagctctggatccggcggaggcggaagtggaggcggaggatctggcggcggaggctctttcgaacaggtgcagctggtgcagtctggcggccagatgaagaaacccggcgagagcatgagaatcagctgtcgggcctccggctacgagttcatcgactgcaccctgaactggatcagactggcccctggcaagcggcctgagtggatgggatggctgaagcctagaggcggagccgtgaactacgccagacctctccagggcagagtgaccatgaccagggacgtgtacagcgataccgccttcctggaactgcggagcctgaccgtggatgataccgccgtgtacttctgcaccagaggcaagaactgcgattacaactgggacttcgagcactggggcagaggcacccctgtgatcgtgtctagcacgcgtatccagaaccctgatcctgccgtgtaccagctgcgggatagcaagagcagcgacaagagcgtgtgtctgttcaccgacttcgacagccagaccaacgtgtcccagagcaaggactccgacgtgtacatcaccgataagtgcgtgctggacatgcggagcatggacttcaagagcaactccgccgtggcctggtccaacaagtccgatttcgcctgcgccaacgccttcaacaacagcattatccccgaggacacattcttcccaagccccgagagcagctgcgacgtgaagctggtggaaaagagcttcgagacagacaccaacctgaacttccagatcctgtacgagatcctgctgggcaaggccaccctgtacgccgtgctggtgtctgccctggtgctgatggctatggtcaagcggaaggacagccgggga

SEQ ID NO: 5696 - DNA, 2700 bp, synthetic construct
  source 1..2700: mol_type = other DNA
atggccttaccagtgaccgccttgctcctgccgctggccttgctgctccacgccgccaggccggaagtgcagctggttgaatctggcggaggactggttcagcctggcggatctctgagactgtcttgtgccgccagcggcttcagcttcagcgacttttggatgagctgggtccgacaggcccctggcaaaggacttgaatgggtcgccacaatcagccaggccggcagcgagaaggactacgtggactctgtgaagggcagattcaccatcagccgggacaacgccaagaagtccctgtacctccagatgaacagcctgagagccgaggacaccgccgtgtactattgtgcctctggcgtgtacagcttcgactacagaggccagggcaccctggtcacagtctcttctggtaccggcggaggcggatctggcggcggaggtagcggtggcggaggatctgaattcgagctggtgctgacacagagccctggcaccctgtctctgtctgccggcgaaagagccaccctgagctgtagagccagccagagcgtgtcctctggcagcctggcttggtatcagcagaagccaggccaggcccccagactgctgatctacggcgcttctaccagagccaccggcatccccgatagattcagcggctctggctccggcaccgacttcaccctgacaatcggcagactggaacccgaggacctggccgtgtactactgccagcagtacggcaccagcccctacacattcggccagggcaccaagctggaaatcctcgaggacctgaagaacgtgttcccacctgaggtggccgtgttcgagcctagcgaggccgagatcagccacacccagaaagccaccctcgtgtgcctggctaccggcttctaccccgaccatgtggaactgtcttggtgggtcaacggcaaagaggtgcacagcggcgtgtgtaccgacccccagccactgaaagaacagcccgccctgaacgacagccggtactgcctgagcagcagactgagagtgtccgccaccttctggcagaacccccggaaccacttcagatgccaggtgcagttctacggcctgagcgagaacgacgagtggacccaggacagagccaagcccgtgacccagatcgtgtctgccgaagcctggggcagagccgattgcggctttaccagcgagagctaccagcagggcgtgctgagcgccaccaacctgagcgtgatcggcttcagaatcctgctgctgaaagtggccggctttaacctgctgatgaccctgcggctgtggtccagcagggccaagcgatctggatctggagcaacaaacttctcactactcaaacaagcaggtgacgtggaggagaatcccgggcctactagtatggactggatttggcgcatccttttccttgtcggcgctgctaccggcgcgcattccgggccccagctccagctgcaagagtctggacctggcctggtcaagcctagcgagacactgagcctgacctgtaccgtgtccggcgatagcatcagcagcggcgattactactggggctggatcagacagcctcctggcaaaggactggaatggatcggccacatctactacagcggcgtgacctactacaaccccagcctgaagtccagagtgaccatcagcgtggacaccagccggaaccagttctccctgaagctgtctagcgtgacagccgccgataccgccgtgtactactgcaccagagaggacagcagcaactggcggagtagaggccagggaacactggtcacagttagctctggatccggcggaggcggaagtggaggcggaggatctggcggcggaggctctttcgaactggaacagagcggagccgaagtgaagaaacccggcagcagcgtgcaggtgtcctgcaaagcaagcggcggcaccttctctatgtacggcttcaactgggtgcgccaggctcctggacacggcctggaatggatgggcggcatcatccccatcttcggcacctccaactacgcccagaaattccggggcagagtgaccttcaccgccgaccaggccacaagcaccgcctacatggaactgaccaacctgcggagcgacgacaccgccgtgtattattgcgccagagacttcggccccgactgggaggatggcgacagctacgatggcagcggcagaggcttcttcgacttctggggccagggaacccttgtgaccgtgtcctcaacgcgtatccagaaccctgatcctgccgtgtaccagctgcgggatagcaagagcagcgacaagagcgtgtgtctgttcaccgacttcgacagccagaccaacgtgtcccagagcaaggactccgacgtgtacatcaccgataagtgcgtgctggacatgcggagcatggacttcaagagcaactccgccgtggcctggtccaacaagtccgatttcgcctgcgccaacgccttcaacaacagcattatccccgaggacacattcttcccaagccccgagagcagctgcgacgtgaagctggtggaaaagagcttcgagacagacaccaacctgaacttccagatcctgtacgagatcctgctgggcaaggccaccctgtacgccgtgctggtgtctgccctggtgctgatggctatggtcaagcggaaggacagccgggga

SEQ ID NO: 5697 - DNA, 2640 bp, synthetic construct
  source 1..2640: mol_type = other DNA
atggccttaccagtgaccgccttgctcctgccgctggccttgctgctccacgccgccaggccggaagtgcagctggttgaatctggcggaggactggttcagcctggcggatctctgagactgtcttgtgccgccagcggcttcagcttcagcgacttttggatgagctgggtccgacaggcccctggcaaaggacttgaatgggtcgccacaatcagccaggccggcagcgagaaggactacgtggactctgtgaagggcagattcaccatcagccgggacaacgccaagaagtccctgtacctccagatgaacagcctgagagccgaggacaccgccgtgtactattgtgcctctggcgtgtacagcttcgactacagaggccagggcaccctggtcacagtctcttctggtaccggcggaggcggatctggcggcggaggtagcggtggcggaggatctgaattcgacatccagatgacccagagccccagcagcctgtctgccagcgtgggcgacagagtgaccatcacctgtcaggccagccaggacatcaacaactacctgaactggtatcagcagaagcccggcaaggcccccaagctgctgatctacgacgccagcaatctgcagaccggcgtgcccagcagattttccggctctggcagcggcaccgacttcaccttcaccatcgaggacattgccacctactactgccagcagtacaccttcggccctggcaccaaggtggacatcaaactcgaggacctgaagaacgtgttcccacctgaggtggccgtgttcgagcctagcgaggccgagatcagccacacccagaaagccaccctcgtgtgcctggctaccggcttctaccccgaccatgtggaactgtcttggtgggtcaacggcaaagaggtgcacagcggcgtgtgtaccgacccccagccactgaaagaacagcccgccctgaacgacagccggtactgcctgagcagcagactgagagtgtccgccaccttctggcagaacccccggaaccacttcagatgccaggtgcagttctacggcctgagcgagaacgacgagtggacccaggacagagccaagcccgtgacccagatcgtgtctgccgaagcctggggcagagccgattgcggctttaccagcgagagctaccagcagggcgtgctgagcgccaccaacctgagcgtgatcggcttcagaatcctgctgctgaaagtggccggctttaacctgctgatgaccctgcggctgtggtccagcagggccaagcgatctggatctggagcaacaaacttctcactactcaaacaagcaggtgacgtggaggagaatcccgggcctactagtatggactggatttggcgcatccttttccttgtcggcgctgctaccggcgcgcattccgggccccagctccagctgcaagagtctggacctggcctggtcaagcctagcgagacactgagcctgacctgtaccgtgtccggcgatagcatcagcagcggcgattactactggggctggatcagacagcctcctggcaaaggactggaatggatcggccacatctactacagcggcgtgacctactacaaccccagcctgaagtccagagtgaccatcagcgtggacaccagccggaaccagttctccctgaagctgtctagcgtgacagccgccgataccgccgtgtactactgcaccagagaggacagcagcaactggcggagtagaggccagggaacactggtcacagttagctctggatccggcggaggcggaagtggaggcggaggatctggcggcggaggctctttcgaagaagtgcaactgctggaatctggcggcggactggtgcagcctggcggatctctgagactgagctgtgccgccagcggcttcacctttagctggtacagcatgacctgggtgcgccaggcccctggcaaaggactggaatgggtgtccagcatcgtgccctggggcgatttcacccagtacgccgatagcgtgaagggccggttcaccatcagccgggacaacagcaagaacaccctgtacctgcagatgaacagcctgcgggccgaggacaccgccgtgtactattgtgccaagggacctggctggggcagcttcgatctgtggggcagaggaacccttgtgaccgtgtccagcacgcgtatccagaaccctgatcctgccgtgtaccagctgcgggatagcaagagcagcgacaagagcgtgtgtctgttcaccgacttcgacagccagaccaacgtgtcccagagcaaggactccgacgtgtacatcaccgataagtgcgtgctggacatgcggagcatggacttcaagagcaactccgccgtggcctggtccaacaagtccgatttcgcctgcgccaacgccttcaacaacagcattatccccgaggacacattcttcccaagccccgagagcagctgcgacgtgaagctggtggaaaagagcttcgagacagacaccaacctgaacttccagatcctgtacgagatcctgctgggcaaggccaccctgtacgccgtgctggtgtctgccctggtgctgatggctatggtcaagcggaaggacagccgggga

SEQ ID NO: 5698 - DNA, 2670 bp, synthetic construct
  source 1..2670: mol_type = other DNA
atggccttaccagtgaccgccttgctcctgccgctggccttgctgctccacgccgccaggccggaagtgcagctggttgaatctggcggaggactggttcagcctggcggatctctgagactgtcttgtgccgccagcggcttcagcttcagcgacttttggatgagctgggtccgacaggcccctggcaaaggacttgaatgggtcgccacaatcagccaggccggcagcgagaaggactacgtggactctgtgaagggcagattcaccatcagccgggacaacgccaagaagtccctgtacctccagatgaacagcctgagagccgaggacaccgccgtgtactattgtgcctctggcgtgtacagcttcgactacagaggccagggcaccctggtcacagtctcttctggtaccggcggaggcggatctggcggcggaggtagcggtggcggaggatctgaattcgacatccagatgacccagagccccagcagcctgtctgccagcgtgggcgacagagtgaccatcacctgtaccgccagcctgagcgtgtccagcacctacctgcactggtatcagcagaagcccggcagcagccccaagctgtggatctacagcaccagcaacctggcctccggcgtgcccagcagattttctggcagcggctctggcaccagctacaccctgaccatcagctccctccagcccgaggacttcgccacctactactgccaccagtaccacagaagccccctgacctttggcggaggcaccaaggtggaaatcaagagactcgaggacctgaagaacgtgttcccacctgaggtggccgtgttcgagcctagcgaggccgagatcagccacacccagaaagccaccctcgtgtgcctggctaccggcttctaccccgaccatgtggaactgtcttggtgggtcaacggcaaagaggtgcacagcggcgtgtgtaccgacccccagccactgaaagaacagcccgccctgaacgacagccggtactgcctgagcagcagactgagagtgtccgccaccttctggcagaacccccggaaccacttcagatgccaggtgcagttctacggcctgagcgagaacgacgagtggacccaggacagagccaagcccgtgacccagatcgtgtctgccgaagcctggggcagagccgattgcggctttaccagcgagagctaccagcagggcgtgctgagcgccaccaacctgagcgtgatcggcttcagaatcctgctgctgaaagtggccggctttaacctgctgatgaccctgcggctgtggtccagcagggccaagcgatctggatctggagcaacaaacttctcactactcaaacaagcaggtgacgtggaggagaatcccgggcctactagtatggactggatttggcgcatccttttccttgtcggcgctgctaccggcgcgcattccgggccccagctccagctgcaagagtctggacctggcctggtcaagcctagcgagacactgagcctgacctgtaccgtgtccggcgatagcatcagcagcggcgattactactggggctggatcagacagcctcctggcaaaggactggaatggatcggccacatctactacagcggcgtgacctactacaaccccagcctgaagtccagagtgaccatcagcgtggacaccagccggaaccagttctccctgaagctgtctagcgtgacagccgccgataccgccgtgtactactgcaccagagaggacagcagcaactggcggagtagaggccagggaacactggtcacagttagctctggatccggcggaggcggaagtggaggcggaggatctggcggcggaggctctttcgaagaagtgcaactggtggaatctggcggcggactggtgcagcctggcggatctctgagactgagctgtgccgccagcggcttcagcctgaccaaatacggcgtgcactgggtgcgccaggcccctggaaaaggactggaatgggtgggagtgaagtgggctggcggctccaccgactacaacagcgccctgatgagccggttcaccatcagcaaggacaacgccaagaacagcctgtacctccagatgaactccctgcgggccgaggacaccgccgtgtactactgtgccagagatcaccgggacgctatggactactggggccagggaacactcgtgaccgtgtcctctacgcgtatccagaaccctgatcctgccgtgtaccagctgcgggatagcaagagcagcgacaagagcgtgtgtctgttcaccgacttcgacagccagaccaacgtgtcccagagcaaggactccgacgtgtacatcaccgataagtgcgtgctggacatgcggagcatggacttcaagagcaactccgccgtggcctggtccaacaagtccgatttcgcctgcgccaacgccttcaacaacagcattatccccgaggacacattcttcccaagccccgagagcagctgcgacgtgaagctggtggaaaagagcttcgagacagacaccaacctgaacttccagatcctgtacgagatcctgctgggcaaggccaccctgtacgccgtgctggtgtctgccctggtgctgatggctatggtcaagcggaaggacagccgggga

SEQ ID NO: 5699 - DNA, 2682 bp, synthetic construct
  source 1..2682: mol_type = other DNA
atggccttaccagtgaccgccttgctcctgccgctggccttgctgctccacgccgccaggccggaagtgcagctggttgaatctggcggaggactggttcagcctggcggatctctgagactgtcttgtgccgccagcggcttcagcttcagcgacttttggatgagctgggtccgacaggcccctggcaaaggacttgaatgggtcgccacaatcagccaggccggcagcgagaaggactacgtggactctgtgaagggcagattcaccatcagccgggacaacgccaagaagtccctgtacctccagatgaacagcctgagagccgaggacaccgccgtgtactattgtgcctctggcgtgtacagcttcgactacagaggccagggcaccctggtcacagtctcttctggtaccggcggaggcggatctggcggcggaggtagcggtggcggaggatctgaattcgacatccagatgacccagagccccagcagcctgtctgccagcgtgggcgacagagtgaccatcacatgcaaggccagccaggacgtgggaacagccgtggcctggtatcagcagaagcctggcaaggcccccaagctgctgatctacagcgccagctacagatccaccggcgtgcccagcagattttccggctctggcagcggcaccgacttcaccctgaccatctctagcctccagcccgaggacttcgccacctactactgccagcaccactactccgccccctggacatttggcggaggcaccaaggtggaaatcaagctcgaggacctgaagaacgtgttcccacctgaggtggccgtgttcgagcctagcgaggccgagatcagccacacccagaaagccaccctcgtgtgcctggctaccggcttctaccccgaccatgtggaactgtcttggtgggtcaacggcaaagaggtgcacagcggcgtgtgtaccgacccccagccactgaaagaacagcccgccctgaacgacagccggtactgcctgagcagcagactgagagtgtccgccaccttctggcagaacccccggaaccacttcagatgccaggtgcagttctacggcctgagcgagaacgacgagtggacccaggacagagccaagcccgtgacccagatcgtgtctgccgaagcctggggcagagccgattgcggctttaccagcgagagctaccagcagggcgtgctgagcgccaccaacctgagcgtgatcggcttcagaatcctgctgctgaaagtggccggctttaacctgctgatgaccctgcggctgtggtccagcagggccaagcgatctggatctggagcaacaaacttctcactactcaaacaagcaggtgacgtggaggagaatcccgggcctactagtatggactggatttggcgcatccttttccttgtcggcgctgctaccggcgcgcattccgggccccagctccagctgcaagagtctggacctggcctggtcaagcctagcgagacactgagcctgacctgtaccgtgtccggcgatagcatcagcagcggcgattactactggggctggatcagacagcctcctggcaaaggactggaatggatcggccacatctactacagcggcgtgacctactacaaccccagcctgaagtccagagtgaccatcagcgtggacaccagccggaaccagttctccctgaagctgtctagcgtgacagccgccgataccgccgtgtactactgcaccagagaggacagcagcaactggcggagtagaggccagggaacactggtcacagttagctctggatccggcggaggcggaagtggaggcggaggatctggcggcggaggctctttcgaagaagtgcaactggtggaatcaggcggcggactggtgcagcctggcggatctctgagactgagctgtgccgccagcggcttcaccttcagcagaaacggcatgagctgggtgcgccaggcccctggaaaaggactggaatgggtggcaaccgtgtccagcggcggcagctacatctactacgccgacagcgtgaagggccggttcaccatctccagagacaacgccaagaacagcctgtacctccagatgaactccctgcgggccgaggacaccgccgtgtactattgtgccagacagggcaccaccgccctggctaccagattcttcgatgtgtggggccagggcaccctcgtgaccgtgtcatctacgcgtatccagaaccctgatcctgccgtgtaccagctgcgggatagcaagagcagcgacaagagcgtgtgtctgttcaccgacttcgacagccagaccaacgtgtcccagagcaaggactccgacgtgtacatcaccgataagtgcgtgctggacatgcggagcatggacttcaagagcaactccgccgtggcctggtccaacaagtccgatttcgcctgcgccaacgccttcaacaacagcattatccccgaggacacattcttcccaagccccgagagcagctgcgacgtgaagctggtggaaaagagcttcgagacagacaccaacctgaacttccagatcctgtacgagatcctgctgggcaaggccaccctgtacgccgtgctggtgtctgccctggtgctgatggctatggtcaagcggaaggacagccgggga

SEQ ID NO: 5700 - DNA, 2670 bp, synthetic construct
  source 1..2670: mol_type = other DNA
atggccttaccagtgaccgccttgctcctgccgctggccttgctgctccacgccgccaggccggaagtgcagctggttgaatctggcggaggactggttcagcctggcggatctctgagactgtcttgtgccgccagcggcttcagcttcagcgacttttggatgagctgggtccgacaggcccctggcaaaggacttgaatgggtcgccacaatcagccaggccggcagcgagaaggactacgtggactctgtgaagggcagattcaccatcagccgggacaacgccaagaagtccctgtacctccagatgaacagcctgagagccgaggacaccgccgtgtactattgtgcctctggcgtgtacagcttcgactacagaggccagggcaccctggtcacagtctcttctggtaccggcggaggcggatctggcggcggaggtagcggtggcggaggatctgaattcgacatccagatgacccagagcccccctagcctgtctgcctctgtgggcggcaaagtgaccatcacatgcaaggccagccaggacatcgaccgctacatggcctggtatcaggacaagcccggcaagggacccaagctgctgatccacgataccagcaccctccagcccggcatccccagcagattttctggcagcggctccggcagagactacagcttcagcatcagcaacctggaacccgaggacattgccacctactactgcctccagtacgacaacctgtggaccttcggcggaggcaccaagctggaaatcaagagactcgaggacctgaagaacgtgttcccacctgaggtggccgtgttcgagcctagcgaggccgagatcagccacacccagaaagccaccctcgtgtgcctggctaccggcttctaccccgaccatgtggaactgtcttggtgggtcaacggcaaagaggtgcacagcggcgtgtgtaccgacccccagccactgaaagaacagcccgccctgaacgacagccggtactgcctgagcagcagactgagagtgtccgccaccttctggcagaacccccggaaccacttcagatgccaggtgcagttctacggcctgagcgagaacgacgagtggacccaggacagagccaagcccgtgacccagatcgtgtctgccgaagcctggggcagagccgattgcggctttaccagcgagagctaccagcagggcgtgctgagcgccaccaacctgagcgtgatcggcttcagaatcctgctgctgaaagtggccggctttaacctgctgatgaccctgcggctgtggtccagcagggccaagcgatctggatctggagcaacaaacttctcactactcaaacaagcaggtgacgtggaggagaatcccgggcctactagtatggactggatttggcgcatccttttccttgtcggcgctgctaccggcgcgcattccgggccccagctccagctgcaagagtctggacctggcctggtcaagcctagcgagacactgagcctgacctgtaccgtgtccggcgatagcatcagcagcggcgattactactggggctggatcagacagcctcctggcaaaggactggaatggatcggccacatctactacagcggcgtgacctactacaaccccagcctgaagtccagagtgaccatcagcgtggacaccagccggaaccagttctccctgaagctgtctagcgtgacagccgccgataccgccgtgtactactgcaccagagaggacagcagcaactggcggagtagaggccagggaacactggtcacagttagctctggatccggcggaggcggaagtggaggcggaggatctggcggcggaggctctttcgaacaggtgcaactggtgcagagcggagccgagcttgtgaagcctggcgcttccgtgaagatgagctgcaaagccagcggctacatcttcaccaactacaacatccactgggtcaagaagtccccaggccagggcctggaatggatcggagccatctaccccggaaacggcgacgccccttacagccagaagttccaggacagagccaccctgaccgccgacaccagcagcagcaccacctacatggaactgagcagcctgaccagcgaggacagcgccgtgtactattgcgtgcgggccaactgggatgtggccttcgcctattggggccagggcacactggtgtccgtgtcctctacgcgtatccagaaccctgatcctgccgtgtaccagctgcgggatagcaagagcagcgacaagagcgtgtgtctgttcaccgacttcgacagccagaccaacgtgtcccagagcaaggactccgacgtgtacatcaccgataagtgcgtgctggacatgcggagcatggacttcaagagcaactccgccgtggcctggtccaacaagtccgatttcgcctgcgccaacgccttcaacaacagcattatccccgaggacacattcttcccaagccccgagagcagctgcgacgtgaagctggtggaaaagagcttcgagacagacaccaacctgaacttccagatcctgtacgagatcctgctgggcaaggccaccctgtacgccgtgctggtgtctgccctggtgctgatggctatggtcaagcggaaggacagccgggga

SEQ ID NO: 5701 - DNA, 2673 bp, synthetic construct
  source 1..2673: mol_type = other DNA
atggccttaccagtgaccgccttgctcctgccgctggccttgctgctccacgccgccaggccggaagtgcagctggttgaatctggcggaggactggttcagcctggcggatctctgagactgtcttgtgccgccagcggcttcagcttcagcgacttttggatgagctgggtccgacaggcccctggcaaaggacttgaatgggtcgccacaatcagccaggccggcagcgagaaggactacgtggactctgtgaagggcagattcaccatcagccgggacaacgccaagaagtccctgtacctccagatgaacagcctgagagccgaggacaccgccgtgtactattgtgcctctggcgtgtacagcttcgactacagaggccagggcaccctggtcacagtctcttctggtaccggcggaggcggatctggcggcggaggtagcggtggcggaggatctgaattcgacatccagatgacccagagccctgccagcctgtctgcctctgtgggcgagacagtgaccatcacctgtcgggtgtccggcaacatccacaactacctggcctggtatcagcagaagcagggcaagagcccccaactgctggtgtacaacgccaagaccctggccgatggcgtgcccagcagattttctggctctggcagcggcacccagtacagcctgaagatcaacagcctccagcccgaggacttcggcagctactactgccagcacttctggtccaacccctacaccttcggcggaggcaccaagctggaaatcaagctcgaggacctgaagaacgtgttcccacctgaggtggccgtgttcgagcctagcgaggccgagatcagccacacccagaaagccaccctcgtgtgcctggctaccggcttctaccccgaccatgtggaactgtcttggtgggtcaacggcaaagaggtgcacagcggcgtgtgtaccgacccccagccactgaaagaacagcccgccctgaacgacagccggtactgcctgagcagcagactgagagtgtccgccaccttctggcagaacccccggaaccacttcagatgccaggtgcagttctacggcctgagcgagaacgacgagtggacccaggacagagccaagcccgtgacccagatcgtgtctgccgaagcctggggcagagccgattgcggctttaccagcgagagctaccagcagggcgtgctgagcgccaccaacctgagcgtgatcggcttcagaatcctgctgctgaaagtggccggctttaacctgctgatgaccctgcggctgtggtccagcagggccaagcgatctggatctggagcaacaaacttctcactactcaaacaagcaggtgacgtggaggagaatcccgggcctactagtatggactggatttggcgcatccttttccttgtcggcgctgctaccggcgcgcattccgggccccagctccagctgcaagagtctggacctggcctggtcaagcctagcgagacactgagcctgacctgtaccgtgtccggcgatagcatcagcagcggcgattactactggggctggatcagacagcctcctggcaaaggactggaatggatcggccacatctactacagcggcgtgacctactacaaccccagcctgaagtccagagtgaccatcagcgtggacaccagccggaaccagttctccctgaagctgtctagcgtgacagccgccgataccgccgtgtactactgcaccagagaggacagcagcaactggcggagtagaggccagggaacactggtcacagttagctctggatccggcggaggcggaagtggaggcggaggatctggcggcggaggctctttcgaacaggtgcaactccagcagtctggcgcttccgtgaaggtgtcctgcaaggccagcgaactcgtgcggcctggcacaggctacgccttcaccaattacctgatcgagtgggtcaagcagaggcccggacagggcctggaatggatcggagtgattaacccaggcagcggcggcaccaactacaacgagaagttcaagggcaaggccaccctgaccgccgacaagagcagcagcacagcctacatgcaactgagcagcctgaccagcgacgacagcgccgtgtacttctgcgcccggtacagaagctacgactggtacttcgacgtgtggggagccggcaccaccgtgacagtgtcatctacgcgtatccagaaccctgatcctgccgtgtaccagctgcgggatagcaagagcagcgacaagagcgtgtgtctgttcaccgacttcgacagccagaccaacgtgtcccagagcaaggactccgacgtgtacatcaccgataagtgcgtgctggacatgcggagcatggacttcaagagcaactccgccgtggcctggtccaacaagtccgatttcgcctgcgccaacgccttcaacaacagcattatccccgaggacacattcttcccaagccccgagagcagctgcgacgtgaagctggtggaaaagagcttcgagacagacaccaacctgaacttccagatcctgtacgagatcctgctgggcaaggccaccctgtacgccgtgctggtgtctgccctggtgctgatggctatggtcaagcggaaggacagccgggga

SEQ ID NO: 5702 - DNA, 2670 bp, synthetic construct
  source 1..2670: mol_type = other DNA
atggccttaccagtgaccgccttgctcctgccgctggccttgctgctccacgccgccaggccggaagtgcagctggttgaatctggcggaggactggttcagcctggcggatctctgagactgtcttgtgccgccagcggcttcagcttcagcgacttttggatgagctgggtccgacaggcccctggcaaaggacttgaatgggtcgccacaatcagccaggccggcagcgagaaggactacgtggactctgtgaagggcagattcaccatcagccgggacaacgccaagaagtccctgtacctccagatgaacagcctgagagccgaggacaccgccgtgtactattgtgcctctggcgtgtacagcttcgactacagaggccagggcaccctggtcacagtctcttctggtaccggcggaggcggatctggcggcggaggtagcggtggcggaggatctgaattcgacatccagatgacccagagcttcagcagcctgagcgccagcgtgggcgacagagtgaccatcacctgtagagccagccaggacatcagcaactacctgaactggtatcagcagaagcccggcaaggcccccaagctgctgatctactacaccagcagactgcacagcggcgtgcccagcagattttctggcagcggctccggcaccgactacaccctgacaatcagctccctgcagcccgaggacttcgctacctacttctgtcagcaaggcaacaccctgccctggacctttggcggaggcaccaagctggaaatcaagagactcgaggacctgaagaacgtgttcccacctgaggtggccgtgttcgagcctagcgaggccgagatcagccacacccagaaagccaccctcgtgtgcctggctaccggcttctaccccgaccatgtggaactgtcttggtgggtcaacggcaaagaggtgcacagcggcgtgtgtaccgacccccagccactgaaagaacagcccgccctgaacgacagccggtactgcctgagcagcagactgagagtgtccgccaccttctggcagaacccccggaaccacttcagatgccaggtgcagttctacggcctgagcgagaacgacgagtggacccaggacagagccaagcccgtgacccagatcgtgtctgccgaagcctggggcagagccgattgcggctttaccagcgagagctaccagcagggcgtgctgagcgccaccaacctgagcgtgatcggcttcagaatcctgctgctgaaagtggccggctttaacctgctgatgaccctgcggctgtggtccagcagggccaagcgatctggatctggagcaacaaacttctcactactcaaacaagcaggtgacgtggaggagaatcccgggcctactagtatggactggatttggcgcatccttttccttgtcggcgctgctaccggcgcgcattccgggccccagctccagctgcaagagtctggacctggcctggtcaagcctagcgagacactgagcctgacctgtaccgtgtccggcgatagcatcagcagcggcgattactactggggctggatcagacagcctcctggcaaaggactggaatggatcggccacatctactacagcggcgtgacctactacaaccccagcctgaagtccagagtgaccatcagcgtggacaccagccggaaccagttctccctgaagctgtctagcgtgacagccgccgataccgccgtgtactactgcaccagagaggacagcagcaactggcggagtagaggccagggaacactggtcacagttagctctggatccggcggaggcggaagtggaggcggaggatctggcggcggaggctctttcgaagaagtgcaactggtgcagtccggcggagggctggtgcagagcggaggatctctgagactgagctgcagagccagcggctacaccttcacccggtactggatgctgtgggtgcgccagaggccaggcaagggactggaatgggtggccgagatcaacccccggaacgaccggaccaactacaacgagaagttcaagacccggttcaccatcagcgtggacagaagcaagaacaccctgtacctgcagatggacagcctgcgggccgaggataccgccgtgtacttttgtgctctgggaggcggctacgctatggactactggggccagggaacccttgtgaccgtgtcctctacgcgtatccagaaccctgatcctgccgtgtaccagctgcgggatagcaagagcagcgacaagagcgtgtgtctgttcaccgacttcgacagccagaccaacgtgtcccagagcaaggactccgacgtgtacatcaccgataagtgcgtgctggacatgcggagcatggacttcaagagcaactccgccgtggcctggtccaacaagtccgatttcgcctgcgccaacgccttcaacaacagcattatccccgaggacacattcttcccaagccccgagagcagctgcgacgtgaagctggtggaaaagagcttcgagacagacaccaacctgaacttccagatcctgtacgagatcctgctgggcaaggccaccctgtacgccgtgctggtgtctgccctggtgctgatggctatggtcaagcggaaggacagccgggga

SEQ ID NO: 5703 - DNA, 2673 bp, synthetic construct
  source 1..2673: mol_type = other DNA
atggccttaccagtgaccgccttgctcctgccgctggccttgctgctccacgccgccaggccggaagtgcagctggttgaatctggcggaggactggttcagcctggcggatctctgagactgtcttgtgccgccagcggcttcagcttcagcgacttttggatgagctgggtccgacaggcccctggcaaaggacttgaatgggtcgccacaatcagccaggccggcagcgagaaggactacgtggactctgtgaagggcagattcaccatcagccgggacaacgccaagaagtccctgtacctccagatgaacagcctgagagccgaggacaccgccgtgtactattgtgcctctggcgtgtacagcttcgactacagaggccagggcaccctggtcacagtctcttctggtaccggcggaggcggatctggcggcggaggtagcggtggcggaggatctgaattcgacatccagatgacacagtctccggcgtcactgtccgcctccgtgggggagactgtgactattatttgtagggcatcagttaacatctactcttatttggcctggtaccagcagaagcaaggcaagagtcctcagctgctggtgtataatgcgaagatcctggcagagggcgtgccgagccggttctccggcagcggctcaggtacccaattttccctcaagatcaattcactgcagccagaggactttggcagttactattgtcaacaccactacggcacattcactttcgggtccggtacaaaattggagattaagcgactcgaggacctgaagaacgtgttcccacctgaggtggccgtgttcgagcctagcgaggccgagatcagccacacccagaaagccaccctcgtgtgcctggctaccggcttctaccccgaccatgtggaactgtcttggtgggtcaacggcaaagaggtgcacagcggcgtgtgtaccgacccccagccactgaaagaacagcccgccctgaacgacagccggtactgcctgagcagcagactgagagtgtccgccaccttctggcagaacccccggaaccacttcagatgccaggtgcagttctacggcctgagcgagaacgacgagtggacccaggacagagccaagcccgtgacccagatcgtgtctgccgaagcctggggcagagccgattgcggctttaccagcgagagctaccagcagggcgtgctgagcgccaccaacctgagcgtgatcggcttcagaatcctgctgctgaaagtggccggctttaacctgctgatgaccctgcggctgtggtccagcagggccaagcgatctggatctggagcaacaaacttctcactactcaaacaagcaggtgacgtggaggagaatcccgggcctactagtatggactggatttggcgcatccttttccttgtcggcgctgctaccggcgcgcattccgggccccagctccagctgcaagagtctggacctggcctggtcaagcctagcgagacactgagcctgacctgtaccgtgtccggcgatagcatcagcagcggcgattactactggggctggatcagacagcctcctggcaaaggactggaatggatcggccacatctactacagcggcgtgacctactacaaccccagcctgaagtccagagtgaccatcagcgtggacaccagccggaaccagttctccctgaagctgtctagcgtgacagccgccgataccgccgtgtactactgcaccagagaggacagcagcaactggcggagtagaggccagggaacactggtcacagttagctctggatccggcggaggcggaagtggaggcggaggatctggcggcggaggctctttcgaacaggtacagttgaaagaaagcgggcctggactggtagcgccttcccaatctctctccatcacgtgcaccatctctggcttctccctgacttcctatggagttcactgggtgaggcagccccccggcaagggactggaatggctggtcgtcatctggtccgacgggtccacaacctacaactccgctctgaaaagtcggctctctatttctaaagataatagcaagagccaggtgtttctgaaaatgaactctctgcagaccgatgatacggccatttactactgcgcttcacactatggctcaaccttggcattcgcttcctggggccacggaacactggtgaccgtttccgcagccacgcgtatccagaaccctgatcctgccgtgtaccagctgcgggatagcaagagcagcgacaagagcgtgtgtctgttcaccgacttcgacagccagaccaacgtgtcccagagcaaggactccgacgtgtacatcaccgataagtgcgtgctggacatgcggagcatggacttcaagagcaactccgccgtggcctggtccaacaagtccgatttcgcctgcgccaacgccttcaacaacagcattatccccgaggacacattcttcccaagccccgagagcagctgcgacgtgaagctggtggaaaagagcttcgagacagacaccaacctgaacttccagatcctgtacgagatcctgctgggcaaggccaccctgtacgccgtgctggtgtctgccctggtgctgatggctatggtcaagcggaaggacagccgggga

SEQ ID NO: 5704 - DNA, 2697 bp, synthetic construct
  source 1..2697: mol_type = other DNA
atggccttaccagtgaccgccttgctcctgccgctggccttgctgctccacgccgccaggccggaagtgcagctggttgaatctggcggaggactggttcagcctggcggatctctgagactgtcttgtgccgccagcggcttcagcttcagcgacttttggatgagctgggtccgacaggcccctggcaaaggacttgaatgggtcgccacaatcagccaggccggcagcgagaaggactacgtggactctgtgaagggcagattcaccatcagccgggacaacgccaagaagtccctgtacctccagatgaacagcctgagagccgaggacaccgccgtgtactattgtgcctctggcgtgtacagcttcgactacagaggccagggcaccctggtcacagtctcttctggtaccggcggaggcggatctggcggcggaggtagcggtggcggaggatctgaattcgacattgtgatgacccagtctcacaaattcatgtccacatcagtaggagacagggtcagcgtcacctgcaaggccagtcagaatgtgggtaataatgtagcctggtatcaacagaaaccagggcaatctcctaaagtactgatttactcggcatcctaccggtacagtggagtccctgatcgcttcacaggcagtggatctgggacagatttcactctcaccatcagtaatgtgcagtctgaagacttggcagagtatttctgtcagcaatataacacctatccattcacgttcggctcggggacaaagttggaaataaaactcgaggacctgaagaacgtgttcccacctgaggtggccgtgttcgagcctagcgaggccgagatcagccacacccagaaagccaccctcgtgtgcctggctaccggcttctaccccgaccatgtggaactgtcttggtgggtcaacggcaaagaggtgcacagcggcgtgtgtaccgacccccagccactgaaagaacagcccgccctgaacgacagccggtactgcctgagcagcagactgagagtgtccgccaccttctggcagaacccccggaaccacttcagatgccaggtgcagttctacggcctgagcgagaacgacgagtggacccaggacagagccaagcccgtgacccagatcgtgtctgccgaagcctggggcagagccgattgcggctttaccagcgagagctaccagcagggcgtgctgagcgccaccaacctgagcgtgatcggcttcagaatcctgctgctgaaagtggccggctttaacctgctgatgaccctgcggctgtggtccagcagggccaagcgatctggatctggagcaacaaacttctcactactcaaacaagcaggtgacgtggaggagaatcccgggcctactagtatggactggatttggcgcatccttttccttgtcggcgctgctaccggcgcgcattccgggccccagctccagctgcaagagtctggacctggcctggtcaagcctagcgagacactgagcctgacctgtaccgtgtccggcgatagcatcagcagcggcgattactactggggctggatcagacagcctcctggcaaaggactggaatggatcggccacatctactacagcggcgtgacctactacaaccccagcctgaagtccagagtgaccatcagcgtggacaccagccggaaccagttctccctgaagctgtctagcgtgacagccgccgataccgccgtgtactactgcaccagagaggacagcagcaactggcggagtagaggccagggaacactggtcacagttagctctggatccggcggaggcggaagtggaggcggaggatctggcggcggaggctctttcgaagaggtacagctggaggaaagcggtggaggactggtgcaacctggagggtctatgaagctctcttgcgtagcttctgggttcacgttctccaattactggatgaactgggtgcggcagtcccccgagaaaggcctggaatgggtagcagaaattcggttcaagtcccataactatgctacacactttgccgagtctgtcaaaggccggttcactattagtcgagacgacagcaagtcttcagtctacctgcagatgaataacttgcgggcagaggacacaggtatctactactgcaccaggagaatcggcaactccgactatgactggtggtactttgacgtctggggagcaggcaccagcgtgacggtgagttcagcctcaacgcgtatccagaaccctgatcctgccgtgtaccagctgcgggatagcaagagcagcgacaagagcgtgtgtctgttcaccgacttcgacagccagaccaacgtgtcccagagcaaggactccgacgtgtacatcaccgataagtgcgtgctggacatgcggagcatggacttcaagagcaactccgccgtggcctggtccaacaagtccgatttcgcctgcgccaacgccttcaacaacagcattatccccgaggacacattcttcccaagccccgagagcagctgcgacgtgaagctggtggaaaagagcttcgagacagacaccaacctgaacttccagatcctgtacgagatcctgctgggcaaggccaccctgtacgccgtgctggtgtctgccctggtgctgatggctatggtcaagcggaaggacagccgggga

SEQ ID NO: 5705 - DNA, 2676 bp, synthetic construct
  source 1..2676: mol_type = other DNA
atggccttaccagtgaccgccttgctcctgccgctggccttgctgctccacgccgccaggccggaagtgcagctggttgaatctggcggaggactggttcagcctggcggatctctgagactgtcttgtgccgccagcggcttcagcttcagcgacttttggatgagctgggtccgacaggcccctggcaaaggacttgaatgggtcgccacaatcagccaggccggcagcgagaaggactacgtggactctgtgaagggcagattcaccatcagccgggacaacgccaagaagtccctgtacctccagatgaacagcctgagagccgaggacaccgccgtgtactattgtgcctctggcgtgtacagcttcgactacagaggccagggcaccctggtcacagtctcttctggtaccggcggaggcggatctggcggcggaggtagcggtggcggaggatctgaattcgaccagatcgtgctgacccagtcccccgctattatgtccgcatcaccgggcgaaaaagtgacgatctcctgtagcgcttcatctagcgtctcctacatgtattggtatcaacagaaacctgggtctagcccaaagccgtggatctacagaaccagtaaccttgccagtggggtgccagcccgcttcagcggtagtggcagtggaacttcctatagcctcacaataagcaacatggaggctgaagatgccgctgcctattactgccagcagtaccacagttacccaaccacgttcggcgggggaactaagctcgaagtaaaactcgaggacctgaagaacgtgttcccacctgaggtggccgtgttcgagcctagcgaggccgagatcagccacacccagaaagccaccctcgtgtgcctggctaccggcttctaccccgaccatgtggaactgtcttggtgggtcaacggcaaagaggtgcacagcggcgtgtgtaccgacccccagccactgaaagaacagcccgccctgaacgacagccggtactgcctgagcagcagactgagagtgtccgccaccttctggcagaacccccggaaccacttcagatgccaggtgcagttctacggcctgagcgagaacgacgagtggacccaggacagagccaagcccgtgacccagatcgtgtctgccgaagcctggggcagagccgattgcggctttaccagcgagagctaccagcagggcgtgctgagcgccaccaacctgagcgtgatcggcttcagaatcctgctgctgaaagtggccggctttaacctgctgatgaccctgcggctgtggtccagcagggccaagcgatctggatctggagcaacaaacttctcactactcaaacaagcaggtgacgtggaggagaatcccgggcctactagtatggactggatttggcgcatccttttccttgtcggcgctgctaccggcgcgcattccgggccccagctccagctgcaagagtctggacctggcctggtcaagcctagcgagacactgagcctgacctgtaccgtgtccggcgatagcatcagcagcggcgattactactggggctggatcagacagcctcctggcaaaggactggaatggatcggccacatctactacagcggcgtgacctactacaaccccagcctgaagtccagagtgaccatcagcgtggacaccagccggaaccagttctccctgaagctgtctagcgtgacagccgccgataccgccgtgtactactgcaccagagaggacagcagcaactggcggagtagaggccagggaacactggtcacagttagctctggatccggcggaggcggaagtggaggcggaggatctggcggcggaggctctttcgaagaggtgcagctggtggaatctgggggcggcctggtccaacctaagggatcactcaagctctcttgtgcggccagcggattctctttcaatacctatgctatgaattgggtgagacaggcgcccggaaagggcctcgaatggatagcccatatccggtcaaaatcaaacaatttcgcaacctactatgcggactccgtgaaggaccgattttccatctcccgagatgcctccgagaatattctgttcctgcagatgaataacctcaagacagaggacaccgccatgtactactgtgtgcgccagggcggtgactttcccatggattactgggggcaggggaccagcgtgaccgtgagctctacgcgtatccagaaccctgatcctgccgtgtaccagctgcgggatagcaagagcagcgacaagagcgtgtgtctgttcaccgacttcgacagccagaccaacgtgtcccagagcaaggactccgacgtgtacatcaccgataagtgcgtgctggacatgcggagcatggacttcaagagcaactccgccgtggcctggtccaacaagtccgatttcgcctgcgccaacgccttcaacaacagcattatccccgaggacacattcttcccaagccccgagagcagctgcgacgtgaagctggtggaaaagagcttcgagacagacaccaacctgaacttccagatcctgtacgagatcctgctgggcaaggccaccctgtacgccgtgctggtgtctgccctggtgctgatggctatggtcaagcggaaggacagccgggga

SEQ ID NO: 5706 - DNA, 2673 bp, synthetic construct
  source 1..2673: mol_type = other DNA
atggccttaccagtgaccgccttgctcctgccgctggccttgctgctccacgccgccaggccggaagtgcagctggttgaatctggcggaggactggttcagcctggcggatctctgagactgtcttgtgccgccagcggcttcagcttcagcgacttttggatgagctgggtccgacaggcccctggcaaaggacttgaatgggtcgccacaatcagccaggccggcagcgagaaggactacgtggactctgtgaagggcagattcaccatcagccgggacaacgccaagaagtccctgtacctccagatgaacagcctgagagccgaggacaccgccgtgtactattgtgcctctggcgtgtacagcttcgactacagaggccagggcaccctggtcacagtctcttctggtaccggcggaggcggatctggcggcggaggtagcggtggcggaggatctgaattcgacgacatccagatgacccagagcagcagcagcttcagcgtgagcctgggcgacagagtgaccatcacctgcatggccagcgaggacatctacatcagactggcctggtaccagcagaagcccggcaacgcccccagactgctgatcagcgccgccaccagcctggagaccggcgtgcccagcagattcagcggcagcggcagcggcaaggactacaccctgagcatcaccagcctgcagaccgaggacgtgggcacctactactgccagcagtactggagcagcccctggaccttcggcggcggcaccaagctggagatcaacctcgaggacctgaagaacgtgttcccacctgaggtggccgtgttcgagcctagcgaggccgagatcagccacacccagaaagccaccctcgtgtgcctggctaccggcttctaccccgaccatgtggaactgtcttggtgggtcaacggcaaagaggtgcacagcggcgtgtgtaccgacccccagccactgaaagaacagcccgccctgaacgacagccggtactgcctgagcagcagactgagagtgtccgccaccttctggcagaacccccggaaccacttcagatgccaggtgcagttctacggcctgagcgagaacgacgagtggacccaggacagagccaagcccgtgacccagatcgtgtctgccgaagcctggggcagagccgattgcggctttaccagcgagagctaccagcagggcgtgctgagcgccaccaacctgagcgtgatcggcttcagaatcctgctgctgaaagtggccggctttaacctgctgatgaccctgcggctgtggtccagcagggccaagcgatctggatctggagcaacaaacttctcactactcaaacaagcaggtgacgtggaggagaatcccgggcctactagtatggactggatttggcgcatccttttccttgtcggcgctgctaccggcgcgcattccgggccccagctccagctgcaagagtctggacctggcctggtcaagcctagcgagacactgagcctgacctgtaccgtgtccggcgatagcatcagcagcggcgattactactggggctggatcagacagcctcctggcaaaggactggaatggatcggccacatctactacagcggcgtgacctactacaaccccagcctgaagtccagagtgaccatcagcgtggacaccagccggaaccagttctccctgaagctgtctagcgtgacagccgccgataccgccgtgtactactgcaccagagaggacagcagcaactggcggagtagaggccagggaacactggtcacagttagctctggatccggcggaggcggaagtggaggcggaggatctggcggcggaggctctttcgaagacgtgcagctgcaggagagcggccccggcctggtgaagcccagccagagcctgagcctgacctgcaccgtgaccggctacagcatcaccagcgactacacctggaactggatcagacagttccccggcaacaagctggagtggatgggctacatcacctacagcggcagcaccagctacaaccccagcctgaagagcagaaacagcatcaccagagacaccagcaagaaccagttcttcctgcagctgaacagcgtgaccaccgaggacaccgccacctactactgcgccagactgggcagaagatacacaatggactactggggccagggcaccagcgtgaccgtgagcagcacgcgtatccagaaccctgatcctgccgtgtaccagctgcgggatagcaagagcagcgacaagagcgtgtgtctgttcaccgacttcgacagccagaccaacgtgtcccagagcaaggactccgacgtgtacatcaccgataagtgcgtgctggacatgcggagcatggacttcaagagcaactccgccgtggcctggtccaacaagtccgatttcgcctgcgccaacgccttcaacaacagcattatccccgaggacacattcttcccaagccccgagagcagctgcgacgtgaagctggtggaaaagagcttcgagacagacaccaacctgaacttccagatcctgtacgagatcctgctgggcaaggccaccctgtacgccgtgctggtgtctgccctggtgctgatggctatggtcaagcggaaggacagccgggga

SEQ ID NO: 5707 - DNA, 2682 bp, synthetic construct
  source 1..2682: mol_type = other DNA
atggccttaccagtgaccgccttgctcctgccgctggccttgctgctccacgccgccaggccggaagtgcagctggttgaatctggcggaggactggttcagcctggcggatctctgagactgtcttgtgccgccagcggcttcagcttcagcgacttttggatgagctgggtccgacaggcccctggcaaaggacttgaatgggtcgccacaatcagccaggccggcagcgagaaggactacgtggactctgtgaagggcagattcaccatcagccgggacaacgccaagaagtccctgtacctccagatgaacagcctgagagccgaggacaccgccgtgtactattgtgcctctggcgtgtacagcttcgactacagaggccagggcaccctggtcacagtctcttctggtaccggcggaggcggatctggcggcggaggtagcggtggcggaggatctgaattcgacgacatccagatgacccagagccccagcagcctgtctgccagcgtgggcgacagagtgaccatcacctgtagagccagccagagcatcagcagctacctgaactggtatcagcagaagcccggcaaggcccccaaactgctgatctacgacgccagcaacctggaaaccggcgtgcccagcagattttccggcagcggctctggcaccgacttcaccttcaccatcagctccctccagcccgaggacattgccacctactactgccagcagtacgacaacctgcccctgacctttggcggaggcaccaaggtggacatcaagagactcgaggacctgaagaacgtgttcccacctgaggtggccgtgttcgagcctagcgaggccgagatcagccacacccagaaagccaccctcgtgtgcctggctaccggcttctaccccgaccatgtggaactgtcttggtgggtcaacggcaaagaggtgcacagcggcgtgtgtaccgacccccagccactgaaagaacagcccgccctgaacgacagccggtactgcctgagcagcagactgagagtgtccgccaccttctggcagaacccccggaaccacttcagatgccaggtgcagttctacggcctgagcgagaacgacgagtggacccaggacagagccaagcccgtgacccagatcgtgtctgccgaagcctggggcagagccgattgcggctttaccagcgagagctaccagcagggcgtgctgagcgccaccaacctgagcgtgatcggcttcagaatcctgctgctgaaagtggccggctttaacctgctgatgaccctgcggctgtggtccagcagggccaagcgatctggatctggagcaacaaacttctcactactcaaacaagcaggtgacgtggaggagaatcccgggcctactagtatggactggatttggcgcatccttttccttgtcggcgctgctaccggcgcgcattccgggccccagctccagctgcaagagtctggacctggcctggtcaagcctagcgagacactgagcctgacctgtaccgtgtccggcgatagcatcagcagcggcgattactactggggctggatcagacagcctcctggcaaaggactggaatggatcggccacatctactacagcggcgtgacctactacaaccccagcctgaagtccagagtgaccatcagcgtggacaccagccggaaccagttctccctgaagctgtctagcgtgacagccgccgataccgccgtgtactactgcaccagagaggacagcagcaactggcggagtagaggccagggaacactggtcacagttagctctggatccggcggaggcggaagtggaggcggaggatctggcggcggaggctctttcgaacaggtgcaactggtggaatctggcggcggagtggtgcagcctggcagaagcctgagactgagctgtgccgccagcggcttcacctttagcagctacgccatgcactgggtgcgccaggcccctggaaaaggcctggaatgggtggccgtgatctcctacgacggctccaacaagtattacgccgacagcgtgaagggccggttcaccatctccagagacaacagcaagaacaccctgtacctccagatgaacagcctgcgggccgaggacaccgccgtgtactattgtgccagggctcacaacagcagctcttggagcttcgactactggggccagggcaccctcgtgaccgtgtcatctacgcgtatccagaaccctgatcctgccgtgtaccagctgcgggatagcaagagcagcgacaagagcgtgtgtctgttcaccgacttcgacagccagaccaacgtgtcccagagcaaggactccgacgtgtacatcaccgataagtgcgtgctggacatgcggagcatggacttcaagagcaactccgccgtggcctggtccaacaagtccgatttcgcctgcgccaacgccttcaacaacagcattatccccgaggacacattcttcccaagccccgagagcagctgcgacgtgaagctggtggaaaagagcttcgagacagacaccaacctgaacttccagatcctgtacgagatcctgctgggcaaggccaccctgtacgccgtgctggtgtctgccctggtgctgatggctatggtcaagcggaaggacagccgggga

SEQ ID NO: 5708 - DNA, 2709 bp, synthetic construct
  source 1..2709: mol_type = other DNA
atggccttaccagtgaccgccttgctcctgccgctggccttgctgctccacgccgccaggccggaagtgcagctggttgaatctggcggaggactggttcagcctggcggatctctgagactgtcttgtgccgccagcggcttcagcttcagcgacttttggatgagctgggtccgacaggcccctggcaaaggacttgaatgggtcgccacaatcagccaggccggcagcgagaaggactacgtggactctgtgaagggcagattcaccatcagccgggacaacgccaagaagtccctgtacctccagatgaacagcctgagagccgaggacaccgccgtgtactattgtgcctctggcgtgtacagcttcgactacagaggccagggcaccctggtcacagtctcttctggtaccggcggaggcggatctggcggcggaggtagcggtggcggaggatctgaattcgacgacgtcgtgatgacccagagccctctgagcctgcctgtgtccctgggcgatcaggccagcatctcctgcagatccagccagagactggtgcacagcaacggcaacacctacctgcactggtatctgcagaagcccggccagagccccaagctgctgatctaccgggtgtccaacagattccccggcgtgcccgatagattcagcggctctggcagcggcaccgacttcaccctgaagatcagccgggtggaagccgaggacctgggcatctatttctgcagccagagcacccacgtgccctacacctttggcggaggcaccaagctggaaatcaagcggctcgaggacctgaagaacgtgttcccacctgaggtggccgtgttcgagcctagcgaggccgagatcagccacacccagaaagccaccctcgtgtgcctggctaccggcttctaccccgaccatgtggaactgtcttggtgggtcaacggcaaagaggtgcacagcggcgtgtgtaccgacccccagccactgaaagaacagcccgccctgaacgacagccggtactgcctgagcagcagactgagagtgtccgccaccttctggcagaacccccggaaccacttcagatgccaggtgcagttctacggcctgagcgagaacgacgagtggacccaggacagagccaagcccgtgacccagatcgtgtctgccgaagcctggggcagagccgattgcggctttaccagcgagagctaccagcagggcgtgctgagcgccaccaacctgagcgtgatcggcttcagaatcctgctgctgaaagtggccggctttaacctgctgatgaccctgcggctgtggtccagcagggccaagcgatctggatctggagcaacaaacttctcactactcaaacaagcaggtgacgtggaggagaatcccgggcctactagtatggactggatttggcgcatccttttccttgtcggcgctgctaccggcgcgcattccgggccccagctccagctgcaagagtctggacctggcctggtcaagcctagcgagacactgagcctgacctgtaccgtgtccggcgatagcatcagcagcggcgattactactggggctggatcagacagcctcctggcaaaggactggaatggatcggccacatctactacagcggcgtgacctactacaaccccagcctgaagtccagagtgaccatcagcgtggacaccagccggaaccagttctccctgaagctgtctagcgtgacagccgccgataccgccgtgtactactgcaccagagaggacagcagcaactggcggagtagaggccagggaacactggtcacagttagctctggatccggcggaggcggaagtggaggcggaggatctggcggcggaggctctttcgaagaagtgcggctgcagcagtctggccccgacctgattaagcctggggccagcgtgaagatgagctgcaaggccagcggctacaccttcaccggctacgtgatgcactgggtcaagcagaggccaggccagggcctggaatggatcggcttcatcaacccctacaacgacgacatccagagcaacgagcggttccggggcaaggccaccctgaccagcgataagagcagcaccaccgcctacatggaactgagcagcctgacctccgaggacagcgccgtgtactactgtgctaggggagccggctacaacttcgacggggcctacagattcttcgacttttggggccagggcaccacactgaccgtgtcctctacgcgtatccagaaccctgatcctgccgtgtaccagctgcgggatagcaagagcagcgacaagagcgtgtgtctgttcaccgacttcgacagccagaccaacgtgtcccagagcaaggactccgacgtgtacatcaccgataagtgcgtgctggacatgcggagcatggacttcaagagcaactccgccgtggcctggtccaacaagtccgatttcgcctgcgccaacgccttcaacaacagcattatccccgaggacacattcttcccaagccccgagagcagctgcgacgtgaagctggtggaaaagagcttcgagacagacaccaacctgaacttccagatcctgtacgagatcctgctgggcaaggccaccctgtacgccgtgctggtgtctgccctggtgctgatggctatggtcaagcggaaggacagccgggga

SEQ ID NO: 5709 - DNA, 2682 bp, synthetic construct
  source 1..2682: mol_type = other DNA
atggccttaccagtgaccgccttgctcctgccgctggccttgctgctccacgccgccaggccggaagtgcagctggttgaatctggcggaggactggttcagcctggcggatctctgagactgtcttgtgccgccagcggcttcagcttcagcgacttttggatgagctgggtccgacaggcccctggcaaaggacttgaatgggtcgccacaatcagccaggccggcagcgagaaggactacgtggactctgtgaagggcagattcaccatcagccgggacaacgccaagaagtccctgtacctccagatgaacagcctgagagccgaggacaccgccgtgtactattgtgcctctggcgtgtacagcttcgactacagaggccagggcaccctggtcacagtctcttctggtaccggcggaggcggatctggcggcggaggtagcggtggcggaggatctgaattcgacagctacgagctgacccagcctcctagcgtgtccgtgtctcctggacagaccgccaccatctcttgcagcggcgatcaactgggcgggaagtacggccactggtatcagaagaagcccggccagagccccgtgctggtgctgtaccaggacagaaaacggcctgccggcatccccgagagattcagcggaagcagcagcggcaacaccatcaccctgaccatcagcggcacccaggccgtggatgaggccgactactactgccaggcttgggacaccaatctgggcggcgtgttcggcggaggcaccaaagtgacagtgctgggacagctcgaggacctgaagaacgtgttcccacctgaggtggccgtgttcgagcctagcgaggccgagatcagccacacccagaaagccaccctcgtgtgcctggctaccggcttctaccccgaccatgtggaactgtcttggtgggtcaacggcaaagaggtgcacagcggcgtgtgtaccgacccccagccactgaaagaacagcccgccctgaacgacagccggtactgcctgagcagcagactgagagtgtccgccaccttctggcagaacccccggaaccacttcagatgccaggtgcagttctacggcctgagcgagaacgacgagtggacccaggacagagccaagcccgtgacccagatcgtgtctgccgaagcctggggcagagccgattgcggctttaccagcgagagctaccagcagggcgtgctgagcgccaccaacctgagcgtgatcggcttcagaatcctgctgctgaaagtggccggctttaacctgctgatgaccctgcggctgtggtccagcagggccaagcgatctggatctggagcaacaaacttctcactactcaaacaagcaggtgacgtggaggagaatcccgggcctactagtatggactggatttggcgcatccttttccttgtcggcgctgctaccggcgcgcattccgggccccagctccagctgcaagagtctggacctggcctggtcaagcctagcgagacactgagcctgacctgtaccgtgtccggcgatagcatcagcagcggcgattactactggggctggatcagacagcctcctggcaaaggactggaatggatcggccacatctactacagcggcgtgacctactacaaccccagcctgaagtccagagtgaccatcagcgtggacaccagccggaaccagttctccctgaagctgtctagcgtgacagccgccgataccgccgtgtactactgcaccagagaggacagcagcaactggcggagtagaggccagggaacactggtcacagttagctctggatccggcggaggcggaagtggaggcggaggatctggcggcggaggctctttcgaacaggtgcaactggtggaaagcggagccgaagtgaagaaacctggggccagcgtgaaggtgtcctgcaaggccagcggctacacctttaccggctactacatgcactgggtgcgccaggctccaggccagggactggaatggatgggccggatcaaccccaatagcggcggcaccaactacgcccagaaattccagggcagagtgaccatgaccagagacaccagcatcagcaccgcctacatggaactgagccggctgagaagcgacgacaccgccgtgtactactgcgccagccctagaggcagaggcagcgccttcgatatttggggccagggcacactcgtgaccgtgtcctctacgcgtatccagaaccctgatcctgccgtgtaccagctgcgggatagcaagagcagcgacaagagcgtgtgtctgttcaccgacttcgacagccagaccaacgtgtcccagagcaaggactccgacgtgtacatcaccgataagtgcgtgctggacatgcggagcatggacttcaagagcaactccgccgtggcctggtccaacaagtccgatttcgcctgcgccaacgccttcaacaacagcattatccccgaggacacattcttcccaagccccgagagcagctgcgacgtgaagctggtggaaaagagcttcgagacagacaccaacctgaacttccagatcctgtacgagatcctgctgggcaaggccaccctgtacgccgtgctggtgtctgccctggtgctgatggctatggtcaagcggaaggacagccgggga

SEQ ID NO: 5710 - DNA, 2691 bp, synthetic construct
  source 1..2691: mol_type = other DNA
atggccttaccagtgaccgccttgctcctgccgctggccttgctgctccacgccgccaggccggaagtgcagctggttgaatctggcggaggactggttcagcctggcggatctctgagactgtcttgtgccgccagcggcttcagcttcagcgacttttggatgagctgggtccgacaggcccctggcaaaggacttgaatgggtcgccacaatcagccaggccggcagcgagaaggactacgtggactctgtgaagggcagattcaccatcagccgggacaacgccaagaagtccctgtacctccagatgaacagcctgagagccgaggacaccgccgtgtactattgtgcctctggcgtgtacagcttcgactacagaggccagggcaccctggtcacagtctcttctggtaccggcggaggcggatctggcggcggaggtagcggtggcggaggatctgaattcgacaacttcatgctgacccagccccacagcgtgtccgagagccctggcaagaccgtgaccatctcctgcaccagaagcagcggctctatcgccagcaaatacgtgcagtggtatcagcagaggcccggcagcagccctaccaccgtgatctacgaggacaaccagaggcctagcggcgtgcccgatagattcagcggcagcatcgacaccagcagcaacagcgccagcctgaccatcagcggcctgagaacagaggacgaggccgactactactgccacagctacgacagcaacaaccactccgtgttcggcggaggcaccaaagtgacagtgctgggacagctcgaggacctgaagaacgtgttcccacctgaggtggccgtgttcgagcctagcgaggccgagatcagccacacccagaaagccaccctcgtgtgcctggctaccggcttctaccccgaccatgtggaactgtcttggtgggtcaacggcaaagaggtgcacagcggcgtgtgtaccgacccccagccactgaaagaacagcccgccctgaacgacagccggtactgcctgagcagcagactgagagtgtccgccaccttctggcagaacccccggaaccacttcagatgccaggtgcagttctacggcctgagcgagaacgacgagtggacccaggacagagccaagcccgtgacccagatcgtgtctgccgaagcctggggcagagccgattgcggctttaccagcgagagctaccagcagggcgtgctgagcgccaccaacctgagcgtgatcggcttcagaatcctgctgctgaaagtggccggctttaacctgctgatgaccctgcggctgtggtccagcagggccaagcgatctggatctggagcaacaaacttctcactactcaaacaagcaggtgacgtggaggagaatcccgggcctactagtatggactggatttggcgcatccttttccttgtcggcgctgctaccggcgcgcattccgggccccagctccagctgcaagagtctggacctggcctggtcaagcctagcgagacactgagcctgacctgtaccgtgtccggcgatagcatcagcagcggcgattactactggggctggatcagacagcctcctggcaaaggactggaatggatcggccacatctactacagcggcgtgacctactacaaccccagcctgaagtccagagtgaccatcagcgtggacaccagccggaaccagttctccctgaagctgtctagcgtgacagccgccgataccgccgtgtactactgcaccagagaggacagcagcaactggcggagtagaggccagggaacactggtcacagttagctctggatccggcggaggcggaagtggaggcggaggatctggcggcggaggctctttcgaagaagtgcaactggtggaaagcgggggaggcgtggtgcagccaggcggatctctgagactgagctgtgccgccagcggcttcaccttcagcagctacgccatgagctgggtgcgccaggcccctggaaaaggcctggaatgggtgtccgccatctctggctctggcggcagcacctactacgccgatagcgtgaagggccggttcagcatcagccgggacaacagcaagaacaccctgtacctccagatgaacagcctgcgggccgaggacaccgccgtgtactactgtgccagaaccagaagctccggggccttcgacatctggggccagggaacactcgtgaccgtgtcctctacgcgtatccagaaccctgatcctgccgtgtaccagctgcgggatagcaagagcagcgacaagagcgtgtgtctgttcaccgacttcgacagccagaccaacgtgtcccagagcaaggactccgacgtgtacatcaccgataagtgcgtgctggacatgcggagcatggacttcaagagcaactccgccgtggcctggtccaacaagtccgatttcgcctgcgccaacgccttcaacaacagcattatccccgaggacacattcttcccaagccccgagagcagctgcgacgtgaagctggtggaaaagagcttcgagacagacaccaacctgaacttccagatcctgtacgagatcctgctgggcaaggccaccctgtacgccgtgctggtgtctgccctggtgctgatggctatggtcaagcggaaggacagccgggga

SEQ ID NO: 5711 - DNA, 2676 bp, synthetic construct
  source 1..2676: mol_type = other DNA
atggccttaccagtgaccgccttgctcctgccgctggccttgctgctccacgccgccaggccggaagtgcagctggttgaatctggcggaggactggttcagcctggcggatctctgagactgtcttgtgccgccagcggcttcagcttcagcgacttttggatgagctgggtccgacaggcccctggcaaaggacttgaatgggtcgccacaatcagccaggccggcagcgagaaggactacgtggactctgtgaagggcagattcaccatcagccgggacaacgccaagaagtccctgtacctccagatgaacagcctgagagccgaggacaccgccgtgtactattgtgcctctggcgtgtacagcttcgactacagaggccagggcaccctggtcacagtctcttctggtaccggcggaggcggatctggcggcggaggtagcggtggcggaggatctgaattcgacatccagatgaaccagagccccagcagcctgagcgccagcctgggcgataccatcaccatcacctgtcacgccagccagaacatcaacgtgtggctgagctggtatcagcagaagcccggcaacatccccaagctgctgatctacaaggccagcaacctgcacaccggcgtgcccagcagattttctggcagcggctctggcaccggcttcaccattaccatcagctccctccagcccgaggacattgccacctactactgccagcagggccagagctacccctggacatttggcggaggcaccaagctggaaatcaagagactcgaggacctgaagaacgtgttcccacctgaggtggccgtgttcgagcctagcgaggccgagatcagccacacccagaaagccaccctcgtgtgcctggctaccggcttctaccccgaccatgtggaactgtcttggtgggtcaacggcaaagaggtgcacagcggcgtgtgtaccgacccccagccactgaaagaacagcccgccctgaacgacagccggtactgcctgagcagcagactgagagtgtccgccaccttctggcagaacccccggaaccacttcagatgccaggtgcagttctacggcctgagcgagaacgacgagtggacccaggacagagccaagcccgtgacccagatcgtgtctgccgaagcctggggcagagccgattgcggctttaccagcgagagctaccagcagggcgtgctgagcgccaccaacctgagcgtgatcggcttcagaatcctgctgctgaaagtggccggctttaacctgctgatgaccctgcggctgtggtccagcagggccaagcgatctggatctggagcaacaaacttctcactactcaaacaagcaggtgacgtggaggagaatcccgggcctactagtatggactggatttggcgcatccttttccttgtcggcgctgctaccggcgcgcattccgggccccagctccagctgcaagagtctggacctggcctggtcaagcctagcgagacactgagcctgacctgtaccgtgtccggcgatagcatcagcagcggcgattactactggggctggatcagacagcctcctggcaaaggactggaatggatcggccacatctactacagcggcgtgacctactacaaccccagcctgaagtccagagtgaccatcagcgtggacaccagccggaaccagttctccctgaagctgtctagcgtgacagccgccgataccgccgtgtactactgcaccagagaggacagcagcaactggcggagtagaggccagggaacactggtcacagttagctctggatccggcggaggcggaagtggaggcggaggatctggcggcggaggctctttcgaagaagtgcaactccagcagagcggcccagagcttgtgaagcctggcgcttccgtgaagattagctgcaaagccagcggctacagcttcaccggctacttcatgaactgggtcaagcagagccacggcaagagcctggagtacatcggcagattcaacccctacaacggcgagacactgtacaaccagaagttcaagggcaaggccaccctgaccgtggacaagagcagcagcaccgtgcacatggaactgctgagcgtgaccagcgaggacagcgccgtgtactactgtggcagaagcggcaacgacgacgctatggactattggggccagggcaccagcgtgaccgtgtctagtgctacgcgtatccagaaccctgatcctgccgtgtaccagctgcgggatagcaagagcagcgacaagagcgtgtgtctgttcaccgacttcgacagccagaccaacgtgtcccagagcaaggactccgacgtgtacatcaccgataagtgcgtgctggacatgcggagcatggacttcaagagcaactccgccgtggcctggtccaacaagtccgatttcgcctgcgccaacgccttcaacaacagcattatccccgaggacacattcttcccaagccccgagagcagctgcgacgtgaagctggtggaaaagagcttcgagacagacaccaacctgaacttccagatcctgtacgagatcctgctgggcaaggccaccctgtacgccgtgctggtgtctgccctggtgctgatggctatggtcaagcggaaggacagccgggga

SEQ ID NO: 5712 - DNA, 2679 bp, synthetic construct
  source 1..2679: mol_type = other DNA
atggccttaccagtgaccgccttgctcctgccgctggccttgctgctccacgccgccaggccggaagtgcagctggttgaatctggcggaggactggttcagcctggcggatctctgagactgtcttgtgccgccagcggcttcagcttcagcgacttttggatgagctgggtccgacaggcccctggcaaaggacttgaatgggtcgccacaatcagccaggccggcagcgagaaggactacgtggactctgtgaagggcagattcaccatcagccgggacaacgccaagaagtccctgtacctccagatgaacagcctgagagccgaggacaccgccgtgtactattgtgcctctggcgtgtacagcttcgactacagaggccagggcaccctggtcacagtctcttctggtaccggcggaggcggatctggcggcggaggtagcggtggcggaggatctgaattcgagatcgtgctgacacagagccctgccaccctgtctctgagccctggcgaaagagccaccctgagctgtagagccagccagagcgtgcggagctacctggcctggtatcagcagaagcctggacaggcccccagactgctgatctacgacgccagcaatcgggccacaggcatccccgccagattttctggctctggcagcggcaccgacttcaccctgacaatcagcagcctggaacccgaggacttcgccgtgtactactgccagcagcggagcaactggccccctacctttggacagggcaccaaggtggaaatcaagctcgaggacctgaagaacgtgttcccacctgaggtggccgtgttcgagcctagcgaggccgagatcagccacacccagaaagccaccctcgtgtgcctggctaccggcttctaccccgaccatgtggaactgtcttggtgggtcaacggcaaagaggtgcacagcggcgtgtgtaccgacccccagccactgaaagaacagcccgccctgaacgacagccggtactgcctgagcagcagactgagagtgtccgccaccttctggcagaacccccggaaccacttcagatgccaggtgcagttctacggcctgagcgagaacgacgagtggacccaggacagagccaagcccgtgacccagatcgtgtctgccgaagcctggggcagagccgattgcggctttaccagcgagagctaccagcagggcgtgctgagcgccaccaacctgagcgtgatcggcttcagaatcctgctgctgaaagtggccggctttaacctgctgatgaccctgcggctgtggtccagcagggccaagcgatctggatctggagcaacaaacttctcactactcaaacaagcaggtgacgtggaggagaatcccgggcctactagtatggactggatttggcgcatccttttccttgtcggcgctgctaccggcgcgcattccgggccccagctccagctgcaagagtctggacctggcctggtcaagcctagcgagacactgagcctgacctgtaccgtgtccggcgatagcatcagcagcggcgattactactggggctggatcagacagcctcctggcaaaggactggaatggatcggccacatctactacagcggcgtgacctactacaaccccagcctgaagtccagagtgaccatcagcgtggacaccagccggaaccagttctccctgaagctgtctagcgtgacagccgccgataccgccgtgtactactgcaccagagaggacagcagcaactggcggagtagaggccagggaacactggtcacagttagctctggatccggcggaggcggaagtggaggcggaggatctggcggcggaggctctttcgaacaactccaggtgcaggaatctggccccggactcgtgaagcccagcgagacactgagcctgacctgtaccgtgtccggcggcagcatcagcaacagctacttctcctggggctggatcagacagccccctggcaagggcctggaatggatcggcagcttctactacggcgagaaaacctactacaaccccagcctgaagtccagagccaccatcagcatcgacaccagcaagagccagttctccctgaagctgagcagcgtgacagccgccgacaccgccgtgtattattgccccagaggccccaccatgatccggggcgtgatcgactcttggggccagggaacactcgtgaccgtgtcctctacgcgtatccagaaccctgatcctgccgtgtaccagctgcgggatagcaagagcagcgacaagagcgtgtgtctgttcaccgacttcgacagccagaccaacgtgtcccagagcaaggactccgacgtgtacatcaccgataagtgcgtgctggacatgcggagcatggacttcaagagcaactccgccgtggcctggtccaacaagtccgatttcgcctgcgccaacgccttcaacaacagcattatccccgaggacacattcttcccaagccccgagagcagctgcgacgtgaagctggtggaaaagagcttcgagacagacaccaacctgaacttccagatcctgtacgagatcctgctgggcaaggccaccctgtacgccgtgctggtgtctgccctggtgctgatggctatggtcaagcggaaggacagccgggga

SEQ ID NO: 5713 - DNA, 2706 bp, synthetic construct
  source 1..2706: mol_type = other DNA
atggccttaccagtgaccgccttgctcctgccgctggccttgctgctccacgccgccaggccggaagtgcagctggttgaatctggcggaggactggttcagcctggcggatctctgagactgtcttgtgccgccagcggcttcagcttcagcgacttttggatgagctgggtccgacaggcccctggcaaaggacttgaatgggtcgccacaatcagccaggccggcagcgagaaggactacgtggactctgtgaagggcagattcaccatcagccgggacaacgccaagaagtccctgtacctccagatgaacagcctgagagccgaggacaccgccgtgtactattgtgcctctggcgtgtacagcttcgactacagaggccagggcaccctggtcacagtctcttctggtaccggcggaggcggatctggcggcggaggtagcggtggcggaggatctgaattcgacatcgtgatgacccagacccccctgagcctgcctgtgacacctggcgagcctgccagcatctcctgcagaagcagcagaagcctgctggacagcgacgacggcaacacctacctggactggtatctgcagaaacccggccagagcccccaactgctgatctacaccctgagctacagagccagcggcgtgcccgatagattttccggctctggcagcggcaccgacttcaccctgaagatcagccgggtggaagccgaggacgtgggcgtgtactactgtatgcagcgggtggaatttcccatcaccttcggccagggcaccagactggaaatcaagagactcgaggacctgaagaacgtgttcccacctgaggtggccgtgttcgagcctagcgaggccgagatcagccacacccagaaagccaccctcgtgtgcctggctaccggcttctaccccgaccatgtggaactgtcttggtgggtcaacggcaaagaggtgcacagcggcgtgtgtaccgacccccagccactgaaagaacagcccgccctgaacgacagccggtactgcctgagcagcagactgagagtgtccgccaccttctggcagaacccccggaaccacttcagatgccaggtgcagttctacggcctgagcgagaacgacgagtggacccaggacagagccaagcccgtgacccagatcgtgtctgccgaagcctggggcagagccgattgcggctttaccagcgagagctaccagcagggcgtgctgagcgccaccaacctgagcgtgatcggcttcagaatcctgctgctgaaagtggccggctttaacctgctgatgaccctgcggctgtggtccagcagggccaagcgatctggatctggagcaacaaacttctcactactcaaacaagcaggtgacgtggaggagaatcccgggcctactagtatggactggatttggcgcatccttttccttgtcggcgctgctaccggcgcgcattccgggccccagctccagctgcaagagtctggacctggcctggtcaagcctagcgagacactgagcctgacctgtaccgtgtccggcgatagcatcagcagcggcgattactactggggctggatcagacagcctcctggcaaaggactggaatggatcggccacatctactacagcggcgtgacctactacaaccccagcctgaagtccagagtgaccatcagcgtggacaccagccggaaccagttctccctgaagctgtctagcgtgacagccgccgataccgccgtgtactactgcaccagagaggacagcagcaactggcggagtagaggccagggaacactggtcacagttagctctggatccggcggaggcggaagtggaggcggaggatctggcggcggaggctctttcgaacaggtgcaactggtggaatctggcgggggagtggtgcagcctggcagatccctgagactgagctgtgccgccagcggcttcatcttcagcagatacggaatgcactgggtgcgccaggcccctggcaagggactgaaatgggtggccgtgatttggtacgacggcagcaacaagctgtacgccgacagcgtgaagggccggttcaccatcagcagagacaacagcaagaacaccctgtacctgcagatgaacagcctgcgggccgaggacaccgccgtgtactattgcgccagagactactacgacaacagccggcaccactggggcttcgactattggggccagggaacccttgtgaccgtgtcctctacgcgtatccagaaccctgatcctgccgtgtaccagctgcgggatagcaagagcagcgacaagagcgtgtgtctgttcaccgacttcgacagccagaccaacgtgtcccagagcaaggactccgacgtgtacatcaccgataagtgcgtgctggacatgcggagcatggacttcaagagcaactccgccgtggcctggtccaacaagtccgatttcgcctgcgccaacgccttcaacaacagcattatccccgaggacacattcttcccaagccccgagagcagctgcgacgtgaagctggtggaaaagagcttcgagacagacaccaacctgaacttccagatcctgtacgagatcctgctgggcaaggccaccctgtacgccgtgctggtgtctgccctggtgctgatggctatggtcaagcggaaggacagccgggga

SEQ ID NO: 5714 - DNA, 2676 bp, synthetic construct
  source 1..2676: mol_type = other DNA
atggccttaccagtgaccgccttgctcctgccgctggccttgctgctccacgccgccaggccggaagtgcagctggttgaatctggcggaggactggttcagcctggcggatctctgagactgtcttgtgccgccagcggcttcagcttcagcgacttttggatgagctgggtccgacaggcccctggcaaaggacttgaatgggtcgccacaatcagccaggccggcagcgagaaggactacgtggactctgtgaagggcagattcaccatcagccgggacaacgccaagaagtccctgtacctccagatgaacagcctgagagccgaggacaccgccgtgtactattgtgcctctggcgtgtacagcttcgactacagaggccagggcaccctggtcacagtctcttctggtaccggcggaggcggatctggcggcggaggtagcggtggcggaggatctgaattcgagatccagatgacccagagccccagcagcatgtctgccagcctgggcgacaccatcaccatcacatgccaggccacccaggacatcttcaagaacctgaactggtatcagcagaagcccggcaagccccccagcctgctgatctactatgccaccgaactggccgagggcgtgcccagcagattttctggcagcggcagcggctccgactacagcctgaccatcagcaacctggaaagcgaggacttcgccgcctactactgcctccagttcttcgagttcccattcaccttcggctccggcaccaagctggaaatgaagctcgaggacctgaagaacgtgttcccacctgaggtggccgtgttcgagcctagcgaggccgagatcagccacacccagaaagccaccctcgtgtgcctggctaccggcttctaccccgaccatgtggaactgtcttggtgggtcaacggcaaagaggtgcacagcggcgtgtgtaccgacccccagccactgaaagaacagcccgccctgaacgacagccggtactgcctgagcagcagactgagagtgtccgccaccttctggcagaacccccggaaccacttcagatgccaggtgcagttctacggcctgagcgagaacgacgagtggacccaggacagagccaagcccgtgacccagatcgtgtctgccgaagcctggggcagagccgattgcggctttaccagcgagagctaccagcagggcgtgctgagcgccaccaacctgagcgtgatcggcttcagaatcctgctgctgaaagtggccggctttaacctgctgatgaccctgcggctgtggtccagcagggccaagcgatctggatctggagcaacaaacttctcactactcaaacaagcaggtgacgtggaggagaatcccgggcctactagtatggactggatttggcgcatccttttccttgtcggcgctgctaccggcgcgcattccgggccccagctccagctgcaagagtctggacctggcctggtcaagcctagcgagacactgagcctgacctgtaccgtgtccggcgatagcatcagcagcggcgattactactggggctggatcagacagcctcctggcaaaggactggaatggatcggccacatctactacagcggcgtgacctactacaaccccagcctgaagtccagagtgaccatcagcgtggacaccagccggaaccagttctccctgaagctgtctagcgtgacagccgccgataccgccgtgtactactgcaccagagaggacagcagcaactggcggagtagaggccagggaacactggtcacagttagctctggatccggcggaggcggaagtggaggcggaggatctggcggcggaggctctttcgaacaggtgcaactccagcagtctggcgctgagcttgtgcggcctggcacctctgtgaaggtgtcctgtaaagccagcggctacgtgttcaccaactactggatcgagtggatcaagcagcggccaggccagggcctggaatggatcggcgtgatgaatccaggcagcggcgagacaacctacaacgagaagttcaagggcaaggccaccctgaccgccgacaagagcagcagcacagcctacatgcaactgtcctccctgaccagcgtggacagcgccgtgtacttctgcgccagggaccacgaccgggactactacgctatggactactggggccagggcaccagcgtgaccgtgtcatctacgcgtatccagaaccctgatcctgccgtgtaccagctgcgggatagcaagagcagcgacaagagcgtgtgtctgttcaccgacttcgacagccagaccaacgtgtcccagagcaaggactccgacgtgtacatcaccgataagtgcgtgctggacatgcggagcatggacttcaagagcaactccgccgtggcctggtccaacaagtccgatttcgcctgcgccaacgccttcaacaacagcattatccccgaggacacattcttcccaagccccgagagcagctgcgacgtgaagctggtggaaaagagcttcgagacagacaccaacctgaacttccagatcctgtacgagatcctgctgggcaaggccaccctgtacgccgtgctggtgtctgccctggtgctgatggctatggtcaagcggaaggacagccgggga

SEQ ID NO: 5715 - DNA, 2667 bp, synthetic construct
  source 1..2667: mol_type = other DNA
atggccttaccagtgaccgccttgctcctgccgctggccttgctgctccacgccgccaggccggaagtgcagctggttgaatctggcggaggactggttcagcctggcggatctctgagactgtcttgtgccgccagcggcttcagcttcagcgacttttggatgagctgggtccgacaggcccctggcaaaggacttgaatgggtcgccacaatcagccaggccggcagcgagaaggactacgtggactctgtgaagggcagattcaccatcagccgggacaacgccaagaagtccctgtacctccagatgaacagcctgagagccgaggacaccgccgtgtactattgtgcctctggcgtgtacagcttcgactacagaggccagggcaccctggtcacagtctcttctggtaccggcggaggcggatctggcggcggaggtagcggtggcggaggatctgaattcgacatcctgctgacacagagccccgccatcctgtccgtgtctccaggcgagagagtgtcctttagctgccgggccagccagaacatcggcaccagcatccactggtatcagcagcggaccaacggcagccccagactgctgattaagtacgccagcgagtccgtgtccggcatccccagcagattttctggcagcggctccggcaccgacttcaccctgagcatcaacagcgtggaaagcgaggacattgccgactactactgccagcacaccaatagctggcccaccacctttggcggaggcaccaagctggaaatcaagagactcgaggacctgaagaacgtgttcccacctgaggtggccgtgttcgagcctagcgaggccgagatcagccacacccagaaagccaccctcgtgtgcctggctaccggcttctaccccgaccatgtggaactgtcttggtgggtcaacggcaaagaggtgcacagcggcgtgtgtaccgacccccagccactgaaagaacagcccgccctgaacgacagccggtactgcctgagcagcagactgagagtgtccgccaccttctggcagaacccccggaaccacttcagatgccaggtgcagttctacggcctgagcgagaacgacgagtggacccaggacagagccaagcccgtgacccagatcgtgtctgccgaagcctggggcagagccgattgcggctttaccagcgagagctaccagcagggcgtgctgagcgccaccaacctgagcgtgatcggcttcagaatcctgctgctgaaagtggccggctttaacctgctgatgaccctgcggctgtggtccagcagggccaagcgatctggatctggagcaacaaacttctcactactcaaacaagcaggtgacgtggaggagaatcccgggcctactagtatggactggatttggcgcatccttttccttgtcggcgctgctaccggcgcgcattccgggccccagctccagctgcaagagtctggacctggcctggtcaagcctagcgagacactgagcctgacctgtaccgtgtccggcgatagcatcagcagcggcgattactactggggctggatcagacagcctcctggcaaaggactggaatggatcggccacatctactacagcggcgtgacctactacaaccccagcctgaagtccagagtgaccatcagcgtggacaccagccggaaccagttctccctgaagctgtctagcgtgacagccgccgataccgccgtgtactactgcaccagagaggacagcagcaactggcggagtagaggccagggaacactggtcacagttagctctggatccggcggaggcggaagtggaggcggaggatctggcggcggaggctctttcgaacaggtgcaactccagcagtccgacgccgagcttgtgaagcctggcgcttccgtgaagattagctgcaaggccagcggctacaccttcaccgaccacgccattcactgggtcaagcagaagcccgagcagggcctggaatggatcggctacttcagccccggcaacggcgacatcaagtacaacgagaagttcaagggcaaggccaccctgaccgccgacaagagcagcagcacagcctacatgcaactgaacagcctgaccagcgaggactccgccgtgtacttctgcaagcggagctacggcaactacgactactggggccagggcaccacactgaccgtgtctagtacgcgtatccagaaccctgatcctgccgtgtaccagctgcgggatagcaagagcagcgacaagagcgtgtgtctgttcaccgacttcgacagccagaccaacgtgtcccagagcaaggactccgacgtgtacatcaccgataagtgcgtgctggacatgcggagcatggacttcaagagcaactccgccgtggcctggtccaacaagtccgatttcgcctgcgccaacgccttcaacaacagcattatccccgaggacacattcttcccaagccccgagagcagctgcgacgtgaagctggtggaaaagagcttcgagacagacaccaacctgaacttccagatcctgtacgagatcctgctgggcaaggccaccctgtacgccgtgctggtgtctgccctggtgctgatggctatggtcaagcggaaggacagccgggga

SEQ ID NO: 5716 - DNA, 2682 bp, synthetic construct
  source 1..2682: mol_type = other DNA
atggccttaccagtgaccgccttgctcctgccgctggccttgctgctccacgccgccaggccggaagtgcagctggttgaatctggcggaggactggttcagcctggcggatctctgagactgtcttgtgccgccagcggcttcagcttcagcgacttttggatgagctgggtccgacaggcccctggcaaaggacttgaatgggtcgccacaatcagccaggccggcagcgagaaggactacgtggactctgtgaagggcagattcaccatcagccgggacaacgccaagaagtccctgtacctccagatgaacagcctgagagccgaggacaccgccgtgtactattgtgcctctggcgtgtacagcttcgactacagaggccagggcaccctggtcacagtctcttctggtaccggcggaggcggatctggcggcggaggtagcggtggcggaggatctgaattcgacatcgtgatgacccagagccccgatagcctggccgtgtctctgggagagagagccaccatcaactgcaagagcagccagagcctgctgaacagcggcgaccagaagaactacctgacctggtatcagcagaagcccggccagccccccaagctgctgatctactgggccagcaccagagaaagcggcgtgcccgatagattcagcggcagcggaagtggcaccgacttcaccctgaccatcagttctcttcaggccgaggacgtggccgtgtactactgccagaacgactacagctaccccctgaccttcggccagggcaccaaggtggaaatcaagctcgaggacctgaagaacgtgttcccacctgaggtggccgtgttcgagcctagcgaggccgagatcagccacacccagaaagccaccctcgtgtgcctggctaccggcttctaccccgaccatgtggaactgtcttggtgggtcaacggcaaagaggtgcacagcggcgtgtgtaccgacccccagccactgaaagaacagcccgccctgaacgacagccggtactgcctgagcagcagactgagagtgtccgccaccttctggcagaacccccggaaccacttcagatgccaggtgcagttctacggcctgagcgagaacgacgagtggacccaggacagagccaagcccgtgacccagatcgtgtctgccgaagcctggggcagagccgattgcggctttaccagcgagagctaccagcagggcgtgctgagcgccaccaacctgagcgtgatcggcttcagaatcctgctgctgaaagtggccggctttaacctgctgatgaccctgcggctgtggtccagcagggccaagcgatctggatctggagcaacaaacttctcactactcaaacaagcaggtgacgtggaggagaatcccgggcctactagtatggactggatttggcgcatccttttccttgtcggcgctgctaccggcgcgcattccgggccccagctccagctgcaagagtctggacctggcctggtcaagcctagcgagacactgagcctgacctgtaccgtgtccggcgatagcatcagcagcggcgattactactggggctggatcagacagcctcctggcaaaggactggaatggatcggccacatctactacagcggcgtgacctactacaaccccagcctgaagtccagagtgaccatcagcgtggacaccagccggaaccagttctccctgaagctgtctagcgtgacagccgccgataccgccgtgtactactgcaccagagaggacagcagcaactggcggagtagaggccagggaacactggtcacagttagctctggatccggcggaggcggaagtggaggcggaggatctggcggcggaggctctttcgaacaggtgcagctggtgcagtctggggccgaagtgaagaaaaccggcagcagcgtgaaggtgtcctgcaaggccagcggctacacctttaccgaccacgccattcacgtgtggcggcaggctccaggacaggccctggaatggatgggccacttcagccccggcaacaccgacatcaagtacaacgacaagttcaagggcagagtgaccctgaccgtggaccgcagcatgagcaccgcctacatggaactgagcagcctgcggagcgaggacaccgccatgtactattgcaagaccagcaccttctttttcgactactggggccagggaacaatggtcaccgtgtccagcacgcgtatccagaaccctgatcctgccgtgtaccagctgcgggatagcaagagcagcgacaagagcgtgtgtctgttcaccgacttcgacagccagaccaacgtgtcccagagcaaggactccgacgtgtacatcaccgataagtgcgtgctggacatgcggagcatggacttcaagagcaactccgccgtggcctggtccaacaagtccgatttcgcctgcgccaacgccttcaacaacagcattatccccgaggacacattcttcccaagccccgagagcagctgcgacgtgaagctggtggaaaagagcttcgagacagacaccaacctgaacttccagatcctgtacgagatcctgctgggcaaggccaccctgtacgccgtgctggtgtctgccctggtgctgatggctatggtcaagcggaaggacagccgggga

SEQ ID NO: 5717 - DNA, 2679 bp, synthetic construct
  source 1..2679: mol_type = other DNA
atggccttaccagtgaccgccttgctcctgccgctggccttgctgctccacgccgccaggccggaagtgcagctggttgaatctggcggaggactggttcagcctggcggatctctgagactgtcttgtgccgccagcggcttcagcttcagcgacttttggatgagctgggtccgacaggcccctggcaaaggacttgaatgggtcgccacaatcagccaggccggcagcgagaaggactacgtggactctgtgaagggcagattcaccatcagccgggacaacgccaagaagtccctgtacctccagatgaacagcctgagagccgaggacaccgccgtgtactattgtgcctctggcgtgtacagcttcgactacagaggccagggcaccctggtcacagtctcttctggtaccggcggaggcggatctggcggcggaggtagcggtggcggaggatctgaattcgacatccagatgacccagagccccagcagcctgtctgccagcgtgggcgacagagtgaccatcacatgcaaggccagccaggacgtgtccattgccgtggcctggtatcagcagaagcccggcaaggcccccaaggtgctgatctacagcgccagctacagatacaccggcgtgcccgacagattcagcggctctggcagcggcaccgacttcaccttcaccatcagctccctccagcccgaggatattgccgtgtactactgccagcagcactacatcacccccctgacctttggcggaggcaccaaggtggaaatcaagctcgaggacctgaagaacgtgttcccacctgaggtggccgtgttcgagcctagcgaggccgagatcagccacacccagaaagccaccctcgtgtgcctggctaccggcttctaccccgaccatgtggaactgtcttggtgggtcaacggcaaagaggtgcacagcggcgtgtgtaccgacccccagccactgaaagaacagcccgccctgaacgacagccggtactgcctgagcagcagactgagagtgtccgccaccttctggcagaacccccggaaccacttcagatgccaggtgcagttctacggcctgagcgagaacgacgagtggacccaggacagagccaagcccgtgacccagatcgtgtctgccgaagcctggggcagagccgattgcggctttaccagcgagagctaccagcagggcgtgctgagcgccaccaacctgagcgtgatcggcttcagaatcctgctgctgaaagtggccggctttaacctgctgatgaccctgcggctgtggtccagcagggccaagcgatctggatctggagcaacaaacttctcactactcaaacaagcaggtgacgtggaggagaatcccgggcctactagtatggactggatttggcgcatccttttccttgtcggcgctgctaccggcgcgcattccgggccccagctccagctgcaagagtctggacctggcctggtcaagcctagcgagacactgagcctgacctgtaccgtgtccggcgatagcatcagcagcggcgattactactggggctggatcagacagcctcctggcaaaggactggaatggatcggccacatctactacagcggcgtgacctactacaaccccagcctgaagtccagagtgaccatcagcgtggacaccagccggaaccagttctccctgaagctgtctagcgtgacagccgccgataccgccgtgtactactgcaccagagaggacagcagcaactggcggagtagaggccagggaacactggtcacagttagctctggatccggcggaggcggaagtggaggcggaggatctggcggcggaggctctttcgaacagatccaactggtgcagagcggccacgaagtgaagaaacctggggccagcgtgaaggtgtcctgcaaagccagcggctacacctttaccaactacggcatgaactgggtgcgccaggcccctggacagggcctggaatggatgggctggatcaacaccaagaccggcgagcccacctacgccgaagagttcaagggcagattcgtgttcagcctggaaaccagcgcctccaccgcctacctccagatcagctctctgaaggccgaggacaccgccatgtacttttgcggcagaggcggctacggcagcagctactggtacttcgatgtgtggggccagggcaccaccgtgaccgtgtcatctacgcgtatccagaaccctgatcctgccgtgtaccagctgcgggatagcaagagcagcgacaagagcgtgtgtctgttcaccgacttcgacagccagaccaacgtgtcccagagcaaggactccgacgtgtacatcaccgataagtgcgtgctggacatgcggagcatggacttcaagagcaactccgccgtggcctggtccaacaagtccgatttcgcctgcgccaacgccttcaacaacagcattatccccgaggacacattcttcccaagccccgagagcagctgcgacgtgaagctggtggaaaagagcttcgagacagacaccaacctgaacttccagatcctgtacgagatcctgctgggcaaggccaccctgtacgccgtgctggtgtctgccctggtgctgatggctatggtcaagcggaaggacagccgggga

SEQ ID NO: 5718 - DNA, 2685 bp, synthetic construct
  source 1..2685: mol_type = other DNA
atggccttaccagtgaccgccttgctcctgccgctggccttgctgctccacgccgccaggccggaagtgcagctggttgaatctggcggaggactggttcagcctggcggatctctgagactgtcttgtgccgccagcggcttcagcttcagcgacttttggatgagctgggtccgacaggcccctggcaaaggacttgaatgggtcgccacaatcagccaggccggcagcgagaaggactacgtggactctgtgaagggcagattcaccatcagccgggacaacgccaagaagtccctgtacctccagatgaacagcctgagagccgaggacaccgccgtgtactattgtgcctctggcgtgtacagcttcgactacagaggccagggcaccctggtcacagtctcttctggtaccggcggaggcggatctggcggcggaggtagcggtggcggaggatctgaattcgacatcgtgatgacccagagccccgatagcctggccgtgtctctgggagagagagccaccatcaactgccgggccagcaagagcgtgtccaccagcggctacagctacatgcactggtatcagcagaagcccggccagccccccaagctgctgatctacctggcctccaacctggaaagcggcgtgcccgatagattcagcggcagcggctctggcaccgacttcaccctgaccatcagttctcttcaggccgaggacgtggccgtgtactactgccagcacagcagagagctgccctacaccttcggccagggcaccaagctggaaatcaagctcgaggacctgaagaacgtgttcccacctgaggtggccgtgttcgagcctagcgaggccgagatcagccacacccagaaagccaccctcgtgtgcctggctaccggcttctaccccgaccatgtggaactgtcttggtgggtcaacggcaaagaggtgcacagcggcgtgtgtaccgacccccagccactgaaagaacagcccgccctgaacgacagccggtactgcctgagcagcagactgagagtgtccgccaccttctggcagaacccccggaaccacttcagatgccaggtgcagttctacggcctgagcgagaacgacgagtggacccaggacagagccaagcccgtgacccagatcgtgtctgccgaagcctggggcagagccgattgcggctttaccagcgagagctaccagcagggcgtgctgagcgccaccaacctgagcgtgatcggcttcagaatcctgctgctgaaagtggccggctttaacctgctgatgaccctgcggctgtggtccagcagggccaagcgatctggatctggagcaacaaacttctcactactcaaacaagcaggtgacgtggaggagaatcccgggcctactagtatggactggatttggcgcatccttttccttgtcggcgctgctaccggcgcgcattccgggccccagctccagctgcaagagtctggacctggcctggtcaagcctagcgagacactgagcctgacctgtaccgtgtccggcgatagcatcagcagcggcgattactactggggctggatcagacagcctcctggcaaaggactggaatggatcggccacatctactacagcggcgtgacctactacaaccccagcctgaagtccagagtgaccatcagcgtggacaccagccggaaccagttctccctgaagctgtctagcgtgacagccgccgataccgccgtgtactactgcaccagagaggacagcagcaactggcggagtagaggccagggaacactggtcacagttagctctggatccggcggaggcggaagtggaggcggaggatctggcggcggaggctctttcgaacaggtgcaactccaggaatctggccctggccttgtgaagcccagcgagacactgagcctgacctgtaccgtgtccggcggcagcatcagctcttacggcgtgcactggattcggcagcctccaggcaagggcctggaatggatcggcgtgatctggacctccggcgtgaccgactacaacagcgccctgatgggcagagtgaccatctccgtggacaccagcaagaaccagttcagcctgaagctgagcagcgtgacagccgccgataccgccgtgtattattgcgccagagatggcgactacgaccgctacacaatggactactggggccagggaacccttgtgaccgtgtcctctacgcgtatccagaaccctgatcctgccgtgtaccagctgcgggatagcaagagcagcgacaagagcgtgtgtctgttcaccgacttcgacagccagaccaacgtgtcccagagcaaggactccgacgtgtacatcaccgataagtgcgtgctggacatgcggagcatggacttcaagagcaactccgccgtggcctggtccaacaagtccgatttcgcctgcgccaacgccttcaacaacagcattatccccgaggacacattcttcccaagccccgagagcagctgcgacgtgaagctggtggaaaagagcttcgagacagacaccaacctgaacttccagatcctgtacgagatcctgctgggcaaggccaccctgtacgccgtgctggtgtctgccctggtgctgatggctatggtcaagcggaaggacagccgggga

SEQ ID NO: 5719 - DNA, 2685 bp, synthetic construct
  source 1..2685: mol_type = other DNA
atggccttaccagtgaccgccttgctcctgccgctggccttgctgctccacgccgccaggccggaagtgcagctggttgaatctggcggaggactggttcagcctggcggatctctgagactgtcttgtgccgccagcggcttcagcttcagcgacttttggatgagctgggtccgacaggcccctggcaaaggacttgaatgggtcgccacaatcagccaggccggcagcgagaaggactacgtggactctgtgaagggcagattcaccatcagccgggacaacgccaagaagtccctgtacctccagatgaacagcctgagagccgaggacaccgccgtgtactattgtgcctctggcgtgtacagcttcgactacagaggccagggcaccctggtcacagtctcttctggtaccggcggaggcggatctggcggcggaggtagcggtggcggaggatctgaattcgacatccagatgacccagagccccagcagcctgtctgccagcgtgggcgacagagtgaccatcacctgtagagccagccagagcatcggcaccagcctgcactggtatcagcagaagcctggcaaggcccccaagctgctgattaagttcgccagcagactgcagagcggcgtgcccagcagattttctggcagcggctccggcaccgacttcaccctgacaatcagctccctgcagcccgaggacttcgccacctactactgccagcagagccccggcttccctccaacctttggacagggcaccaagctggaaatcaagcggctcgaggacctgaagaacgtgttcccacctgaggtggccgtgttcgagcctagcgaggccgagatcagccacacccagaaagccaccctcgtgtgcctggctaccggcttctaccccgaccatgtggaactgtcttggtgggtcaacggcaaagaggtgcacagcggcgtgtgtaccgacccccagccactgaaagaacagcccgccctgaacgacagccggtactgcctgagcagcagactgagagtgtccgccaccttctggcagaacccccggaaccacttcagatgccaggtgcagttctacggcctgagcgagaacgacgagtggacccaggacagagccaagcccgtgacccagatcgtgtctgccgaagcctggggcagagccgattgcggctttaccagcgagagctaccagcagggcgtgctgagcgccaccaacctgagcgtgatcggcttcagaatcctgctgctgaaagtggccggctttaacctgctgatgaccctgcggctgtggtccagcagggccaagcgatctggatctggagcaacaaacttctcactactcaaacaagcaggtgacgtggaggagaatcccgggcctactagtatggactggatttggcgcatccttttccttgtcggcgctgctaccggcgcgcattccgggccccagctccagctgcaagagtctggacctggcctggtcaagcctagcgagacactgagcctgacctgtaccgtgtccggcgatagcatcagcagcggcgattactactggggctggatcagacagcctcctggcaaaggactggaatggatcggccacatctactacagcggcgtgacctactacaaccccagcctgaagtccagagtgaccatcagcgtggacaccagccggaaccagttctccctgaagctgtctagcgtgacagccgccgataccgccgtgtactactgcaccagagaggacagcagcaactggcggagtagaggccagggaacactggtcacagttagctctggatccggcggaggcggaagtggaggcggaggatctggcggcggaggctctttcgaacaggtgcaactggtggaatctggcggcggacttgtgaagccaggcggcagcctgagactgagctgtgccgccagcggcttcagcatcaccaccagcggctactactggacctggatcagacagttccccggcaagggcctggaatggatgggctacatcggctacaacagcaagacctactacaaccccgccctgaagtcccggatcaccatcagcagagacaacgccaagaacagcctgtacctgcagatgaactccctgagagccgaggataccgccgtgtactactgcgccagatccctgtacggcggctacaaggacgccttcgatagctggggccagggaacccttgtgaccgtgtctagcacgcgtatccagaaccctgatcctgccgtgtaccagctgcgggatagcaagagcagcgacaagagcgtgtgtctgttcaccgacttcgacagccagaccaacgtgtcccagagcaaggactccgacgtgtacatcaccgataagtgcgtgctggacatgcggagcatggacttcaagagcaactccgccgtggcctggtccaacaagtccgatttcgcctgcgccaacgccttcaacaacagcattatccccgaggacacattcttcccaagccccgagagcagctgcgacgtgaagctggtggaaaagagcttcgagacagacaccaacctgaacttccagatcctgtacgagatcctgctgggcaaggccaccctgtacgccgtgctggtgtctgccctggtgctgatggctatggtcaagcggaaggacagccgggga

SEQ ID NO: 5720 - DNA, 2700 bp, synthetic construct
  source 1..2700: mol_type = other DNA
atggccttaccagtgaccgccttgctcctgccgctggccttgctgctccacgccgccaggccggaagtgcagctggttgaatctggcggaggactggttcagcctggcggatctctgagactgtcttgtgccgccagcggcttcagcttcagcgacttttggatgagctgggtccgacaggcccctggcaaaggacttgaatgggtcgccacaatcagccaggccggcagcgagaaggactacgtggactctgtgaagggcagattcaccatcagccgggacaacgccaagaagtccctgtacctccagatgaacagcctgagagccgaggacaccgccgtgtactattgtgcctctggcgtgtacagcttcgactacagaggccagggcaccctggtcacagtctcttctggtaccggcggaggcggatctggcggcggaggtagcggtggcggaggatctgaattcgacgagatcgtgctgacccagagccctctgagcctgcctgtgacacctggcgagcctgccagcatctcctgtagaagcagccagagcctgctgcacagcatcggctacaactacctggactggtatctccagaagcccggccagagcccccaactgctgatctacctgggcagcaacagagccagcggcgtgcccgatagattttccggcagcggctccggcaccgacttcaccctgaagatcagccgggtggaagccgaggacgtgggcgtgtactactgtatgcaggccctccagacccccctgacctttggcggaggcaccaaggtggaaatcaagcggctcgaggacctgaagaacgtgttcccacctgaggtggccgtgttcgagcctagcgaggccgagatcagccacacccagaaagccaccctcgtgtgcctggctaccggcttctaccccgaccatgtggaactgtcttggtgggtcaacggcaaagaggtgcacagcggcgtgtgtaccgacccccagccactgaaagaacagcccgccctgaacgacagccggtactgcctgagcagcagactgagagtgtccgccaccttctggcagaacccccggaaccacttcagatgccaggtgcagttctacggcctgagcgagaacgacgagtggacccaggacagagccaagcccgtgacccagatcgtgtctgccgaagcctggggcagagccgattgcggctttaccagcgagagctaccagcagggcgtgctgagcgccaccaacctgagcgtgatcggcttcagaatcctgctgctgaaagtggccggctttaacctgctgatgaccctgcggctgtggtccagcagggccaagcgatctggatctggagcaacaaacttctcactactcaaacaagcaggtgacgtggaggagaatcccgggcctactagtatggactggatttggcgcatccttttccttgtcggcgctgctaccggcgcgcattccgggccccagctccagctgcaagagtctggacctggcctggtcaagcctagcgagacactgagcctgacctgtaccgtgtccggcgatagcatcagcagcggcgattactactggggctggatcagacagcctcctggcaaaggactggaatggatcggccacatctactacagcggcgtgacctactacaaccccagcctgaagtccagagtgaccatcagcgtggacaccagccggaaccagttctccctgaagctgtctagcgtgacagccgccgataccgccgtgtactactgcaccagagaggacagcagcaactggcggagtagaggccagggaacactggtcacagttagctctggatccggcggaggcggaagtggaggcggaggatctggcggcggaggctctttcgaagaagtgcaactggtggaaagcggaggcggcgtggtgcagcctggaagaagcctgagactgagctgtgccgccagcggcttcaccttccggtcctacggaatgcactgggtgcgccaggcccctggcaaaggactggaatgggtggccgtgatctcctacgacggctccaacaagtactacaccgacagcgtgaacggcagattcaccatcagcagagacaacagcaagaacaccctgtacctccagatgaacagcctgcgggccgaggacaccgccgtgtactattgtgctagaggcggaggctactacgagacaagcggccctgattactggggccagggcacactcgtgaccgtgtctagtacgcgtatccagaaccctgatcctgccgtgtaccagctgcgggatagcaagagcagcgacaagagcgtgtgtctgttcaccgacttcgacagccagaccaacgtgtcccagagcaaggactccgacgtgtacatcaccgataagtgcgtgctggacatgcggagcatggacttcaagagcaactccgccgtggcctggtccaacaagtccgatttcgcctgcgccaacgccttcaacaacagcattatccccgaggacacattcttcccaagccccgagagcagctgcgacgtgaagctggtggaaaagagcttcgagacagacaccaacctgaacttccagatcctgtacgagatcctgctgggcaaggccaccctgtacgccgtgctggtgtctgccctggtgctgatggctatggtcaagcggaaggacagccgggga

SEQ ID NO: 5721 - DNA, 2694 bp, synthetic construct
  source 1..2694: mol_type = other DNA
atggccttaccagtgaccgccttgctcctgccgctggccttgctgctccacgccgccaggccggaagtgcagctggttgaatctggcggaggactggttcagcctggcggatctctgagactgtcttgtgccgccagcggcttcagcttcagcgacttttggatgagctgggtccgacaggcccctggcaaaggacttgaatgggtcgccacaatcagccaggccggcagcgagaaggactacgtggactctgtgaagggcagattcaccatcagccgggacaacgccaagaagtccctgtacctccagatgaacagcctgagagccgaggacaccgccgtgtactattgtgcctctggcgtgtacagcttcgactacagaggccagggcaccctggtcacagtctcttctggtaccggcggaggcggatctggcggcggaggtagcggtggcggaggatctgaattcgacgacgtcgtgatgacccagagccctctgagcctgcctgtgacacctggcgagcctgccagcatctcctgtagaagcagccagagcctgctgcacagcatcggctacaactacctgcactggtttctccagaagcccggccagagcccccaactgctgatctacctgggcagcaacagagccagcggcgtgcccgatagattttccggcagcggctccggcaccgacttcaccctgaagatcagccgggtggaagccgaggacgtgggcgtgtactactgtatgcaggccctccagacccctcccacctttggacagggcaccagactggaaatcaagcggctcgaggacctgaagaacgtgttcccacctgaggtggccgtgttcgagcctagcgaggccgagatcagccacacccagaaagccaccctcgtgtgcctggctaccggcttctaccccgaccatgtggaactgtcttggtgggtcaacggcaaagaggtgcacagcggcgtgtgtaccgacccccagccactgaaagaacagcccgccctgaacgacagccggtactgcctgagcagcagactgagagtgtccgccaccttctggcagaacccccggaaccacttcagatgccaggtgcagttctacggcctgagcgagaacgacgagtggacccaggacagagccaagcccgtgacccagatcgtgtctgccgaagcctggggcagagccgattgcggctttaccagcgagagctaccagcagggcgtgctgagcgccaccaacctgagcgtgatcggcttcagaatcctgctgctgaaagtggccggctttaacctgctgatgaccctgcggctgtggtccagcagggccaagcgatctggatctggagcaacaaacttctcactactcaaacaagcaggtgacgtggaggagaatcccgggcctactagtatggactggatttggcgcatccttttccttgtcggcgctgctaccggcgcgcattccgggccccagctccagctgcaagagtctggacctggcctggtcaagcctagcgagacactgagcctgacctgtaccgtgtccggcgatagcatcagcagcggcgattactactggggctggatcagacagcctcctggcaaaggactggaatggatcggccacatctactacagcggcgtgacctactacaaccccagcctgaagtccagagtgaccatcagcgtggacaccagccggaaccagttctccctgaagctgtctagcgtgacagccgccgataccgccgtgtactactgcaccagagaggacagcagcaactggcggagtagaggccagggaacactggtcacagttagctctggatccggcggaggcggaagtggaggcggaggatctggcggcggaggctctttcgaacaactccaactccaggaaagcggccctggcctcgtgaagcctagcggcacactgagcctgacatgtgccgtgtctggcggcagcatcagcagcagcaactggtggtcttgggtgcgccagcctcctggcaagggcctggaatggatcggcgaaatctaccacagcggcagcaccaactacaaccccagcctgaagtccagagtgaccatcagcgtggacaagagcaagaaccagttctccctgaagctgagcagcgtgacagccgccgataccgccgtgtactattgcgtgggcagcccctacggcgactacgtgctggattattggggccagggcaccctcgtgaccgtgtctagtacgcgtatccagaaccctgatcctgccgtgtaccagctgcgggatagcaagagcagcgacaagagcgtgtgtctgttcaccgacttcgacagccagaccaacgtgtcccagagcaaggactccgacgtgtacatcaccgataagtgcgtgctggacatgcggagcatggacttcaagagcaactccgccgtggcctggtccaacaagtccgatttcgcctgcgccaacgccttcaacaacagcattatccccgaggacacattcttcccaagccccgagagcagctgcgacgtgaagctggtggaaaagagcttcgagacagacaccaacctgaacttccagatcctgtacgagatcctgctgggcaaggccaccctgtacgccgtgctggtgtctgccctggtgctgatggctatggtcaagcggaaggacagccgggga

SEQ ID NO: 5722 - DNA, 2688 bp, synthetic construct
  source 1..2688: mol_type = other DNA
atggccttaccagtgaccgccttgctcctgccgctggccttgctgctccacgccgccaggccggaagtgcagctggttgaatctggcggaggactggttcagcctggcggatctctgagactgtcttgtgccgccagcggcttcagcttcagcgacttttggatgagctgggtccgacaggcccctggcaaaggacttgaatgggtcgccacaatcagccaggccggcagcgagaaggactacgtggactctgtgaagggcagattcaccatcagccgggacaacgccaagaagtccctgtacctccagatgaacagcctgagagccgaggacaccgccgtgtactattgtgcctctggcgtgtacagcttcgactacagaggccagggcaccctggtcacagtctcttctggtaccggcggaggcggatctggcggcggaggtagcggtggcggaggatctgaattcgacgagatcgtgctgacacagagccctggcaccctgagcctgtctctgggagagagagccacactgagctgtcgggccagccagtctatcagcagcagcttcctggcctggtatcagcagaagcccggccaggcccctaagctgctgatctacgccgccagcacaagagccaccggcatccccgatagattcagcggctctggcagcggcaccgacttcaccctgaccatcagcagactggaacccgaggacttcgccgtgtactactgccagcagtacggcagaagcctgagcttcggcggaggcaccaaggtggaagtgaagctcgaggacctgaagaacgtgttcccacctgaggtggccgtgttcgagcctagcgaggccgagatcagccacacccagaaagccaccctcgtgtgcctggctaccggcttctaccccgaccatgtggaactgtcttggtgggtcaacggcaaagaggtgcacagcggcgtgtgtaccgacccccagccactgaaagaacagcccgccctgaacgacagccggtactgcctgagcagcagactgagagtgtccgccaccttctggcagaacccccggaaccacttcagatgccaggtgcagttctacggcctgagcgagaacgacgagtggacccaggacagagccaagcccgtgacccagatcgtgtctgccgaagcctggggcagagccgattgcggctttaccagcgagagctaccagcagggcgtgctgagcgccaccaacctgagcgtgatcggcttcagaatcctgctgctgaaagtggccggctttaacctgctgatgaccctgcggctgtggtccagcagggccaagcgatctggatctggagcaacaaacttctcactactcaaacaagcaggtgacgtggaggagaatcccgggcctactagtatggactggatttggcgcatccttttccttgtcggcgctgctaccggcgcgcattccgggccccagctccagctgcaagagtctggacctggcctggtcaagcctagcgagacactgagcctgacctgtaccgtgtccggcgatagcatcagcagcggcgattactactggggctggatcagacagcctcctggcaaaggactggaatggatcggccacatctactacagcggcgtgacctactacaaccccagcctgaagtccagagtgaccatcagcgtggacaccagccggaaccagttctccctgaagctgtctagcgtgacagccgccgataccgccgtgtactactgcaccagagaggacagcagcaactggcggagtagaggccagggaacactggtcacagttagctctggatccggcggaggcggaagtggaggcggaggatctggcggcggaggctctttcgaacaggtgcaactccagcagtctggccccggactcgtgaagcctagccagacactgagcctgacctgcgccatcagcggcgatagcgtgtccggcaatagcgccacctggaactggatcagacagagcccatctcggggcctggaatggctgggccggacctactaccgcagcaagtggaaccacgactacgccgagagcgtgaagtcccggatcaccatcaaccccgacaccagcaagaaccagttctccttgcaactgaacagcgtgacccccgaggacacagccgtgtattattgcgccagaggcgacagcagctcttggtacgccttcgactattggggccagggcaccctcgtgaccgtgtctagtacgcgtatccagaaccctgatcctgccgtgtaccagctgcgggatagcaagagcagcgacaagagcgtgtgtctgttcaccgacttcgacagccagaccaacgtgtcccagagcaaggactccgacgtgtacatcaccgataagtgcgtgctggacatgcggagcatggacttcaagagcaactccgccgtggcctggtccaacaagtccgatttcgcctgcgccaacgccttcaacaacagcattatccccgaggacacattcttcccaagccccgagagcagctgcgacgtgaagctggtggaaaagagcttcgagacagacaccaacctgaacttccagatcctgtacgagatcctgctgggcaaggccaccctgtacgccgtgctggtgtctgccctggtgctgatggctatggtcaagcggaaggacagccgggga

SEQ ID NO: 5723 - DNA, 2685 bp, synthetic construct
  source 1..2685: mol_type = other DNA
atggccttaccagtgaccgccttgctcctgccgctggccttgctgctccacgccgccaggccggaagtgcagctggttgaatctggcggaggactggttcagcctggcggatctctgagactgtcttgtgccgccagcggcttcagcttcagcgacttttggatgagctgggtccgacaggcccctggcaaaggacttgaatgggtcgccacaatcagccaggccggcagcgagaaggactacgtggactctgtgaagggcagattcaccatcagccgggacaacgccaagaagtccctgtacctccagatgaacagcctgagagccgaggacaccgccgtgtactattgtgcctctggcgtgtacagcttcgactacagaggccagggcaccctggtcacagtctcttctggtaccggcggaggcggatctggcggcggaggtagcggtggcggaggatctgaattcgaccagagcgtcgtgacacagcctcctagcgtgtcagtggcccctggcaagaccgccagaatcacctgtggccggaacaacatcggcagcaagagcgtgcactggtatcagcagaagcccggccaggctcctgtgctggtggtgtacgacgacagcgacagacccagcggcatccccgagagattcagcggcagcaactccggcaataccgccaccctgaccatcagcagagtggaagccggcgacgaggccgactactactgccaagtgtgggacagcagcagcgatcacgtggtgtttggcggaggcaccaagctgacagtgctgggtctcgaggacctgaagaacgtgttcccacctgaggtggccgtgttcgagcctagcgaggccgagatcagccacacccagaaagccaccctcgtgtgcctggctaccggcttctaccccgaccatgtggaactgtcttggtgggtcaacggcaaagaggtgcacagcggcgtgtgtaccgacccccagccactgaaagaacagcccgccctgaacgacagccggtactgcctgagcagcagactgagagtgtccgccaccttctggcagaacccccggaaccacttcagatgccaggtgcagttctacggcctgagcgagaacgacgagtggacccaggacagagccaagcccgtgacccagatcgtgtctgccgaagcctggggcagagccgattgcggctttaccagcgagagctaccagcagggcgtgctgagcgccaccaacctgagcgtgatcggcttcagaatcctgctgctgaaagtggccggctttaacctgctgatgaccctgcggctgtggtccagcagggccaagcgatctggatctggagcaacaaacttctcactactcaaacaagcaggtgacgtggaggagaatcccgggcctactagtatggactggatttggcgcatccttttccttgtcggcgctgctaccggcgcgcattccgggccccagctccagctgcaagagtctggacctggcctggtcaagcctagcgagacactgagcctgacctgtaccgtgtccggcgatagcatcagcagcggcgattactactggggctggatcagacagcctcctggcaaaggactggaatggatcggccacatctactacagcggcgtgacctactacaaccccagcctgaagtccagagtgaccatcagcgtggacaccagccggaaccagttctccctgaagctgtctagcgtgacagccgccgataccgccgtgtactactgcaccagagaggacagcagcaactggcggagtagaggccagggaacactggtcacagttagctctggatccggcggaggcggaagtggaggcggaggatctggcggcggaggctctttcgaagtgcaactggtgcagtctggcggaggggtcatgcggcctggcggatctctgagactgtcttgtgccgccagcggcttcaccttcgacgactacggcatgagctgggtgcgccaggcccctggaaaaggcctggaatgggtgtccggcatcaactggaatggcggcagcaccggctacgccgattctgtgcggggcagattcaccatcagccgggacaacgccaagaacagcctgtacctgcagatgaactccctgcgggccgaggacaccgccctgtactattgcgccagagagcggggctacggctaccacgaccctcacgattattggggccagggcacccttgttaccgtgtcctctacgcgtatccagaaccctgatcctgccgtgtaccagctgcgggatagcaagagcagcgacaagagcgtgtgtctgttcaccgacttcgacagccagaccaacgtgtcccagagcaaggactccgacgtgtacatcaccgataagtgcgtgctggacatgcggagcatggacttcaagagcaactccgccgtggcctggtccaacaagtccgatttcgcctgcgccaacgccttcaacaacagcattatccccgaggacacattcttcccaagccccgagagcagctgcgacgtgaagctggtggaaaagagcttcgagacagacaccaacctgaacttccagatcctgtacgagatcctgctgggcaaggccaccctgtacgccgtgctggtgtctgccctggtgctgatggctatggtcaagcggaaggacagccgggga

SEQ ID NO: 5724 - DNA, 2724 bp, synthetic construct
  source 1..2724: mol_type = other DNA
atggccttaccagtgaccgccttgctcctgccgctggccttgctgctccacgccgccaggccggaagtgcagctggttgaatctggcggaggactggttcagcctggcggatctctgagactgtcttgtgccgccagcggcttcagcttcagcgacttttggatgagctgggtccgacaggcccctggcaaaggacttgaatgggtcgccacaatcagccaggccggcagcgagaaggactacgtggactctgtgaagggcagattcaccatcagccgggacaacgccaagaagtccctgtacctccagatgaacagcctgagagccgaggacaccgccgtgtactattgtgcctctggcgtgtacagcttcgactacagaggccagggcaccctggtcacagtctcttctggtaccggcggaggcggatctggcggcggaggtagcggtggcggaggatctgaattcgaacagaaactcatcagtgaagaagacctggaattccaggctgtcgtgacacagcctcctagcgcctctggcacaccaggccagagagtgaccatctcctgtagcggcagcagcagcaacatcggcagcaacaccgtgaactggtatcagcaggtgcccggcaccgctcccaagctgctgatctacagcaacaaccagcggcccagcggcgtgcccgatagattttctggcagcaagagcggcaccagcgccagcctggctatctctggactccagtccgaggacgaggccgactactattgcgccgcctgggacgatagcctgaacggctgggtgttcggcggaggcaccaagctgacagtgctgctcgaggacctgaagaacgtgttcccacctgaggtggccgtgttcgagcctagcgaggccgagatcagccacacccagaaagccaccctcgtgtgcctggctaccggcttctaccccgaccatgtggaactgtcttggtgggtcaacggcaaagaggtgcacagcggcgtgtgtaccgacccccagccactgaaagaacagcccgccctgaacgacagccggtactgcctgagcagcagactgagagtgtccgccaccttctggcagaacccccggaaccacttcagatgccaggtgcagttctacggcctgagcgagaacgacgagtggacccaggacagagccaagcccgtgacccagatcgtgtctgccgaagcctggggcagagccgattgcggctttaccagcgagagctaccagcagggcgtgctgagcgccaccaacctgagcgtgatcggcttcagaatcctgctgctgaaagtggccggctttaacctgctgatgaccctgcggctgtggtccagcagggccaagcgatctggatctggagcaacaaacttctcactactcaaacaagcaggtgacgtggaggagaatcccgggcctactagtatggactggatttggcgcatccttttccttgtcggcgctgctaccggcgcgcattccgggccccagctccagctgcaagagtctggacctggcctggtcaagcctagcgagacactgagcctgacctgtaccgtgtccggcgatagcatcagcagcggcgattactactggggctggatcagacagcctcctggcaaaggactggaatggatcggccacatctactacagcggcgtgacctactacaaccccagcctgaagtccagagtgaccatcagcgtggacaccagccggaaccagttctccctgaagctgtctagcgtgacagccgccgataccgccgtgtactactgcaccagagaggacagcagcaactggcggagtagaggccagggaacactggtcacagttagctctggatccggcggaggcggaagtggaggcggaggatctggcggcggaggctctttcgaacagatgcaactggtgcagagcggagccgaagtgaaagagcctggcgagagcctgcggatctcctgcaagggcagcggctacagcttcaccaatttctggatctcttgggtgcgccagatgcccggcaagggcctggaatggatgggcagagtggaccccggctactcctacagcacctacagccctagcttccagggccacgtgaccatcagcgccgacaagagcaccagcaccgcctacctccagtggaacagcctgaaggccagcgacaccgccatgtactactgcgccagagtgcagtacagcggctattacgattggttcgacccctggggccagggcacactcgtgacagtgtcaagcacgcgtatccagaaccctgatcctgccgtgtaccagctgcgggatagcaagagcagcgacaagagcgtgtgtctgttcaccgacttcgacagccagaccaacgtgtcccagagcaaggactccgacgtgtacatcaccgataagtgcgtgctggacatgcggagcatggacttcaagagcaactccgccgtggcctggtccaacaagtccgatttcgcctgcgccaacgccttcaacaacagcattatccccgaggacacattcttcccaagccccgagagcagctgcgacgtgaagctggtggaaaagagcttcgagacagacaccaacctgaacttccagatcctgtacgagatcctgctgggcaaggccaccctgtacgccgtgctggtgtctgccctggtgctgatggctatggtcaagcggaaggacagccgggga

SEQ ID NO: 5725 - DNA, 2706 bp, synthetic construct
  source 1..2706: mol_type = other DNA
atggccttaccagtgaccgccttgctcctgccgctggccttgctgctccacgccgccaggccggaagtgcagctggttgaatctggcggaggactggttcagcctggcggatctctgagactgtcttgtgccgccagcggcttcagcttcagcgacttttggatgagctgggtccgacaggcccctggcaaaggacttgaatgggtcgccacaatcagccaggccggcagcgagaaggactacgtggactctgtgaagggcagattcaccatcagccgggacaacgccaagaagtccctgtacctccagatgaacagcctgagagccgaggacaccgccgtgtactattgtgcctctggcgtgtacagcttcgactacagaggccagggcaccctggtcacagtctcttctggtaccggcggaggcggatctggcggcggaggtagcggtggcggaggatctgaattcgaacagaaactcatcagtgaagaagacctggaattcgacatccagatgacccagagccccagcacactgagcgccagcgtgggcgacagagtgaccatcacctgtcgggccagccagaacatcaacaagtggctggcctggtatcagcagaggcccggaaaagccccccagctgctgatctacaaggccagcagcctggaaagcggcgtgcccagcagattttctggcagcggctctggcaccgagtacaccctgaccatcagctccctccagcccgacgacttcgccacctactactgccagcagtacaacagctacgccaccttcggccagggcaccaaggtggaaatcaagagactcgaggacctgaagaacgtgttcccacctgaggtggccgtgttcgagcctagcgaggccgagatcagccacacccagaaagccaccctcgtgtgcctggctaccggcttctaccccgaccatgtggaactgtcttggtgggtcaacggcaaagaggtgcacagcggcgtgtgtaccgacccccagccactgaaagaacagcccgccctgaacgacagccggtactgcctgagcagcagactgagagtgtccgccaccttctggcagaacccccggaaccacttcagatgccaggtgcagttctacggcctgagcgagaacgacgagtggacccaggacagagccaagcccgtgacccagatcgtgtctgccgaagcctggggcagagccgattgcggctttaccagcgagagctaccagcagggcgtgctgagcgccaccaacctgagcgtgatcggcttcagaatcctgctgctgaaagtggccggctttaacctgctgatgaccctgcggctgtggtccagcagggccaagcgatctggatctggagcaacaaacttctcactactcaaacaagcaggtgacgtggaggagaatcccgggcctactagtatggactggatttggcgcatccttttccttgtcggcgctgctaccggcgcgcattccgggccccagctccagctgcaagagtctggacctggcctggtcaagcctagcgagacactgagcctgacctgtaccgtgtccggcgatagcatcagcagcggcgattactactggggctggatcagacagcctcctggcaaaggactggaatggatcggccacatctactacagcggcgtgacctactacaaccccagcctgaagtccagagtgaccatcagcgtggacaccagccggaaccagttctccctgaagctgtctagcgtgacagccgccgataccgccgtgtactactgcaccagagaggacagcagcaactggcggagtagaggccagggaacactggtcacagttagctctggatccggcggaggcggaagtggaggcggaggatctggcggcggaggctctttcgaacaggtgcagctggtgcagtctggggccgaagtgaagaagcctggcgagagcctgaagatcagctgcaagggctccggctacaacttctctaacaagtggatcggctgggtgcgccagctgcctggcagaggactggaatggatcgccatcatctaccccggctacagcgacatcacctacagccccagcttccagggccgcgtgacaatcagcgccgacaccagcatcaacaccgcctacctgcactggcacagcctgaaggccagcgacaccgccatgtactactgcgtgcggcatacagccctggctggcttcgattattggggcctgggcaccctcgtgaccgtgtctagtacgcgtatccagaaccctgatcctgccgtgtaccagctgcgggatagcaagagcagcgacaagagcgtgtgtctgttcaccgacttcgacagccagaccaacgtgtcccagagcaaggactccgacgtgtacatcaccgataagtgcgtgctggacatgcggagcatggacttcaagagcaactccgccgtggcctggtccaacaagtccgatttcgcctgcgccaacgccttcaacaacagcattatccccgaggacacattcttcccaagccccgagagcagctgcgacgtgaagctggtggaaaagagcttcgagacagacaccaacctgaacttccagatcctgtacgagatcctgctgggcaaggccaccctgtacgccgtgctggtgtctgccctggtgctgatggctatggtcaagcggaaggacagccgggga

SEQ ID NO: 5726 - DNA, 2679 bp, synthetic construct
  source 1..2679: mol_type = other DNA
atggccttaccagtgaccgccttgctcctgccgctggccttgctgctccacgccgccaggccggaagtgcagctggttgaatctggcggaggactggttcagcctggcggatctctgagactgtcttgtgccgccagcggcttcagcttcagcgacttttggatgagctgggtccgacaggcccctggcaaaggacttgaatgggtcgccacaatcagccaggccggcagcgagaaggactacgtggactctgtgaagggcagattcaccatcagccgggacaacgccaagaagtccctgtacctccagatgaacagcctgagagccgaggacaccgccgtgtactattgtgcctctggcgtgtacagcttcgactacagaggccagggcaccctggtcacagtctcttctggtaccggcggaggcggatctggcggcggaggtagcggtggcggaggatctgaattcatcgtgctgacacagagccctgcttctctggccgtgtctctgggacagagagccaccatcagctgtagagccagcgagagcgtggacaactacggcaacaccttcatgcactggtatcagcagaagcccggccagcctcctaagctgctgatctacagagccagcaacctggaaagcggcatccccgccagattttctggcagcggcagcagaaccgacttcaccctgaccatcaatcccgtggaagccgacgacgtggcaacctactactgccagcagagcaacgaggaccctcctacatttggagccggcaccaagctggaactgaaactcgaggacctgaagaacgtgttcccacctgaggtggccgtgttcgagcctagcgaggccgagatcagccacacccagaaagccaccctcgtgtgcctggctaccggcttctaccccgaccatgtggaactgtcttggtgggtcaacggcaaagaggtgcacagcggcgtgtgtaccgacccccagccactgaaagaacagcccgccctgaacgacagccggtactgcctgagcagcagactgagagtgtccgccaccttctggcagaacccccggaaccacttcagatgccaggtgcagttctacggcctgagcgagaacgacgagtggacccaggacagagccaagcccgtgacccagatcgtgtctgccgaagcctggggcagagccgattgcggctttaccagcgagagctaccagcagggcgtgctgagcgccaccaacctgagcgtgatcggcttcagaatcctgctgctgaaagtggccggctttaacctgctgatgaccctgcggctgtggtccagcagggccaagcgatctggatctggagcaacaaacttctcactactcaaacaagcaggtgacgtggaggagaatcccgggcctactagtatggactggatttggcgcatccttttccttgtcggcgctgctaccggcgcgcattccgggccccagctccagctgcaagagtctggacctggcctggtcaagcctagcgagacactgagcctgacctgtaccgtgtccggcgatagcatcagcagcggcgattactactggggctggatcagacagcctcctggcaaaggactggaatggatcggccacatctactacagcggcgtgacctactacaaccccagcctgaagtccagagtgaccatcagcgtggacaccagccggaaccagttctccctgaagctgtctagcgtgacagccgccgataccgccgtgtactactgcaccagagaggacagcagcaactggcggagtagaggccagggaacactggtcacagttagctctggatccggcggaggcggaagtggaggcggaggatctggcggcggaggctctttcgaacagattcagctggtgcagtctggccccgagctgaagaaacctggcgagacagtgaagatcagctgcaaggccagcggctacatcttcaccaattacggcatgaactgggtcaagcaggcccctggcaagagcttcaagtggatgggctggatcaacacctacaccggcgagagcacatacagcgccgacttcaagggcagattcgccttcagcctggaaaccagcgccagcacagcctacctgcacatcaacgacctgaagaacgaggacaccgccacctacttttgcgccagaagcggcggctacgaccctatggattattggggccagggcaccagcgtgaccgtttcttctacgcgtatccagaaccctgatcctgccgtgtaccagctgcgggatagcaagagcagcgacaagagcgtgtgtctgttcaccgacttcgacagccagaccaacgtgtcccagagcaaggactccgacgtgtacatcaccgataagtgcgtgctggacatgcggagcatggacttcaagagcaactccgccgtggcctggtccaacaagtccgatttcgcctgcgccaacgccttcaacaacagcattatccccgaggacacattcttcccaagccccgagagcagctgcgacgtgaagctggtggaaaagagcttcgagacagacaccaacctgaacttccagatcctgtacgagatcctgctgggcaaggccaccctgtacgccgtgctggtgtctgccctggtgctgatggctatggtcaagcggaaggacagccgggga

SEQ ID NO: 5727 - DNA, 2676 bp, synthetic construct
  source 1..2676: mol_type = other DNA
atggccttaccagtgaccgccttgctcctgccgctggccttgctgctccacgccgccaggccggaagtgcagctggttgaatctggcggaggactggttcagcctggcggatctctgagactgtcttgtgccgccagcggcttcagcttcagcgacttttggatgagctgggtccgacaggcccctggcaaaggacttgaatgggtcgccacaatcagccaggccggcagcgagaaggactacgtggactctgtgaagggcagattcaccatcagccgggacaacgccaagaagtccctgtacctccagatgaacagcctgagagccgaggacaccgccgtgtactattgtgcctctggcgtgtacagcttcgactacagaggccagggcaccctggtcacagtctcttctggtaccggcggaggcggatctggcggcggaggtagcggtggcggaggatctgaattcgagatcgtgctgacacagagccctggcaccctgagcctgtctccaggcgaaagagccacactgagctgtcgggccagccagagcgtgtccaatacctacctggcctggtatcaccagaggcccggacaggctccccggctgctgatctatggcgcttctagcagagccaccggcatccccgatagattcagcggctctggcagcggcaccgacttcgccctgacaatcagctccctggaacccgaggacttcgccgtgtactactgccagcagtacagcaactcctggaccttcggccagggcaccaaggtggaaatcaagagactcgaggacctgaagaacgtgttcccacctgaggtggccgtgttcgagcctagcgaggccgagatcagccacacccagaaagccaccctcgtgtgcctggctaccggcttctaccccgaccatgtggaactgtcttggtgggtcaacggcaaagaggtgcacagcggcgtgtgtaccgacccccagccactgaaagaacagcccgccctgaacgacagccggtactgcctgagcagcagactgagagtgtccgccaccttctggcagaacccccggaaccacttcagatgccaggtgcagttctacggcctgagcgagaacgacgagtggacccaggacagagccaagcccgtgacccagatcgtgtctgccgaagcctggggcagagccgattgcggctttaccagcgagagctaccagcagggcgtgctgagcgccaccaacctgagcgtgatcggcttcagaatcctgctgctgaaagtggccggctttaacctgctgatgaccctgcggctgtggtccagcagggccaagcgatctggatctggagcaacaaacttctcactactcaaacaagcaggtgacgtggaggagaatcccgggcctactagtatggactggatttggcgcatccttttccttgtcggcgctgctaccggcgcgcattccgggccccagctccagctgcaagagtctggacctggcctggtcaagcctagcgagacactgagcctgacctgtaccgtgtccggcgatagcatcagcagcggcgattactactggggctggatcagacagcctcctggcaaaggactggaatggatcggccacatctactacagcggcgtgacctactacaaccccagcctgaagtccagagtgaccatcagcgtggacaccagccggaaccagttctccctgaagctgtctagcgtgacagccgccgataccgccgtgtactactgcaccagagaggacagcagcaactggcggagtagaggccagggaacactggtcacagttagctctggatccggcggaggcggaagtggaggcggaggatctggcggcggaggctctttcgaacaggtgcaactggtggaatctggcgggggagtggtgcagcctggcagaagcctgagactgtcttgtgccgccagcggcttcaccttcagcagctacgacatgcactgggtgcgccaggcccctggcaaaggactggaatgggtggccgtgatctcctacgacggcaccaacgagtattacgccgacagcgtgaagggccggttcaccatctccagagacaccagcaagaacaccctgtacctccagatgaacagcctgcgggccgaggacacagccgtgtattattgcgccagagagcggtacttcgactggtccttcgactactggggccagggaaccctggtgtccgtgtctagtacgcgtatccagaaccctgatcctgccgtgtaccagctgcgggatagcaagagcagcgacaagagcgtgtgtctgttcaccgacttcgacagccagaccaacgtgtcccagagcaaggactccgacgtgtacatcaccgataagtgcgtgctggacatgcggagcatggacttcaagagcaactccgccgtggcctggtccaacaagtccgatttcgcctgcgccaacgccttcaacaacagcattatccccgaggacacattcttcccaagccccgagagcagctgcgacgtgaagctggtggaaaagagcttcgagacagacaccaacctgaacttccagatcctgtacgagatcctgctgggcaaggccaccctgtacgccgtgctggtgtctgccctggtgctgatggctatggtcaagcggaaggacagccgggga

SEQ ID NO: 5728 - DNA, 2673 bp, synthetic construct
  source 1..2673: mol_type = other DNA
atggccttaccagtgaccgccttgctcctgccgctggccttgctgctccacgccgccaggccggaagtgcagctggttgaatctggcggaggactggttcagcctggcggatctctgagactgtcttgtgccgccagcggcttcagcttcagcgacttttggatgagctgggtccgacaggcccctggcaaaggacttgaatgggtcgccacaatcagccaggccggcagcgagaaggactacgtggactctgtgaagggcagattcaccatcagccgggacaacgccaagaagtccctgtacctccagatgaacagcctgagagccgaggacaccgccgtgtactattgtgcctctggcgtgtacagcttcgactacagaggccagggcaccctggtcacagtctcttctggtaccggcggaggcggatctggcggcggaggtagcggtggcggaggatctgaattcgagctgacacaggaccctgctgtgtctgttgccctgggccagacagtgcggattacctgtcaaggcgacagcctgagaagcaactacgccaactggtatcagcagaagcccggacaggctcccgtgctggttatctacggccagaacaacagacccagcggcatccccgatagattcagcggctctagctctggcaataccgccagcctgacaatcactggcgctcaggctgccgatgaggccgactactactgcgatagcagagtgtccaccggcaatcacgtggtgtttggcggcggaacaaagctgacagtgctcggacaactcgaggacctgaagaacgtgttcccacctgaggtggccgtgttcgagcctagcgaggccgagatcagccacacccagaaagccaccctcgtgtgcctggctaccggcttctaccccgaccatgtggaactgtcttggtgggtcaacggcaaagaggtgcacagcggcgtgtgtaccgacccccagccactgaaagaacagcccgccctgaacgacagccggtactgcctgagcagcagactgagagtgtccgccaccttctggcagaacccccggaaccacttcagatgccaggtgcagttctacggcctgagcgagaacgacgagtggacccaggacagagccaagcccgtgacccagatcgtgtctgccgaagcctggggcagagccgattgcggctttaccagcgagagctaccagcagggcgtgctgagcgccaccaacctgagcgtgatcggcttcagaatcctgctgctgaaagtggccggctttaacctgctgatgaccctgcggctgtggtccagcagggccaagcgatctggatctggagcaacaaacttctcactactcaaacaagcaggtgacgtggaggagaatcccgggcctactagtatggactggatttggcgcatccttttccttgtcggcgctgctaccggcgcgcattccgggccccagctccagctgcaagagtctggacctggcctggtcaagcctagcgagacactgagcctgacctgtaccgtgtccggcgatagcatcagcagcggcgattactactggggctggatcagacagcctcctggcaaaggactggaatggatcggccacatctactacagcggcgtgacctactacaaccccagcctgaagtccagagtgaccatcagcgtggacaccagccggaaccagttctccctgaagctgtctagcgtgacagccgccgataccgccgtgtactactgcaccagagaggacagcagcaactggcggagtagaggccagggaacactggtcacagttagctctggatccggcggaggcggaagtggaggcggaggatctggcggcggaggctctttcgaagaagttcagctggtgcagagcggagccgaagtgaagaaacctggggcctctgtgaaggtgtcctgcaaggcttccggctacacctttaccagctacgccatgcactgggtccgacaggcacctggacaacggcttgaatggatgggctggatcaacgccggcaacggcaacaccaagtacagccagaaattccagggccgcgtgaccatcaccagagatacaagcgccagcaccgcctacatggaactgtctagcctgagatccgaggacaccgccgtgtactactgtgccagagacatcagctacggcagcttcgactattggggccagggcacactggtcaccgttagctctacgcgtatccagaaccctgatcctgccgtgtaccagctgcgggatagcaagagcagcgacaagagcgtgtgtctgttcaccgacttcgacagccagaccaacgtgtcccagagcaaggactccgacgtgtacatcaccgataagtgcgtgctggacatgcggagcatggacttcaagagcaactccgccgtggcctggtccaacaagtccgatttcgcctgcgccaacgccttcaacaacagcattatccccgaggacacattcttcccaagccccgagagcagctgcgacgtgaagctggtggaaaagagcttcgagacagacaccaacctgaacttccagatcctgtacgagatcctgctgggcaaggccaccctgtacgccgtgctggtgtctgccctggtgctgatggctatggtcaagcggaaggacagccgggga

SEQ ID NO: 5729 - DNA, 2679 bp, synthetic construct
  source 1..2679: mol_type = other DNA
atggccttaccagtgaccgccttgctcctgccgctggccttgctgctccacgccgccaggccggaagtgcagctggttgaatctggcggaggactggttcagcctggcggatctctgagactgtcttgtgccgccagcggcttcagcttcagcgacttttggatgagctgggtccgacaggcccctggcaaaggacttgaatgggtcgccacaatcagccaggccggcagcgagaaggactacgtggactctgtgaagggcagattcaccatcagccgggacaacgccaagaagtccctgtacctccagatgaacagcctgagagccgaggacaccgccgtgtactattgtgcctctggcgtgtacagcttcgactacagaggccagggcaccctggtcacagtctcttctggtaccggcggaggcggatctggcggcggaggtagcggtggcggaggatctgaattcgacatcgtgctgacacagacaccagccacactgagcgtgacacctggcgattctgtgtccctgagctgtagagccagccagagcatcagcaacaacctgcactggtatcagcagaagtcccacgagagccccagactgctgattaagaacgccagccagtctatcagcggcatccccagcaagtttagcggctctggcagcggcaccgacttcaccctgagaatcaacagcgtggaaaccgaggacttcgggatgtacttctgccagcagagcaatagctggccctacacatttggctccggcaccaagctggaaatcaaactcgaggacctgaagaacgtgttcccacctgaggtggccgtgttcgagcctagcgaggccgagatcagccacacccagaaagccaccctcgtgtgcctggctaccggcttctaccccgaccatgtggaactgtcttggtgggtcaacggcaaagaggtgcacagcggcgtgtgtaccgacccccagccactgaaagaacagcccgccctgaacgacagccggtactgcctgagcagcagactgagagtgtccgccaccttctggcagaacccccggaaccacttcagatgccaggtgcagttctacggcctgagcgagaacgacgagtggacccaggacagagccaagcccgtgacccagatcgtgtctgccgaagcctggggcagagccgattgcggctttaccagcgagagctaccagcagggcgtgctgagcgccaccaacctgagcgtgatcggcttcagaatcctgctgctgaaagtggccggctttaacctgctgatgaccctgcggctgtggtccagcagggccaagcgatctggatctggagcaacaaacttctcactactcaaacaagcaggtgacgtggaggagaatcccgggcctactagtatggactggatttggcgcatccttttccttgtcggcgctgctaccggcgcgcattccgggccccagctccagctgcaagagtctggacctggcctggtcaagcctagcgagacactgagcctgacctgtaccgtgtccggcgatagcatcagcagcggcgattactactggggctggatcagacagcctcctggcaaaggactggaatggatcggccacatctactacagcggcgtgacctactacaaccccagcctgaagtccagagtgaccatcagcgtggacaccagccggaaccagttctccctgaagctgtctagcgtgacagccgccgataccgccgtgtactactgcaccagagaggacagcagcaactggcggagtagaggccagggaacactggtcacagttagctctggatccggcggaggcggaagtggaggcggaggatctggcggcggaggctctttcgaacaagtgaagctgcaacagagcggacccgagctggttaagccaggcgcttccgtgaagattagctgcaaggccagcggctacagcttcaccggctactacatgcactgggtcaagcagagccacggcaacatcctggactggatcggctacatctacccctacaacggcgtgtccagctacaaccagaagttcaagggcaaagccactctgaccgtggacaagagcagcagcaccgcctacatggaactgagaagcctgaccagcgaggacagcgccgtgtactattgtgccagagagcggggcctgtaccagctcagagcaatggattattggggccagggcaccagcgtgaccgtttcttctacgcgtatccagaaccctgatcctgccgtgtaccagctgcgggatagcaagagcagcgacaagagcgtgtgtctgttcaccgacttcgacagccagaccaacgtgtcccagagcaaggactccgacgtgtacatcaccgataagtgcgtgctggacatgcggagcatggacttcaagagcaactccgccgtggcctggtccaacaagtccgatttcgcctgcgccaacgccttcaacaacagcattatccccgaggacacattcttcccaagccccgagagcagctgcgacgtgaagctggtggaaaagagcttcgagacagacaccaacctgaacttccagatcctgtacgagatcctgctgggcaaggccaccctgtacgccgtgctggtgtctgccctggtgctgatggctatggtcaagcggaaggacagccgggga

SEQ ID NO: 5730 - DNA, 2652 bp, synthetic construct
  source 1..2652: mol_type = other DNA
atggccttaccagtgaccgccttgctcctgccgctggccttgctgctccacgccgccaggccggaagtgcagctggttgaatctggcggaggactggttcagcctggcggatctctgagactgtcttgtgccgccagcggcttcagcttcagcgacttttggatgagctgggtccgacaggcccctggcaaaggacttgaatgggtcgccacaatcagccaggccggcagcgagaaggactacgtggactctgtgaagggcagattcaccatcagccgggacaacgccaagaagtccctgtacctccagatgaacagcctgagagccgaggacaccgccgtgtactattgtgcctctggcgtgtacagcttcgactacagaggccagggcaccctggtcacagtctcttctggtaccggcggaggcggatctggcggcggaggtagcggtggcggaggatctgaattcgacatcgtgatgacacagacccctgccatcatgagcgcctctccaggccagaaagtgaccatcacatgtagcgccagcagcagcgtgaactacatgcactggtatcagcagaagctgggcagcagccccaagctgtggatctacgataccagcaaactggcccctggcgtgccagccagattttctggttctggcagcggcaccagctacagcctgacaatcagcagcatggaagccgaggatgccgccagctacttctgccatcagtggtctagctacccctacacctttggctccggcaccaagctggaaatcaaactcgaggacctgaagaacgtgttcccacctgaggtggccgtgttcgagcctagcgaggccgagatcagccacacccagaaagccaccctcgtgtgcctggctaccggcttctaccccgaccatgtggaactgtcttggtgggtcaacggcaaagaggtgcacagcggcgtgtgtaccgacccccagccactgaaagaacagcccgccctgaacgacagccggtactgcctgagcagcagactgagagtgtccgccaccttctggcagaacccccggaaccacttcagatgccaggtgcagttctacggcctgagcgagaacgacgagtggacccaggacagagccaagcccgtgacccagatcgtgtctgccgaagcctggggcagagccgattgcggctttaccagcgagagctaccagcagggcgtgctgagcgccaccaacctgagcgtgatcggcttcagaatcctgctgctgaaagtggccggctttaacctgctgatgaccctgcggctgtggtccagcagggccaagcgatctggatctggagcaacaaacttctcactactcaaacaagcaggtgacgtggaggagaatcccgggcctactagtatggactggatttggcgcatccttttccttgtcggcgctgctaccggcgcgcattccgggccccagctccagctgcaagagtctggacctggcctggtcaagcctagcgagacactgagcctgacctgtaccgtgtccggcgatagcatcagcagcggcgattactactggggctggatcagacagcctcctggcaaaggactggaatggatcggccacatctactacagcggcgtgacctactacaaccccagcctgaagtccagagtgaccatcagcgtggacaccagccggaaccagttctccctgaagctgtctagcgtgacagccgccgataccgccgtgtactactgcaccagagaggacagcagcaactggcggagtagaggccagggaacactggtcacagttagctctggatccggcggaggcggaagtggaggcggaggatctggcggcggaggctctttcgaagaagttcagctccaagagtctggccccgacctggtcaagcctagccaaagcctgagcctgacctgtaccgtgaccggctacagcatcacaagcggctatggatggcactggatcagacagttccccggcaacaaactggaatggatgggctacatccactacagcggcagcaccacctacaatcccagcctgaagtcccggatcagcatcagcagagacaccagcaagaaccagttcttcctgcaactgaacagcgtgaccaccgaggacaccgccacctactattgtgctcggagcctgagatattggggccagggcacaaccctgaccgtgtcatctacgcgtatccagaaccctgatcctgccgtgtaccagctgcgggatagcaagagcagcgacaagagcgtgtgtctgttcaccgacttcgacagccagaccaacgtgtcccagagcaaggactccgacgtgtacatcaccgataagtgcgtgctggacatgcggagcatggacttcaagagcaactccgccgtggcctggtccaacaagtccgatttcgcctgcgccaacgccttcaacaacagcattatccccgaggacacattcttcccaagccccgagagcagctgcgacgtgaagctggtggaaaagagcttcgagacagacaccaacctgaacttccagatcctgtacgagatcctgctgggcaaggccaccctgtacgccgtgctggtgtctgccctggtgctgatggctatggtcaagcggaaggacagccgggga

SEQ ID NO: 5731 - DNA, 2661 bp, synthetic construct
  source 1..2661: mol_type = other DNA
atggccttaccagtgaccgccttgctcctgccgctggccttgctgctccacgccgccaggccggaagtgcagctggttgaatctggcggaggactggttcagcctggcggatctctgagactgtcttgtgccgccagcggcttcagcttcagcgacttttggatgagctgggtccgacaggcccctggcaaaggacttgaatgggtcgccacaatcagccaggccggcagcgagaaggactacgtggactctgtgaagggcagattcaccatcagccgggacaacgccaagaagtccctgtacctccagatgaacagcctgagagccgaggacaccgccgtgtactattgtgcctctggcgtgtacagcttcgactacagaggccagggcaccctggtcacagtctcttctggtaccggcggaggcggatctggcggcggaggtagcggtggcggaggatctgaattcgacatccagatgacacagagccctagcagcctgtctgccagcgtgggagacagagtgaccatcacctgtagcgccaccagcagcatcagctacatgcactggtatcagcagaagcccggcaaggcccctaaaggctggatctacgataccagcaaactggcccacggcgtgcccagcagattttctggttctggcagcggcaccgacttcaccctgacaatatctagcctccagcctgaggacttcgccacctactactgccaccagagaagaagctaccccttcaccttcggccagggcaccaaggtggaaatcaaactcgaggacctgaagaacgtgttcccacctgaggtggccgtgttcgagcctagcgaggccgagatcagccacacccagaaagccaccctcgtgtgcctggctaccggcttctaccccgaccatgtggaactgtcttggtgggtcaacggcaaagaggtgcacagcggcgtgtgtaccgacccccagccactgaaagaacagcccgccctgaacgacagccggtactgcctgagcagcagactgagagtgtccgccaccttctggcagaacccccggaaccacttcagatgccaggtgcagttctacggcctgagcgagaacgacgagtggacccaggacagagccaagcccgtgacccagatcgtgtctgccgaagcctggggcagagccgattgcggctttaccagcgagagctaccagcagggcgtgctgagcgccaccaacctgagcgtgatcggcttcagaatcctgctgctgaaagtggccggctttaacctgctgatgaccctgcggctgtggtccagcagggccaagcgatctggatctggagcaacaaacttctcactactcaaacaagcaggtgacgtggaggagaatcccgggcctactagtatggactggatttggcgcatccttttccttgtcggcgctgctaccggcgcgcattccgggccccagctccagctgcaagagtctggacctggcctggtcaagcctagcgagacactgagcctgacctgtaccgtgtccggcgatagcatcagcagcggcgattactactggggctggatcagacagcctcctggcaaaggactggaatggatcggccacatctactacagcggcgtgacctactacaaccccagcctgaagtccagagtgaccatcagcgtggacaccagccggaaccagttctccctgaagctgtctagcgtgacagccgccgataccgccgtgtactactgcaccagagaggacagcagcaactggcggagtagaggccagggaacactggtcacagttagctctggatccggcggaggcggaagtggaggcggaggatctggcggcggaggctctttcgaagaagtgcaactggttcagagcggagccgaagtgaagaaacctggggcctctgtgaaggtgtcctgcaaggcttccggctacacctttaccaatttctggattcactgggtccgacaggctccaggccaaggactggaatggatcggagagatcgaccccagcgacagctacaccaactacaaccagaaattcaaaggccgggtcaccatcaccagagacaccagcacaagcaccgcctacctggaactgagcagcctgagaagcgaggacaccgccgtgtactactgcgccagggaaatcaccaccgtggattattggggccagggaaccctggtcaccgtgtcatctacgcgtatccagaaccctgatcctgccgtgtaccagctgcgggatagcaagagcagcgacaagagcgtgtgtctgttcaccgacttcgacagccagaccaacgtgtcccagagcaaggactccgacgtgtacatcaccgataagtgcgtgctggacatgcggagcatggacttcaagagcaactccgccgtggcctggtccaacaagtccgatttcgcctgcgccaacgccttcaacaacagcattatccccgaggacacattcttcccaagccccgagagcagctgcgacgtgaagctggtggaaaagagcttcgagacagacaccaacctgaacttccagatcctgtacgagatcctgctgggcaaggccaccctgtacgccgtgctggtgtctgccctggtgctgatggctatggtcaagcggaaggacagccgggga

SEQ ID NO: 5732 - DNA, 2682 bp, synthetic construct
  source 1..2682: mol_type = other DNA
atggccttaccagtgaccgccttgctcctgccgctggccttgctgctccacgccgccaggccggaagtgcagctggttgaatctggcggaggactggttcagcctggcggatctctgagactgtcttgtgccgccagcggcttcagcttcagcgacttttggatgagctgggtccgacaggcccctggcaaaggacttgaatgggtcgccacaatcagccaggccggcagcgagaaggactacgtggactctgtgaagggcagattcaccatcagccgggacaacgccaagaagtccctgtacctccagatgaacagcctgagagccgaggacaccgccgtgtactattgtgcctctggcgtgtacagcttcgactacagaggccagggcaccctggtcacagtctcttctggtaccggcggaggcggatctggcggcggaggtagcggtggcggaggatctgaattcgacatccagatgacacagagccctagcagcctgtctgccagcgtgggagacagagtgaccatcacatgcaaggccagccagggcttcaacaaatacgtggcctggtatcagcagaagcccggcaaggctcctaagctgctgatctactacaccagcacactccagcctggcgtgcccagcagattttctggctctggcagcggcagagactacaccctgacaatatccagcctccagccagaggacttcgccacctactactgtctccagtacggcaacctgctgtacgcctttggacagggcaccaaggtggaaatcaagagactcgaggacctgaagaacgtgttcccacctgaggtggccgtgttcgagcctagcgaggccgagatcagccacacccagaaagccaccctcgtgtgcctggctaccggcttctaccccgaccatgtggaactgtcttggtgggtcaacggcaaagaggtgcacagcggcgtgtgtaccgacccccagccactgaaagaacagcccgccctgaacgacagccggtactgcctgagcagcagactgagagtgtccgccaccttctggcagaacccccggaaccacttcagatgccaggtgcagttctacggcctgagcgagaacgacgagtggacccaggacagagccaagcccgtgacccagatcgtgtctgccgaagcctggggcagagccgattgcggctttaccagcgagagctaccagcagggcgtgctgagcgccaccaacctgagcgtgatcggcttcagaatcctgctgctgaaagtggccggctttaacctgctgatgaccctgcggctgtggtccagcagggccaagcgatctggatctggagcaacaaacttctcactactcaaacaagcaggtgacgtggaggagaatcccgggcctactagtatggactggatttggcgcatccttttccttgtcggcgctgctaccggcgcgcattccgggccccagctccagctgcaagagtctggacctggcctggtcaagcctagcgagacactgagcctgacctgtaccgtgtccggcgatagcatcagcagcggcgattactactggggctggatcagacagcctcctggcaaaggactggaatggatcggccacatctactacagcggcgtgacctactacaaccccagcctgaagtccagagtgaccatcagcgtggacaccagccggaaccagttctccctgaagctgtctagcgtgacagccgccgataccgccgtgtactactgcaccagagaggacagcagcaactggcggagtagaggccagggaacactggtcacagttagctctggatccggcggaggcggaagtggaggcggaggatctggcggcggaggctctttcgaagaagttcagcttgtgcagagcggagccgaagtgaagaaacctggggcctctgtgaaggtgtcctgcaaagccagcggctacacctttaccagctactggatcggctgggtccgacaggctcctggacaaggactggaatggatcggcgacatctatcccggcggaggctacaccaactacaacgagaagttcaagggccgcgtgacaatcaccagagacacctctacaagcaccgcctacctggaactgagcagcctgagaagcgaggacaccgccgtgtactactgcgccagactggatggcagcagctacagaggcgctatggattcttggggccagggcacactggtcaccgtttcttctacgcgtatccagaaccctgatcctgccgtgtaccagctgcgggatagcaagagcagcgacaagagcgtgtgtctgttcaccgacttcgacagccagaccaacgtgtcccagagcaaggactccgacgtgtacatcaccgataagtgcgtgctggacatgcggagcatggacttcaagagcaactccgccgtggcctggtccaacaagtccgatttcgcctgcgccaacgccttcaacaacagcattatccccgaggacacattcttcccaagccccgagagcagctgcgacgtgaagctggtggaaaagagcttcgagacagacaccaacctgaacttccagatcctgtacgagatcctgctgggcaaggccaccctgtacgccgtgctggtgtctgccctggtgctgatggctatggtcaagcggaaggacagccgggga

SEQ ID NO: 5733 - DNA, 2670 bp, synthetic construct
  source 1..2670: mol_type = other DNA
atggccttaccagtgaccgccttgctcctgccgctggccttgctgctccacgccgccaggccggaagtgcagctggttgaatctggcggaggactggttcagcctggcggatctctgagactgtcttgtgccgccagcggcttcagcttcagcgacttttggatgagctgggtccgacaggcccctggcaaaggacttgaatgggtcgccacaatcagccaggccggcagcgagaaggactacgtggactctgtgaagggcagattcaccatcagccgggacaacgccaagaagtccctgtacctccagatgaacagcctgagagccgaggacaccgccgtgtactattgtgcctctggcgtgtacagcttcgactacagaggccagggcaccctggtcacagtctcttctggtaccggcggaggcggatctggcggcggaggtagcggtggcggaggatctgaattcgacatccagatgacacagagccctagcagcctgtctgccagcgtgggagacagagtgaccatcacctgtagagccagccaggacatccggtactacctgaactggtatcagcagaagcccggcaaggcccctaagctgctgatctatgtggcctccagcctccagagcggagtgccttctagattttctggcagcggctccggcaccgagtttaccctgacagtgtctagcttgcagcccgaggacttcgccacctactactgcctgcaagtgtacagcacccctcggacctttggacagggcaccaaggtggaaatcaaactcgaggacctgaagaacgtgttcccacctgaggtggccgtgttcgagcctagcgaggccgagatcagccacacccagaaagccaccctcgtgtgcctggctaccggcttctaccccgaccatgtggaactgtcttggtgggtcaacggcaaagaggtgcacagcggcgtgtgtaccgacccccagccactgaaagaacagcccgccctgaacgacagccggtactgcctgagcagcagactgagagtgtccgccaccttctggcagaacccccggaaccacttcagatgccaggtgcagttctacggcctgagcgagaacgacgagtggacccaggacagagccaagcccgtgacccagatcgtgtctgccgaagcctggggcagagccgattgcggctttaccagcgagagctaccagcagggcgtgctgagcgccaccaacctgagcgtgatcggcttcagaatcctgctgctgaaagtggccggctttaacctgctgatgaccctgcggctgtggtccagcagggccaagcgatctggatctggagcaacaaacttctcactactcaaacaagcaggtgacgtggaggagaatcccgggcctactagtatggactggatttggcgcatccttttccttgtcggcgctgctaccggcgcgcattccgggccccagctccagctgcaagagtctggacctggcctggtcaagcctagcgagacactgagcctgacctgtaccgtgtccggcgatagcatcagcagcggcgattactactggggctggatcagacagcctcctggcaaaggactggaatggatcggccacatctactacagcggcgtgacctactacaaccccagcctgaagtccagagtgaccatcagcgtggacaccagccggaaccagttctccctgaagctgtctagcgtgacagccgccgataccgccgtgtactactgcaccagagaggacagcagcaactggcggagtagaggccagggaacactggtcacagttagctctggatccggcggaggcggaagtggaggcggaggatctggcggcggaggctctttcgaagaagtgcagcttgttgaatctggcggcggactggctaagcctggcggatctctgagactgtcttgtgccgccagcggcttccggttcaccttcaacaactactacatggactgggtccgacaggcccctggacaaggacttgaatgggtgtccagaatcagcagcagcggcgaccctacttggtacgccgattctgtgaagggcagattcaccatcagcagagagaacgccaagaacaccctgttcctccagatgaactccctgagagccgaggacaccgccgtgtactattgtgcctctctgaccaccggcagcgattcttggggacagggcgtgctggttaccgtgtcatctacgcgtatccagaaccctgatcctgccgtgtaccagctgcgggatagcaagagcagcgacaagagcgtgtgtctgttcaccgacttcgacagccagaccaacgtgtcccagagcaaggactccgacgtgtacatcaccgataagtgcgtgctggacatgcggagcatggacttcaagagcaactccgccgtggcctggtccaacaagtccgatttcgcctgcgccaacgccttcaacaacagcattatccccgaggacacattcttcccaagccccgagagcagctgcgacgtgaagctggtggaaaagagcttcgagacagacaccaacctgaacttccagatcctgtacgagatcctgctgggcaaggccaccctgtacgccgtgctggtgtctgccctggtgctgatggctatggtcaagcggaaggacagccgggga

SEQ ID NO: 5734 - DNA, 2673 bp, synthetic construct
  source 1..2673: mol_type = other DNA
atggccttaccagtgaccgccttgctcctgccgctggccttgctgctccacgccgccaggccggaagtgcagctggttgaatctggcggaggactggttcagcctggcggatctctgagactgtcttgtgccgccagcggcttcagcttcagcgacttttggatgagctgggtccgacaggcccctggcaaaggacttgaatgggtcgccacaatcagccaggccggcagcgagaaggactacgtggactctgtgaagggcagattcaccatcagccgggacaacgccaagaagtccctgtacctccagatgaacagcctgagagccgaggacaccgccgtgtactattgtgcctctggcgtgtacagcttcgactacagaggccagggcaccctggtcacagtctcttctggtaccggcggaggcggatctggcggcggaggtagcggtggcggaggatctgaattcgagatcgtgatgacacagagccccgccacactgagtgtgtctccaggcgaaagagccacactgtcctgtagagccagccagagcgtgtccagaaacctggcctggtatcagcagaagcctggacaggctccccggctgttgatctacggcgcttctacaagagccaccggcattcccgccagattttctggctctggcagcggcaccgagttcaccctgacaatcggaagcctccagagcgaggacttcgccgtgtactactgccagcagtacaagacctggcctcggacctttggacagggcaccaacgtggaaatcaaactcgaggacctgaagaacgtgttcccacctgaggtggccgtgttcgagcctagcgaggccgagatcagccacacccagaaagccaccctcgtgtgcctggctaccggcttctaccccgaccatgtggaactgtcttggtgggtcaacggcaaagaggtgcacagcggcgtgtgtaccgacccccagccactgaaagaacagcccgccctgaacgacagccggtactgcctgagcagcagactgagagtgtccgccaccttctggcagaacccccggaaccacttcagatgccaggtgcagttctacggcctgagcgagaacgacgagtggacccaggacagagccaagcccgtgacccagatcgtgtctgccgaagcctggggcagagccgattgcggctttaccagcgagagctaccagcagggcgtgctgagcgccaccaacctgagcgtgatcggcttcagaatcctgctgctgaaagtggccggctttaacctgctgatgaccctgcggctgtggtccagcagggccaagcgatctggatctggagcaacaaacttctcactactcaaacaagcaggtgacgtggaggagaatcccgggcctactagtatggactggatttggcgcatccttttccttgtcggcgctgctaccggcgcgcattccgggccccagctccagctgcaagagtctggacctggcctggtcaagcctagcgagacactgagcctgacctgtaccgtgtccggcgatagcatcagcagcggcgattactactggggctggatcagacagcctcctggcaaaggactggaatggatcggccacatctactacagcggcgtgacctactacaaccccagcctgaagtccagagtgaccatcagcgtggacaccagccggaaccagttctccctgaagctgtctagcgtgacagccgccgataccgccgtgtactactgcaccagagaggacagcagcaactggcggagtagaggccagggaacactggtcacagttagctctggatccggcggaggcggaagtggaggcggaggatctggcggcggaggctctttcgaacaagttcagctgcaacaatggggagccggcctgctgaagcctagcgaaacactgtctctgacctgcgccgtgttcggcggctctttcagcggctactactggtcctggatcagacagcctcctggcaaaggactggaatggatcggcgagatcaaccaccggggcaacaccaacgacaaccccagcctgaaaagcagagtgaccatcagcgtggacaccagcaagaaccagttcgccctgaagctgagcagcgtgacagccgctgataccgccgtgtattattgcgccagagagcggggctacacctacggcaatttcgatcactggggccagggcaccctggtcacagtttcttctacgcgtatccagaaccctgatcctgccgtgtaccagctgcgggatagcaagagcagcgacaagagcgtgtgtctgttcaccgacttcgacagccagaccaacgtgtcccagagcaaggactccgacgtgtacatcaccgataagtgcgtgctggacatgcggagcatggacttcaagagcaactccgccgtggcctggtccaacaagtccgatttcgcctgcgccaacgccttcaacaacagcattatccccgaggacacattcttcccaagccccgagagcagctgcgacgtgaagctggtggaaaagagcttcgagacagacaccaacctgaacttccagatcctgtacgagatcctgctgggcaaggccaccctgtacgccgtgctggtgtctgccctggtgctgatggctatggtcaagcggaaggacagccgggga

SEQ ID NO: 5735 - DNA, 2676 bp, synthetic construct
  source 1..2676: mol_type = other DNA
atggccttaccagtgaccgccttgctcctgccgctggccttgctgctccacgccgccaggccggaagtgcagctggttgaatctggcggaggactggttcagcctggcggatctctgagactgtcttgtgccgccagcggcttcagcttcagcgacttttggatgagctgggtccgacaggcccctggcaaaggacttgaatgggtcgccacaatcagccaggccggcagcgagaaggactacgtggactctgtgaagggcagattcaccatcagccgggacaacgccaagaagtccctgtacctccagatgaacagcctgagagccgaggacaccgccgtgtactattgtgcctctggcgtgtacagcttcgactacagaggccagggcaccctggtcacagtctcttctggtaccggcggaggcggatctggcggcggaggtagcggtggcggaggatctgaattcgagatcgtgatgacccctagcagcgccacactgagtgtgtctccaggcgaaagagccacactgtcctgtagagccagccagagcgtgtccagaaacctggcctggtatcagcagaagcctggacaggctccccggctgttgatctacggcgcttctacaagagccaccggcattcccgccagattttctggctctggcagcggcaccgagttcaccctgacaatctctagcctccagagcgaggacttcgccgtgtactactgccaccagtacagcaactggatgtgcagcttcggccagggcaccaagctggaaatcaaactcgaggacctgaagaacgtgttcccacctgaggtggccgtgttcgagcctagcgaggccgagatcagccacacccagaaagccaccctcgtgtgcctggctaccggcttctaccccgaccatgtggaactgtcttggtgggtcaacggcaaagaggtgcacagcggcgtgtgtaccgacccccagccactgaaagaacagcccgccctgaacgacagccggtactgcctgagcagcagactgagagtgtccgccaccttctggcagaacccccggaaccacttcagatgccaggtgcagttctacggcctgagcgagaacgacgagtggacccaggacagagccaagcccgtgacccagatcgtgtctgccgaagcctggggcagagccgattgcggctttaccagcgagagctaccagcagggcgtgctgagcgccaccaacctgagcgtgatcggcttcagaatcctgctgctgaaagtggccggctttaacctgctgatgaccctgcggctgtggtccagcagggccaagcgatctggatctggagcaacaaacttctcactactcaaacaagcaggtgacgtggaggagaatcccgggcctactagtatggactggatttggcgcatccttttccttgtcggcgctgctaccggcgcgcattccgggccccagctccagctgcaagagtctggacctggcctggtcaagcctagcgagacactgagcctgacctgtaccgtgtccggcgatagcatcagcagcggcgattactactggggctggatcagacagcctcctggcaaaggactggaatggatcggccacatctactacagcggcgtgacctactacaaccccagcctgaagtccagagtgaccatcagcgtggacaccagccggaaccagttctccctgaagctgtctagcgtgacagccgccgataccgccgtgtactactgcaccagagaggacagcagcaactggcggagtagaggccagggaacactggtcacagttagctctggatccggcggaggcggaagtggaggcggaggatctggcggcggaggctctttcgaagaagttcagctccttgagtcaggtggcggcctggttcaacctggcggatctctgagactgagctgtgccgccagcggcttcacctttagcagatacgccatgaactgggtccgacaggcccctggcaaaggactggaatgggtgtccggcatctctggaagcggcggcagaacctactacgccgattctgtgaagggcagattcaccatcagccgggacaacagcaagaacaccctgtacctccagatgaacagcctgagagccgaggacacagccgtgtattattgcgccaaggaccgggacttttggagcggcccttttgactattggggccagggaaccctggtcaccgttagctctacgcgtatccagaaccctgatcctgccgtgtaccagctgcgggatagcaagagcagcgacaagagcgtgtgtctgttcaccgacttcgacagccagaccaacgtgtcccagagcaaggactccgacgtgtacatcaccgataagtgcgtgctggacatgcggagcatggacttcaagagcaactccgccgtggcctggtccaacaagtccgatttcgcctgcgccaacgccttcaacaacagcattatccccgaggacacattcttcccaagccccgagagcagctgcgacgtgaagctggtggaaaagagcttcgagacagacaccaacctgaacttccagatcctgtacgagatcctgctgggcaaggccaccctgtacgccgtgctggtgtctgccctggtgctgatggctatggtcaagcggaaggacagccgggga

SEQ ID NO: 5736 - DNA, 2691 bp, synthetic construct
  source 1..2691: mol_type = other DNA
atggccttaccagtgaccgccttgctcctgccgctggccttgctgctccacgccgccaggccggaagtgcagctggttgaatctggcggaggactggttcagcctggcggatctctgagactgtcttgtgccgccagcggcttcagcttcagcgacttttggatgagctgggtccgacaggcccctggcaaaggacttgaatgggtcgccacaatcagccaggccggcagcgagaaggactacgtggactctgtgaagggcagattcaccatcagccgggacaacgccaagaagtccctgtacctccagatgaacagcctgagagccgaggacaccgccgtgtactattgtgcctctggcgtgtacagcttcgactacagaggccagggcaccctggtcacagtctcttctggtaccggcggaggcggatctggcggcggaggtagcggtggcggaggatctgaattcgacatccagatgacccagagccccagcagcctgtctgccagcgtgggcgacagagtgaccatcacatgcaaggccagcaagaacatcagaagctacctggcctggtatcagcagaagcccggcaaggcccccaagctgctgatctacagcggcagcacactgcacagcggcgtgcccagcagattttccggctctggcagcggcaccgacttcaccctgaccatctctagcctccagcccgaggacttcgccacctactactgccagcagcaccacgagtaccccctgacattcggccagggcaccaaggtggaaatcaagagactcgaggacctgaagaacgtgttcccacctgaggtggccgtgttcgagcctagcgaggccgagatcagccacacccagaaagccaccctcgtgtgcctggctaccggcttctaccccgaccatgtggaactgtcttggtgggtcaacggcaaagaggtgcacagcggcgtgtgtaccgacccccagccactgaaagaacagcccgccctgaacgacagccggtactgcctgagcagcagactgagagtgtccgccaccttctggcagaacccccggaaccacttcagatgccaggtgcagttctacggcctgagcgagaacgacgagtggacccaggacagagccaagcccgtgacccagatcgtgtctgccgaagcctggggcagagccgattgcggctttaccagcgagagctaccagcagggcgtgctgagcgccaccaacctgagcgtgatcggcttcagaatcctgctgctgaaagtggccggctttaacctgctgatgaccctgcggctgtggtccagcagggccaagcgatctggatctggagcaacaaacttctcactactcaaacaagcaggtgacgtggaggagaatcccgggcctactagtatggactggatttggcgcatccttttccttgtcggcgctgctaccggcgcgcattccgggccccagctccagctgcaagagtctggacctggcctggtcaagcctagcgagacactgagcctgacctgtaccgtgtccggcgatagcatcagcagcggcgattactactggggctggatcagacagcctcctggcaaaggactggaatggatcggccacatctactacagcggcgtgacctactacaaccccagcctgaagtccagagtgaccatcagcgtggacaccagccggaaccagttctccctgaagctgtctagcgtgacagccgccgataccgccgtgtactactgcaccagagaggacagcagcaactggcggagtagaggccagggaacactggtcacagttagctctggatccggcggaggcggaagtggaggcggaggatctggcggcggaggctctttcgaacaggtgcaactccaggaatctggccccggactcgtgaagcccagcgagacactgagcctgacctgtaccgtgtccggctacaccatcaccagcggctacgactggtcctggatcagacagcctcctggcaagggcctggaatggatcggctacatcaactacggcggctccaccaactacaagcccagcctgggaagccgcgtgacaatcagcgtggacacctccaagaaccagttcagcctgaagctgagcagcgtgacagccgccgataccgccgtgtactactgcgcccggtacaacgagtacaagagctacatctacgattggtacttcgacttctggggccagggaaccctcgtgaccgtgtctagtacgcgtatccagaaccctgatcctgccgtgtaccagctgcgggatagcaagagcagcgacaagagcgtgtgtctgttcaccgacttcgacagccagaccaacgtgtcccagagcaaggactccgacgtgtacatcaccgataagtgcgtgctggacatgcggagcatggacttcaagagcaactccgccgtggcctggtccaacaagtccgatttcgcctgcgccaacgccttcaacaacagcattatccccgaggacacattcttcccaagccccgagagcagctgcgacgtgaagctggtggaaaagagcttcgagacagacaccaacctgaacttccagatcctgtacgagatcctgctgggcaaggccaccctgtacgccgtgctggtgtctgccctggtgctgatggctatggtcaagcggaaggacagccgggga

SEQ ID NO: 5737 - DNA, 2697 bp, synthetic construct
  source 1..2697: mol_type = other DNA
atggccttaccagtgaccgccttgctcctgccgctggccttgctgctccacgccgccaggccggaagtgcagctggttgaatctggcggaggactggttcagcctggcggatctctgagactgtcttgtgccgccagcggcttcagcttcagcgacttttggatgagctgggtccgacaggcccctggcaaaggacttgaatgggtcgccacaatcagccaggccggcagcgagaaggactacgtggactctgtgaagggcagattcaccatcagccgggacaacgccaagaagtccctgtacctccagatgaacagcctgagagccgaggacaccgccgtgtactattgtgcctctggcgtgtacagcttcgactacagaggccagggcaccctggtcacagtctcttctggtaccggcggaggcggatctggcggcggaggtagcggtggcggaggatctgaattccagtctgtggtcacacagcctccatccgtgtctgctgcccctggacagaaagtgaccatctcctgtagcggcagcagcagcaacatcggcaacaactacgtgtcctggtatcagcagctccccggcacagctcccaaactgctgatctacgacaacaacaagcggcccagcggcatccccgatagattttctggcagcaagagcggcaccagcgccacactgggaattaccggacttcagacaggcgacgaggccgactactactgtggcacatgggatggcagcctgtacaccatgcttttcggcggaggcaccaagctgacagtgcttctcgaggacctgaagaacgtgttcccacctgaggtggccgtgttcgagcctagcgaggccgagatcagccacacccagaaagccaccctcgtgtgcctggctaccggcttctaccccgaccatgtggaactgtcttggtgggtcaacggcaaagaggtgcacagcggcgtgtgtaccgacccccagccactgaaagaacagcccgccctgaacgacagccggtactgcctgagcagcagactgagagtgtccgccaccttctggcagaacccccggaaccacttcagatgccaggtgcagttctacggcctgagcgagaacgacgagtggacccaggacagagccaagcccgtgacccagatcgtgtctgccgaagcctggggcagagccgattgcggctttaccagcgagagctaccagcagggcgtgctgagcgccaccaacctgagcgtgatcggcttcagaatcctgctgctgaaagtggccggctttaacctgctgatgaccctgcggctgtggtccagcagggccaagcgatctggatctggagcaacaaacttctcactactcaaacaagcaggtgacgtggaggagaatcccgggcctactagtatggactggatttggcgcatccttttccttgtcggcgctgctaccggcgcgcattccgggccccagctccagctgcaagagtctggacctggcctggtcaagcctagcgagacactgagcctgacctgtaccgtgtccggcgatagcatcagcagcggcgattactactggggctggatcagacagcctcctggcaaaggactggaatggatcggccacatctactacagcggcgtgacctactacaaccccagcctgaagtccagagtgaccatcagcgtggacaccagccggaaccagttctccctgaagctgtctagcgtgacagccgccgataccgccgtgtactactgcaccagagaggacagcagcaactggcggagtagaggccagggaacactggtcacagttagctctggatccggcggaggcggaagtggaggcggaggatctggcggcggaggctctttcgaagaagtgcaactggtggaatctggcggcggactggttaagcctggcggatctctgagactgtcttgtgccgccagcggcttcaccttcagcaatgcctggatgagctgggttcgacaggcccctggaaaaggactggaatgggtcggattcatccggtccaaagcctacggcggcaccacagaatatgccgcctctgtgaagggcagattcaccatcagccgggacgacagcaagtctatcgcctacctccagatgaacaacctgaaaaccgaggacaccgccgtgtactactgcgccagagatggcctgtacagcagctcttggtacgacagcgattactggggccagggcacactggtcacagtgtcatctacgcgtatccagaaccctgatcctgccgtgtaccagctgcgggatagcaagagcagcgacaagagcgtgtgtctgttcaccgacttcgacagccagaccaacgtgtcccagagcaaggactccgacgtgtacatcaccgataagtgcgtgctggacatgcggagcatggacttcaagagcaactccgccgtggcctggtccaacaagtccgatttcgcctgcgccaacgccttcaacaacagcattatccccgaggacacattcttcccaagccccgagagcagctgcgacgtgaagctggtggaaaagagcttcgagacagacaccaacctgaacttccagatcctgtacgagatcctgctgggcaaggccaccctgtacgccgtgctggtgtctgccctggtgctgatggctatggtcaagcggaaggacagccgggga

SEQ ID NO: 5738 - DNA, 2712 bp, synthetic construct
  source 1..2712: mol_type = other DNA
atggccttaccagtgaccgccttgctcctgccgctggccttgctgctccacgccgccaggccggaagtgcagctggttgaatctggcggaggactggttcagcctggcggatctctgagactgtcttgtgccgccagcggcttcagcttcagcgacttttggatgagctgggtccgacaggcccctggcaaaggacttgaatgggtcgccacaatcagccaggccggcagcgagaaggactacgtggactctgtgaagggcagattcaccatcagccgggacaacgccaagaagtccctgtacctccagatgaacagcctgagagccgaggacaccgccgtgtactattgtgcctctggcgtgtacagcttcgactacagaggccagggcaccctggtcacagtctcttctggtaccggcggaggcggatctggcggcggaggtagcggtggcggaggatctgaattccagtctgtgctgacacagcctcctagtgtgtctggcgctcctggacagagagtgaccatctcttgtaccggcagcagcagcaatatcggagccggctatgacgtgcactggtatcagcagctccctggcacagcccctaaactgctgatcttcggcaacagcaacagacccagcggcgtgcccgatagattcagcggctttaagagcggcacaagcgccagcctggctatcactggactgcaagccgaggacgaggccgactacttctgccagagctacgatagcagcctgagcggcagcggagtgtttggcacaggcaccaaagtgacagtgcttggcctcgaggacctgaagaacgtgttcccacctgaggtggccgtgttcgagcctagcgaggccgagatcagccacacccagaaagccaccctcgtgtgcctggctaccggcttctaccccgaccatgtggaactgtcttggtgggtcaacggcaaagaggtgcacagcggcgtgtgtaccgacccccagccactgaaagaacagcccgccctgaacgacagccggtactgcctgagcagcagactgagagtgtccgccaccttctggcagaacccccggaaccacttcagatgccaggtgcagttctacggcctgagcgagaacgacgagtggacccaggacagagccaagcccgtgacccagatcgtgtctgccgaagcctggggcagagccgattgcggctttaccagcgagagctaccagcagggcgtgctgagcgccaccaacctgagcgtgatcggcttcagaatcctgctgctgaaagtggccggctttaacctgctgatgaccctgcggctgtggtccagcagggccaagcgatctggatctggagcaacaaacttctcactactcaaacaagcaggtgacgtggaggagaatcccgggcctactagtatggactggatttggcgcatccttttccttgtcggcgctgctaccggcgcgcattccgggccccagctccagctgcaagagtctggacctggcctggtcaagcctagcgagacactgagcctgacctgtaccgtgtccggcgatagcatcagcagcggcgattactactggggctggatcagacagcctcctggcaaaggactggaatggatcggccacatctactacagcggcgtgacctactacaaccccagcctgaagtccagagtgaccatcagcgtggacaccagccggaaccagttctccctgaagctgtctagcgtgacagccgccgataccgccgtgtactactgcaccagagaggacagcagcaactggcggagtagaggccagggaacactggtcacagttagctctggatccggcggaggcggaagtggaggcggaggatctggcggcggaggctctttcgaacaaatgcaactggttcaaagcggcggtggcctggtgcaacctggaagaagtctgagactgagctgtgccgccagcggcttcaccttcgatgattacgccatgcactgggtccgacaggcccctggaaaaggactggaatgggtgtccggcatctcctggaatagcggctctatcggctacgccgacagcgtgaagggcagattcaccatcagccgggacaacgccaagaacagcctgtacctccagatgaactccctgagagccgaggatacagccctgtactactgcgccaaggacatccacagcggcagctactacggcctgctgtactacgctatggacgtgtggggccagggcacaaccgtgacagtttcttctacgcgtatccagaaccctgatcctgccgtgtaccagctgcgggatagcaagagcagcgacaagagcgtgtgtctgttcaccgacttcgacagccagaccaacgtgtcccagagcaaggactccgacgtgtacatcaccgataagtgcgtgctggacatgcggagcatggacttcaagagcaactccgccgtggcctggtccaacaagtccgatttcgcctgcgccaacgccttcaacaacagcattatccccgaggacacattcttcccaagccccgagagcagctgcgacgtgaagctggtggaaaagagcttcgagacagacaccaacctgaacttccagatcctgtacgagatcctgctgggcaaggccaccctgtacgccgtgctggtgtctgccctggtgctgatggctatggtcaagcggaaggacagccgggga

SEQ ID NO: 5739 - DNA, 2712 bp, synthetic construct
  source 1..2712: mol_type = other DNA
atggccttaccagtgaccgccttgctcctgccgctggccttgctgctccacgccgccaggccggaagtgcagctggttgaatctggcggaggactggttcagcctggcggatctctgagactgtcttgtgccgccagcggcttcagcttcagcgacttttggatgagctgggtccgacaggcccctggcaaaggacttgaatgggtcgccacaatcagccaggccggcagcgagaaggactacgtggactctgtgaagggcagattcaccatcagccgggacaacgccaagaagtccctgtacctccagatgaacagcctgagagccgaggacaccgccgtgtactattgtgcctctggcgtgtacagcttcgactacagaggccagggcaccctggtcacagtctcttctggtaccggcggaggcggatctggcggcggaggtagcggtggcggaggatctgaattcctgcctgttctgacacagcctccatctgcctctggcacacctggacagagagtgaccatcagctgtagcggcagaagcagcaacatcggcagcaacagcgtgaactggtacagacagcttcctggcgctgcccctaagctgctgatctacagcaacaaccagcggcctcctggcgtgccagtcagattttctggcagcaagagcggcacaagcgccagcctggctatttctggactccagtctgaggacgaggccacctactactgtgccacctgggacgacaacctgaacgtgcactacgtgttcggcaccggcaccaaagtgacagtgcttggaagtagactcgaggacctgaagaacgtgttcccacctgaggtggccgtgttcgagcctagcgaggccgagatcagccacacccagaaagccaccctcgtgtgcctggctaccggcttctaccccgaccatgtggaactgtcttggtgggtcaacggcaaagaggtgcacagcggcgtgtgtaccgacccccagccactgaaagaacagcccgccctgaacgacagccggtactgcctgagcagcagactgagagtgtccgccaccttctggcagaacccccggaaccacttcagatgccaggtgcagttctacggcctgagcgagaacgacgagtggacccaggacagagccaagcccgtgacccagatcgtgtctgccgaagcctggggcagagccgattgcggctttaccagcgagagctaccagcagggcgtgctgagcgccaccaacctgagcgtgatcggcttcagaatcctgctgctgaaagtggccggctttaacctgctgatgaccctgcggctgtggtccagcagggccaagcgatctggatctggagcaacaaacttctcactactcaaacaagcaggtgacgtggaggagaatcccgggcctactagtatggactggatttggcgcatccttttccttgtcggcgctgctaccggcgcgcattccgggccccagctccagctgcaagagtctggacctggcctggtcaagcctagcgagacactgagcctgacctgtaccgtgtccggcgatagcatcagcagcggcgattactactggggctggatcagacagcctcctggcaaaggactggaatggatcggccacatctactacagcggcgtgacctactacaaccccagcctgaagtccagagtgaccatcagcgtggacaccagccggaaccagttctccctgaagctgtctagcgtgacagccgccgataccgccgtgtactactgcaccagagaggacagcagcaactggcggagtagaggccagggaacactggtcacagttagctctggatccggcggaggcggaagtggaggcggaggatctggcggcggaggctctttcgaacttgaaatggctcaggtgcagctggtgcagagcggagccgaagtgaagaaacctggcagcagcgtgaaggtgtcctgcaaagcttctggcggcaccttcagcagctacgccatctcttgggttcgacaggcccctggacaaggactggaatggatgggcagaatcatccccatcctgggaatcgccaactacgcccagaaattccagggcagagtgacaatcaccgccgacaagagcaccagcaccgcctacatggaactgagcagcctgagaagcgaggacaccgccgtgtactattgtgcaagaggcggctactacagccacgacatgtggagcgaagattggggccagggcacactggtcacagtgtcatctacgcgtatccagaaccctgatcctgccgtgtaccagctgcgggatagcaagagcagcgacaagagcgtgtgtctgttcaccgacttcgacagccagaccaacgtgtcccagagcaaggactccgacgtgtacatcaccgataagtgcgtgctggacatgcggagcatggacttcaagagcaactccgccgtggcctggtccaacaagtccgatttcgcctgcgccaacgccttcaacaacagcattatccccgaggacacattcttcccaagccccgagagcagctgcgacgtgaagctggtggaaaagagcttcgagacagacaccaacctgaacttccagatcctgtacgagatcctgctgggcaaggccaccctgtacgccgtgctggtgtctgccctggtgctgatggctatggtcaagcggaaggacagccgggga

SEQ ID NO: 5740 - DNA, 2694 bp, synthetic construct
  source 1..2694: mol_type = other DNA
atggccttaccagtgaccgccttgctcctgccgctggccttgctgctccacgccgccaggccggaagtgcagctggttgaatctggcggaggactggttcagcctggcggatctctgagactgtcttgtgccgccagcggcttcagcttcagcgacttttggatgagctgggtccgacaggcccctggcaaaggacttgaatgggtcgccacaatcagccaggccggcagcgagaaggactacgtggactctgtgaagggcagattcaccatcagccgggacaacgccaagaagtccctgtacctccagatgaacagcctgagagccgaggacaccgccgtgtactattgtgcctctggcgtgtacagcttcgactacagaggccagggcaccctggtcacagtctcttctggtaccggcggaggcggatctggcggcggaggtagcggtggcggaggatctgaattcgacttcgtgatgacacagagccctgatagcctggccgtgtctctcggcgagcgagtgaccatgagctgcaagtctagccagagcctgctgaacagcggcaaccagaagaactacctgacctggtatcagcagaagcccggccagcctcctaagctgctgatctactgggccagcaccagagaaagcggcgtgcccgatagattttctggctctggcagcggcaccgacttcaccctgacaatttctagcctgcaagccgaggacgtggccgtgtactactgccagaacgactacagctacccctacaccttcggccagggcaccaagctggaaatcaaactcgaggacctgaagaacgtgttcccacctgaggtggccgtgttcgagcctagcgaggccgagatcagccacacccagaaagccaccctcgtgtgcctggctaccggcttctaccccgaccatgtggaactgtcttggtgggtcaacggcaaagaggtgcacagcggcgtgtgtaccgacccccagccactgaaagaacagcccgccctgaacgacagccggtactgcctgagcagcagactgagagtgtccgccaccttctggcagaacccccggaaccacttcagatgccaggtgcagttctacggcctgagcgagaacgacgagtggacccaggacagagccaagcccgtgacccagatcgtgtctgccgaagcctggggcagagccgattgcggctttaccagcgagagctaccagcagggcgtgctgagcgccaccaacctgagcgtgatcggcttcagaatcctgctgctgaaagtggccggctttaacctgctgatgaccctgcggctgtggtccagcagggccaagcgatctggatctggagcaacaaacttctcactactcaaacaagcaggtgacgtggaggagaatcccgggcctactagtatggactggatttggcgcatccttttccttgtcggcgctgctaccggcgcgcattccgggccccagctccagctgcaagagtctggacctggcctggtcaagcctagcgagacactgagcctgacctgtaccgtgtccggcgatagcatcagcagcggcgattactactggggctggatcagacagcctcctggcaaaggactggaatggatcggccacatctactacagcggcgtgacctactacaaccccagcctgaagtccagagtgaccatcagcgtggacaccagccggaaccagttctccctgaagctgtctagcgtgacagccgccgataccgccgtgtactactgcaccagagaggacagcagcaactggcggagtagaggccagggaacactggtcacagttagctctggatccggcggaggcggaagtggaggcggaggatctggcggcggaggctctttcgaagaagtgcaactggttcagagcggagccgagctgaagaaacctggggccagcgtgaaggtgtcctgtaaagccagcggctacacctttaccgactactacatgaaatgggtccgacaggccccaggccagggactcgaatggatcggcgatattatccccagcaacggggccaccttctacaaccagaaattcaagggccgcgtgaccatcaccgtggacaagagcacaagcaccgcctacatggaactgagcagcctgagaagcgaggacaccgccgtgtattattgcgccagaagccatctgctgcgggccagttggttcgcctattggggacagggaaccctggtcaccgttagctctacgcgtatccagaaccctgatcctgccgtgtaccagctgcgggatagcaagagcagcgacaagagcgtgtgtctgttcaccgacttcgacagccagaccaacgtgtcccagagcaaggactccgacgtgtacatcaccgataagtgcgtgctggacatgcggagcatggacttcaagagcaactccgccgtggcctggtccaacaagtccgatttcgcctgcgccaacgccttcaacaacagcattatccccgaggacacattcttcccaagccccgagagcagctgcgacgtgaagctggtggaaaagagcttcgagacagacaccaacctgaacttccagatcctgtacgagatcctgctgggcaaggccaccctgtacgccgtgctggtgtctgccctggtgctgatggctatggtcaagcggaaggacagccgggga

SEQ ID NO: 5741 - DNA, 2694 bp, synthetic construct
  source 1..2694: mol_type = other DNA
atggccttaccagtgaccgccttgctcctgccgctggccttgctgctccacgccgccaggccggaagtgcagctggttgaatctggcggaggactggttcagcctggcggatctctgagactgtcttgtgccgccagcggcttcagcttcagcgacttttggatgagctgggtccgacaggcccctggcaaaggacttgaatgggtcgccacaatcagccaggccggcagcgagaaggactacgtggactctgtgaagggcagattcaccatcagccgggacaacgccaagaagtccctgtacctccagatgaacagcctgagagccgaggacaccgccgtgtactattgtgcctctggcgtgtacagcttcgactacagaggccagggcaccctggtcacagtctcttctggtaccggcggaggcggatctggcggcggaggtagcggtggcggaggatctgaattcgacttcgtgatgacacagagccctgatagcctggccgtgtctctcggcgagcgagtgaccatgagctgcaagtctagccagagcctgctgaacagcggcaaccagaagaactacctgacctggtatcagcagaagcccggccagcctcctaagctgctgatctactgggccagcaccagagaaagcggcgtgcccgatagattttctggctctggcagcggcaccgacttcaccctgacaatttctagcctgcaagccgaggacgtggccgtgtactactgccagaacgactacagctacccctacaccttcggccagggcaccaagctggaaatcaaactcgaggacctgaagaacgtgttcccacctgaggtggccgtgttcgagcctagcgaggccgagatcagccacacccagaaagccaccctcgtgtgcctggctaccggcttctaccccgaccatgtggaactgtcttggtgggtcaacggcaaagaggtgcacagcggcgtgtgtaccgacccccagccactgaaagaacagcccgccctgaacgacagccggtactgcctgagcagcagactgagagtgtccgccaccttctggcagaacccccggaaccacttcagatgccaggtgcagttctacggcctgagcgagaacgacgagtggacccaggacagagccaagcccgtgacccagatcgtgtctgccgaagcctggggcagagccgattgcggctttaccagcgagagctaccagcagggcgtgctgagcgccaccaacctgagcgtgatcggcttcagaatcctgctgctgaaagtggccggctttaacctgctgatgaccctgcggctgtggtccagcagggccaagcgatctggatctggagcaacaaacttctcactactcaaacaagcaggtgacgtggaggagaatcccgggcctactagtatggactggatttggcgcatccttttccttgtcggcgctgctaccggcgcgcattccgggccccagctccagctgcaagagtctggacctggcctggtcaagcctagcgagacactgagcctgacctgtaccgtgtccggcgatagcatcagcagcggcgattactactggggctggatcagacagcctcctggcaaaggactggaatggatcggccacatctactacagcggcgtgacctactacaaccccagcctgaagtccagagtgaccatcagcgtggacaccagccggaaccagttctccctgaagctgtctagcgtgacagccgccgataccgccgtgtactactgcaccagagaggacagcagcaactggcggagtagaggccagggaacactggtcacagttagctctggatccggcggaggcggaagtggaggcggaggatctggcggcggaggctctttcgaacaagtgcaactggttcagagcggagccgagctgaagaaacctggggccagcgtgaaggtgtcctgtaaagccagcggctacacctttaccgactactacatgaaatgggtccgacaggccccaggccagggactcgaatggatcggcgatattatccccagcaacggggccaccttctacaaccagaaattcaagggccgcgtgaccatcaccgtggacaagagcacaagcaccgcctacatggaactgagcagcctgagaagcgaggacaccgccgtgtattattgcgccagaagccatctgctgcgggccagttggttcgcctattggggacagggaaccctggtcaccgttagctctacgcgtatccagaaccctgatcctgccgtgtaccagctgcgggatagcaagagcagcgacaagagcgtgtgtctgttcaccgacttcgacagccagaccaacgtgtcccagagcaaggactccgacgtgtacatcaccgataagtgcgtgctggacatgcggagcatggacttcaagagcaactccgccgtggcctggtccaacaagtccgatttcgcctgcgccaacgccttcaacaacagcattatccccgaggacacattcttcccaagccccgagagcagctgcgacgtgaagctggtggaaaagagcttcgagacagacaccaacctgaacttccagatcctgtacgagatcctgctgggcaaggccaccctgtacgccgtgctggtgtctgccctggtgctgatggctatggtcaagcggaaggacagccgggga

SEQ ID NO: 5742 - DNA, 2664 bp, synthetic construct
  source 1..2664: mol_type = other DNA
atggccttaccagtgaccgccttgctcctgccgctggccttgctgctccacgccgccaggccggaagtgcagctggttgaatctggcggaggactggttcagcctggcggatctctgagactgtcttgtgccgccagcggcttcagcttcagcgacttttggatgagctgggtccgacaggcccctggcaaaggacttgaatgggtcgccacaatcagccaggccggcagcgagaaggactacgtggactctgtgaagggcagattcaccatcagccgggacaacgccaagaagtccctgtacctccagatgaacagcctgagagccgaggacaccgccgtgtactattgtgcctctggcgtgtacagcttcgactacagaggccagggcaccctggtcacagtctcttctggtaccggcggaggcggatctggcggcggaggtagcggtggcggaggatctgaattcgacgtgcagatcacacagagccctagctacctggctgcctctcctggcgagacaatcaccatcaactgtcgggccagcaagagcatcagcaaggacctggcctggtatcaagagaagcccggcaagaccaacaagctgctgatctacagcggcagcacactccagtctggcatccccagcagattttccggctctggcagcggcaccgatttcaccctgaccataagcagcctggaacctgaggacttcgccatgtactactgccagcagcacaacaagtacccctacacctttggcggaggcaccaagctggaaatcaagagactcgaggacctgaagaacgtgttcccacctgaggtggccgtgttcgagcctagcgaggccgagatcagccacacccagaaagccaccctcgtgtgcctggctaccggcttctaccccgaccatgtggaactgtcttggtgggtcaacggcaaagaggtgcacagcggcgtgtgtaccgacccccagccactgaaagaacagcccgccctgaacgacagccggtactgcctgagcagcagactgagagtgtccgccaccttctggcagaacccccggaaccacttcagatgccaggtgcagttctacggcctgagcgagaacgacgagtggacccaggacagagccaagcccgtgacccagatcgtgtctgccgaagcctggggcagagccgattgcggctttaccagcgagagctaccagcagggcgtgctgagcgccaccaacctgagcgtgatcggcttcagaatcctgctgctgaaagtggccggctttaacctgctgatgaccctgcggctgtggtccagcagggccaagcgatctggatctggagcaacaaacttctcactactcaaacaagcaggtgacgtggaggagaatcccgggcctactagtatggactggatttggcgcatccttttccttgtcggcgctgctaccggcgcgcattccgggccccagctccagctgcaagagtctggacctggcctggtcaagcctagcgagacactgagcctgacctgtaccgtgtccggcgatagcatcagcagcggcgattactactggggctggatcagacagcctcctggcaaaggactggaatggatcggccacatctactacagcggcgtgacctactacaaccccagcctgaagtccagagtgaccatcagcgtggacaccagccggaaccagttctccctgaagctgtctagcgtgacagccgccgataccgccgtgtactactgcaccagagaggacagcagcaactggcggagtagaggccagggaacactggtcacagttagctctggatccggcggaggcggaagtggaggcggaggatctggcggcggaggctctttcgaacaagttcaactgcaacagcctggggccgagcttgttagacctggcgcttctgtgaagctgagctgcaaggccagcggctacaccttcaccagctactggatgaactgggtcaagcagcggcctgaccagggcctcgaatggatcggcagaatcgacccctacgacagcgagacacactacaaccagaagttcaaggacaaggccatcctgaccgtggacaagagcagctccaccgcctacatgcaactgagcagcctgacctctgaggatagcgccgtgtactattgcgccagaggcaactgggacgactattggggccagggcacaaccctgacagtgtctagtacgcgtatccagaaccctgatcctgccgtgtaccagctgcgggatagcaagagcagcgacaagagcgtgtgtctgttcaccgacttcgacagccagaccaacgtgtcccagagcaaggactccgacgtgtacatcaccgataagtgcgtgctggacatgcggagcatggacttcaagagcaactccgccgtggcctggtccaacaagtccgatttcgcctgcgccaacgccttcaacaacagcattatccccgaggacacattcttcccaagccccgagagcagctgcgacgtgaagctggtggaaaagagcttcgagacagacaccaacctgaacttccagatcctgtacgagatcctgctgggcaaggccaccctgtacgccgtgctggtgtctgccctggtgctgatggctatggtcaagcggaaggacagccgggga

SEQ ID NO: 5743 - DNA, 2670 bp, synthetic construct
  source 1..2670: mol_type = other DNA
atggccttaccagtgaccgccttgctcctgccgctggccttgctgctccacgccgccaggccggaagtgcagctggttgaatctggcggaggactggttcagcctggcggatctctgagactgtcttgtgccgccagcggcttcagcttcagcgacttttggatgagctgggtccgacaggcccctggcaaaggacttgaatgggtcgccacaatcagccaggccggcagcgagaaggactacgtggactctgtgaagggcagattcaccatcagccgggacaacgccaagaagtccctgtacctccagatgaacagcctgagagccgaggacaccgccgtgtactattgtgcctctggcgtgtacagcttcgactacagaggccagggcaccctggtcacagtctcttctggtaccggcggaggcggatctggcggcggaggtagcggtggcggaggatctgaattcgagatcgtgctgacacagagccctaccagcatgacagcctctccaggcgagcaagtgaccatcacctgtagagccagcagcagcatcaactacatgcactggtatcagcagaagcctggcgcaagccccagaccttggatctacgagacaagcaagctggcctccggcgtgcccgatagattttctggatctgccagcggcaccagctacagcctgaccatcaacaacatggaagccgaggacgccgccacctactactgccagcagtggaattacccctcctggacctttggcggaggcaccaagctggaacttaaactcgaggacctgaagaacgtgttcccacctgaggtggccgtgttcgagcctagcgaggccgagatcagccacacccagaaagccaccctcgtgtgcctggctaccggcttctaccccgaccatgtggaactgtcttggtgggtcaacggcaaagaggtgcacagcggcgtgtgtaccgacccccagccactgaaagaacagcccgccctgaacgacagccggtactgcctgagcagcagactgagagtgtccgccaccttctggcagaacccccggaaccacttcagatgccaggtgcagttctacggcctgagcgagaacgacgagtggacccaggacagagccaagcccgtgacccagatcgtgtctgccgaagcctggggcagagccgattgcggctttaccagcgagagctaccagcagggcgtgctgagcgccaccaacctgagcgtgatcggcttcagaatcctgctgctgaaagtggccggctttaacctgctgatgaccctgcggctgtggtccagcagggccaagcgatctggatctggagcaacaaacttctcactactcaaacaagcaggtgacgtggaggagaatcccgggcctactagtatggactggatttggcgcatccttttccttgtcggcgctgctaccggcgcgcattccgggccccagctccagctgcaagagtctggacctggcctggtcaagcctagcgagacactgagcctgacctgtaccgtgtccggcgatagcatcagcagcggcgattactactggggctggatcagacagcctcctggcaaaggactggaatggatcggccacatctactacagcggcgtgacctactacaaccccagcctgaagtccagagtgaccatcagcgtggacaccagccggaaccagttctccctgaagctgtctagcgtgacagccgccgataccgccgtgtactactgcaccagagaggacagcagcaactggcggagtagaggccagggaacactggtcacagttagctctggatccggcggaggcggaagtggaggcggaggatctggcggcggaggctctttcgaagaagtgcagctcgttgagtctggtggcggactggttcagcctggaagaagcctgaagctgagctgtgccgccagcggcttcaccttcagcgactacaatatggcctgggtccgacaggcccctaagaaaggactggaatgggtcgccaccatcctgtacgatggcggcagaacctactaccggggcagcgtgaagggcagattcaccatcagcagagacaacgccaagagcaccctgtacctgcggatggactctctgagaagcgaggataccgccacatattactgtgccacacacagccggggcaccgactactttgattattggggccagggcgtgatggttaccgtgtctagtacgcgtatccagaaccctgatcctgccgtgtaccagctgcgggatagcaagagcagcgacaagagcgtgtgtctgttcaccgacttcgacagccagaccaacgtgtcccagagcaaggactccgacgtgtacatcaccgataagtgcgtgctggacatgcggagcatggacttcaagagcaactccgccgtggcctggtccaacaagtccgatttcgcctgcgccaacgccttcaacaacagcattatccccgaggacacattcttcccaagccccgagagcagctgcgacgtgaagctggtggaaaagagcttcgagacagacaccaacctgaacttccagatcctgtacgagatcctgctgggcaaggccaccctgtacgccgtgctggtgtctgccctggtgctgatggctatggtcaagcggaaggacagccgggga

SEQ ID NO: 5744 - DNA, 2697 bp, synthetic construct
  source 1..2697: mol_type = other DNA
atggccttaccagtgaccgccttgctcctgccgctggccttgctgctccacgccgccaggccggaagtgcagctggttgaatctggcggaggactggttcagcctggcggatctctgagactgtcttgtgccgccagcggcttcagcttcagcgacttttggatgagctgggtccgacaggcccctggcaaaggacttgaatgggtcgccacaatcagccaggccggcagcgagaaggactacgtggactctgtgaagggcagattcaccatcagccgggacaacgccaagaagtccctgtacctccagatgaacagcctgagagccgaggacaccgccgtgtactattgtgcctctggcgtgtacagcttcgactacagaggccagggcaccctggtcacagtctcttctggtaccggcggaggcggatctggcggcggaggtagcggtggcggaggatctgaattcgacatcgtgatgacacagagcccttctagcctggccgtgtctgagggcgagacagtgaccatcaactgcaagagcagccagagcttcctgtctagcggcgacggcaagaattacgtggcctggtatcagtacaagcccggacagagccccaagctgctgatctactgggccagcacaagacagagcggcgtgcccgatagattcatcggctctggcagcggcaccgacttcaccctgacaatctctacagtgcaggccgaggacctggctatctactactgccagcagtattacgacacccctctgacctttggctccggcaccaagctggaaatcaaactcgaggacctgaagaacgtgttcccacctgaggtggccgtgttcgagcctagcgaggccgagatcagccacacccagaaagccaccctcgtgtgcctggctaccggcttctaccccgaccatgtggaactgtcttggtgggtcaacggcaaagaggtgcacagcggcgtgtgtaccgacccccagccactgaaagaacagcccgccctgaacgacagccggtactgcctgagcagcagactgagagtgtccgccaccttctggcagaacccccggaaccacttcagatgccaggtgcagttctacggcctgagcgagaacgacgagtggacccaggacagagccaagcccgtgacccagatcgtgtctgccgaagcctggggcagagccgattgcggctttaccagcgagagctaccagcagggcgtgctgagcgccaccaacctgagcgtgatcggcttcagaatcctgctgctgaaagtggccggctttaacctgctgatgaccctgcggctgtggtccagcagggccaagcgatctggatctggagcaacaaacttctcactactcaaacaagcaggtgacgtggaggagaatcccgggcctactagtatggactggatttggcgcatccttttccttgtcggcgctgctaccggcgcgcattccgggccccagctccagctgcaagagtctggacctggcctggtcaagcctagcgagacactgagcctgacctgtaccgtgtccggcgatagcatcagcagcggcgattactactggggctggatcagacagcctcctggcaaaggactggaatggatcggccacatctactacagcggcgtgacctactacaaccccagcctgaagtccagagtgaccatcagcgtggacaccagccggaaccagttctccctgaagctgtctagcgtgacagccgccgataccgccgtgtactactgcaccagagaggacagcagcaactggcggagtagaggccagggaacactggtcacagttagctctggatccggcggaggcggaagtggaggcggaggatctggcggcggaggctctttcgaagaagtgaagctgcaagagtctggccccagcctggtgcagagtagccaaacactgagcctgacctgtaccgtgtccggctttagcctgaccagctaccacatccactgggtccgacagacccctggcaaaggactggaatggatgggcgtgatgtggagcgacggcgacaccagctataacagcgccctgaagtcccggctgagcatcagcagagatacaagccagagccaggtgttcctgaagatgaacagcctccagaccgaggacaccgccacctactattgtgccagaggctactacagcagctacctgtacctttggttcgcctattggggccagggcaccctggttacagtcagctctacgcgtatccagaaccctgatcctgccgtgtaccagctgcgggatagcaagagcagcgacaagagcgtgtgtctgttcaccgacttcgacagccagaccaacgtgtcccagagcaaggactccgacgtgtacatcaccgataagtgcgtgctggacatgcggagcatggacttcaagagcaactccgccgtggcctggtccaacaagtccgatttcgcctgcgccaacgccttcaacaacagcattatccccgaggacacattcttcccaagccccgagagcagctgcgacgtgaagctggtggaaaagagcttcgagacagacaccaacctgaacttccagatcctgtacgagatcctgctgggcaaggccaccctgtacgccgtgctggtgtctgccctggtgctgatggctatggtcaagcggaaggacagccgggga

SEQ ID NO: 5745 - DNA, 2709 bp, synthetic construct
  source 1..2709: mol_type = other DNA
atggccttaccagtgaccgccttgctcctgccgctggccttgctgctccacgccgccaggccggaagtgcagctggttgaatctggcggaggactggttcagcctggcggatctctgagactgtcttgtgccgccagcggcttcagcttcagcgacttttggatgagctgggtccgacaggcccctggcaaaggacttgaatgggtcgccacaatcagccaggccggcagcgagaaggactacgtggactctgtgaagggcagattcaccatcagccgggacaacgccaagaagtccctgtacctccagatgaacagcctgagagccgaggacaccgccgtgtactattgtgcctctggcgtgtacagcttcgactacagaggccagggcaccctggtcacagtctcttctggtaccggcggaggcggatctggcggcggaggtagcggtggcggaggatctgaattcgacgtgctgatgacccagacacctgtgtctctgccagtgtctctcggaggccaggtgtccatctcctgtagaagcagccagagcctggtgcactccgacggcgatacctacctgcactggtatctccagaagcctggacagagccctcagctcctgatctaccgggtgtccaacagattcagcggcgtgcccgatagattttccggcagcggctctggcaccgacttcaccctgaagatcagcagagtggaacccgaggacctgggcctgtactactgtctccagaccacacacttcccaccttggacctttggcggaggcaccaagctggaaatgaaactcgaggacctgaagaacgtgttcccacctgaggtggccgtgttcgagcctagcgaggccgagatcagccacacccagaaagccaccctcgtgtgcctggctaccggcttctaccccgaccatgtggaactgtcttggtgggtcaacggcaaagaggtgcacagcggcgtgtgtaccgacccccagccactgaaagaacagcccgccctgaacgacagccggtactgcctgagcagcagactgagagtgtccgccaccttctggcagaacccccggaaccacttcagatgccaggtgcagttctacggcctgagcgagaacgacgagtggacccaggacagagccaagcccgtgacccagatcgtgtctgccgaagcctggggcagagccgattgcggctttaccagcgagagctaccagcagggcgtgctgagcgccaccaacctgagcgtgatcggcttcagaatcctgctgctgaaagtggccggctttaacctgctgatgaccctgcggctgtggtccagcagggccaagcgatctggatctggagcaacaaacttctcactactcaaacaagcaggtgacgtggaggagaatcccgggcctactagtatggactggatttggcgcatccttttccttgtcggcgctgctaccggcgcgcattccgggccccagctccagctgcaagagtctggacctggcctggtcaagcctagcgagacactgagcctgacctgtaccgtgtccggcgatagcatcagcagcggcgattactactggggctggatcagacagcctcctggcaaaggactggaatggatcggccacatctactacagcggcgtgacctactacaaccccagcctgaagtccagagtgaccatcagcgtggacaccagccggaaccagttctccctgaagctgtctagcgtgacagccgccgataccgccgtgtactactgcaccagagaggacagcagcaactggcggagtagaggccagggaacactggtcacagttagctctggatccggcggaggcggaagtggaggcggaggatctggcggcggaggctctttcgaacaggttcagctccagcagtctggacccgagcttagaaggccaggatctagcgtcagactgagctgcaaggccagcggctaccggatcaaggacttcctgatccactggattaagaacagacccgagcacggcctggaatggatcggatggattgaccctgaggacggcgagactaagtacgcccagaagttccagaccaaggccacactgaccgccgacacctctagcaacaccgcctacatgcaactgagcagcctgaccagcgaggacaccgccacctacttttgtgctagatggggcgacgtgtactacggcctgatgagaggccatgtgatggatgcctggggccagggaacaagcgtgacagtctcttctacgcgtatccagaaccctgatcctgccgtgtaccagctgcgggatagcaagagcagcgacaagagcgtgtgtctgttcaccgacttcgacagccagaccaacgtgtcccagagcaaggactccgacgtgtacatcaccgataagtgcgtgctggacatgcggagcatggacttcaagagcaactccgccgtggcctggtccaacaagtccgatttcgcctgcgccaacgccttcaacaacagcattatccccgaggacacattcttcccaagccccgagagcagctgcgacgtgaagctggtggaaaagagcttcgagacagacaccaacctgaacttccagatcctgtacgagatcctgctgggcaaggccaccctgtacgccgtgctggtgtctgccctggtgctgatggctatggtcaagcggaaggacagccgggga

SEQ ID NO: 5746 - DNA, 2694 bp, synthetic construct
  source 1..2694: mol_type = other DNA
atggccttaccagtgaccgccttgctcctgccgctggccttgctgctccacgccgccaggccggaagtgcagctggttgaatctggcggaggactggttcagcctggcggatctctgagactgtcttgtgccgccagcggcttcagcttcagcgacttttggatgagctgggtccgacaggcccctggcaaaggacttgaatgggtcgccacaatcagccaggccggcagcgagaaggactacgtggactctgtgaagggcagattcaccatcagccgggacaacgccaagaagtccctgtacctccagatgaacagcctgagagccgaggacaccgccgtgtactattgtgcctctggcgtgtacagcttcgactacagaggccagggcaccctggtcacagtctcttctggtaccggcggaggcggatctggcggcggaggtagcggtggcggaggatctgaattcgacatcgtgatgacacagagccccgccacactgtcactgtctccaggcgaaagagccacactgagctgtcggagcagcaagagcctccagaacgtgaacggcaacacctacctgtactggttccagcagaagcccggccagtctcctcagctcctgatctacagaatgagcaacctgaacagcggcgtgcccgacagattttctggcagcggaagcggcaccgagttcaccctgaccataagcagcctggaacctgaggacttcgccgtgtactactgtatgcagcacctggaataccccatcaccttcggagccggcaccaagctggaaatcaaactcgaggacctgaagaacgtgttcccacctgaggtggccgtgttcgagcctagcgaggccgagatcagccacacccagaaagccaccctcgtgtgcctggctaccggcttctaccccgaccatgtggaactgtcttggtgggtcaacggcaaagaggtgcacagcggcgtgtgtaccgacccccagccactgaaagaacagcccgccctgaacgacagccggtactgcctgagcagcagactgagagtgtccgccaccttctggcagaacccccggaaccacttcagatgccaggtgcagttctacggcctgagcgagaacgacgagtggacccaggacagagccaagcccgtgacccagatcgtgtctgccgaagcctggggcagagccgattgcggctttaccagcgagagctaccagcagggcgtgctgagcgccaccaacctgagcgtgatcggcttcagaatcctgctgctgaaagtggccggctttaacctgctgatgaccctgcggctgtggtccagcagggccaagcgatctggatctggagcaacaaacttctcactactcaaacaagcaggtgacgtggaggagaatcccgggcctactagtatggactggatttggcgcatccttttccttgtcggcgctgctaccggcgcgcattccgggccccagctccagctgcaagagtctggacctggcctggtcaagcctagcgagacactgagcctgacctgtaccgtgtccggcgatagcatcagcagcggcgattactactggggctggatcagacagcctcctggcaaaggactggaatggatcggccacatctactacagcggcgtgacctactacaaccccagcctgaagtccagagtgaccatcagcgtggacaccagccggaaccagttctccctgaagctgtctagcgtgacagccgccgataccgccgtgtactactgcaccagagaggacagcagcaactggcggagtagaggccagggaacactggtcacagttagctctggatccggcggaggcggaagtggaggcggaggatctggcggcggaggctctttcgaagaagtgcaactggttgaatctggcggcggactggttaagcctggcggatctctgaagctgagctgtgccgccagcggctacacctttaccagctacgtgatgcactgggtccgacaggcccctggcaaaggacttgagtggatcggctacatcaacccctacaacgatggcaccaagtacaacgagaagttccagggcagagtgaccatcagctccgacaagagcatcagcaccgcctacatggaactgagcagcctgagaagcgaggataccgccatgtactattgcgccagaggcacctactactacggcaccagagtgttcgactactggggccagggaaccctggtcacagtctcttctacgcgtatccagaaccctgatcctgccgtgtaccagctgcgggatagcaagagcagcgacaagagcgtgtgtctgttcaccgacttcgacagccagaccaacgtgtcccagagcaaggactccgacgtgtacatcaccgataagtgcgtgctggacatgcggagcatggacttcaagagcaactccgccgtggcctggtccaacaagtccgatttcgcctgcgccaacgccttcaacaacagcattatccccgaggacacattcttcccaagccccgagagcagctgcgacgtgaagctggtggaaaagagcttcgagacagacaccaacctgaacttccagatcctgtacgagatcctgctgggcaaggccaccctgtacgccgtgctggtgtctgccctggtgctgatggctatggtcaagcggaaggacagccgggga

SEQ ID NO: 5747 - DNA, 2682 bp, synthetic construct
  source 1..2682: mol_type = other DNA
atggccttaccagtgaccgccttgctcctgccgctggccttgctgctccacgccgccaggccggaagtgcagctggttgaatctggcggaggactggttcagcctggcggatctctgagactgtcttgtgccgccagcggcttcagcttcagcgacttttggatgagctgggtccgacaggcccctggcaaaggacttgaatgggtcgccacaatcagccaggccggcagcgagaaggactacgtggactctgtgaagggcagattcaccatcagccgggacaacgccaagaagtccctgtacctccagatgaacagcctgagagccgaggacaccgccgtgtactattgtgcctctggcgtgtacagcttcgactacagaggccagggcaccctggtcacagtctcttctggtaccggcggaggcggatctggcggcggaggtagcggtggcggaggatctgaattcgacatccagatgacacagagccctagcagcctgtctgccagcgtgggagacagagtgaccatcacatgcaaggccagcgaccacatcaacaactggctggcctggtatcagcagaagcctggacaggcccctaagctgctgatctacggcgctaccacactggaaacaggcgtgcccagcagattttctggcagcggctctggcaccgactacaccctgacaatatccagcctccagcctgaggacttcgccacctactactgtcagcagagctggaacaccccttggacattcggccagggcaccaagctggaaatcaagagactcgaggacctgaagaacgtgttcccacctgaggtggccgtgttcgagcctagcgaggccgagatcagccacacccagaaagccaccctcgtgtgcctggctaccggcttctaccccgaccatgtggaactgtcttggtgggtcaacggcaaagaggtgcacagcggcgtgtgtaccgacccccagccactgaaagaacagcccgccctgaacgacagccggtactgcctgagcagcagactgagagtgtccgccaccttctggcagaacccccggaaccacttcagatgccaggtgcagttctacggcctgagcgagaacgacgagtggacccaggacagagccaagcccgtgacccagatcgtgtctgccgaagcctggggcagagccgattgcggctttaccagcgagagctaccagcagggcgtgctgagcgccaccaacctgagcgtgatcggcttcagaatcctgctgctgaaagtggccggctttaacctgctgatgaccctgcggctgtggtccagcagggccaagcgatctggatctggagcaacaaacttctcactactcaaacaagcaggtgacgtggaggagaatcccgggcctactagtatggactggatttggcgcatccttttccttgtcggcgctgctaccggcgcgcattccgggccccagctccagctgcaagagtctggacctggcctggtcaagcctagcgagacactgagcctgacctgtaccgtgtccggcgatagcatcagcagcggcgattactactggggctggatcagacagcctcctggcaaaggactggaatggatcggccacatctactacagcggcgtgacctactacaaccccagcctgaagtccagagtgaccatcagcgtggacaccagccggaaccagttctccctgaagctgtctagcgtgacagccgccgataccgccgtgtactactgcaccagagaggacagcagcaactggcggagtagaggccagggaacactggtcacagttagctctggatccggcggaggcggaagtggaggcggaggatctggcggcggaggctctttcgaacaagttcagcttcaacagcctggcgctgagctggtcaaacctggcgcttctgtgaagatgagctgcaaagccagcggctacgccttcagcagctactggatcaactggatgaagcagaaacccggccagggactcgaatggatcggccaaatctatcccggcgacggcgacaccaactacaacggcaagttcaagggcagagccacactgaccgccgatacctctagcagcacagcctacatgcagctgagcagcctgaccagcgaagatagcgccgtgtacttctgtgcccggtccatcacaacagtcgtgggctgcgctatggactattggggccagggaacaagcgtgaccgtgtctagtacgcgtatccagaaccctgatcctgccgtgtaccagctgcgggatagcaagagcagcgacaagagcgtgtgtctgttcaccgacttcgacagccagaccaacgtgtcccagagcaaggactccgacgtgtacatcaccgataagtgcgtgctggacatgcggagcatggacttcaagagcaactccgccgtggcctggtccaacaagtccgatttcgcctgcgccaacgccttcaacaacagcattatccccgaggacacattcttcccaagccccgagagcagctgcgacgtgaagctggtggaaaagagcttcgagacagacaccaacctgaacttccagatcctgtacgagatcctgctgggcaaggccaccctgtacgccgtgctggtgtctgccctggtgctgatggctatggtcaagcggaaggacagccgggga

SEQ ID NO: 5748 - DNA, 2688 bp, synthetic construct
  source 1..2688: mol_type = other DNA
atggccttaccagtgaccgccttgctcctgccgctggccttgctgctccacgccgccaggccggaagtgcagctggttgaatctggcggaggactggttcagcctggcggatctctgagactgtcttgtgccgccagcggcttcagcttcagcgacttttggatgagctgggtccgacaggcccctggcaaaggacttgaatgggtcgccacaatcagccaggccggcagcgagaaggactacgtggactctgtgaagggcagattcaccatcagccgggacaacgccaagaagtccctgtacctccagatgaacagcctgagagccgaggacaccgccgtgtactattgtgcctctggcgtgtacagcttcgactacagaggccagggcaccctggtcacagtctcttctggtaccggcggaggcggatctggcggcggaggtagcggtggcggaggatctgaattccagatcgtgctgtctcagtctcctgccatcctgagcgcttccccaggcgagaaagtgaccatgacctgtagagccagcagcagcgtgtcctacatgcactggtatcagcagaagcccggcagcagccctaagccttggatctacgccaccagcaatctggcctctggcgtgccagccagattttctggctctggcagcggcaccagctacagcttcacaatcagcagagtggaagccgaggacgccgccacctactattgtcagcagtggaccttcaatcctcctaccttcggcggaggcacccggctggaaatcaaaagaacagtggctgctctcgaggacctgaagaacgtgttcccacctgaggtggccgtgttcgagcctagcgaggccgagatcagccacacccagaaagccaccctcgtgtgcctggctaccggcttctaccccgaccatgtggaactgtcttggtgggtcaacggcaaagaggtgcacagcggcgtgtgtaccgacccccagccactgaaagaacagcccgccctgaacgacagccggtactgcctgagcagcagactgagagtgtccgccaccttctggcagaacccccggaaccacttcagatgccaggtgcagttctacggcctgagcgagaacgacgagtggacccaggacagagccaagcccgtgacccagatcgtgtctgccgaagcctggggcagagccgattgcggctttaccagcgagagctaccagcagggcgtgctgagcgccaccaacctgagcgtgatcggcttcagaatcctgctgctgaaagtggccggctttaacctgctgatgaccctgcggctgtggtccagcagggccaagcgatctggatctggagcaacaaacttctcactactcaaacaagcaggtgacgtggaggagaatcccgggcctactagtatggactggatttggcgcatccttttccttgtcggcgctgctaccggcgcgcattccgggccccagctccagctgcaagagtctggacctggcctggtcaagcctagcgagacactgagcctgacctgtaccgtgtccggcgatagcatcagcagcggcgattactactggggctggatcagacagcctcctggcaaaggactggaatggatcggccacatctactacagcggcgtgacctactacaaccccagcctgaagtccagagtgaccatcagcgtggacaccagccggaaccagttctccctgaagctgtctagcgtgacagccgccgataccgccgtgtactactgcaccagagaggacagcagcaactggcggagtagaggccagggaacactggtcacagttagctctggatccggcggaggcggaagtggaggcggaggatctggcggcggaggctctttcgaacaggcttatctgcaacagagcggagccgaactcgtcagacctggcgcttctgtgaagatgagctgcaaggccagcggctacaccttcaccagctataatatgcactgggtcaagcagacccctcggcagggactcgaatggatcggcggaatctatcccggcaacggcgacacctcctacaaccagaagttcaagggcaaagccacactgaccgtgggcaagagcagcagcaccgcctatatgcagctcagcagcctgaccagcgaggacagcgccgtgtacttctgcgccagatacgactacaactacgctatggactactggggccagggcaccagcgtgacagttagctctgccagcacgcgtatccagaaccctgatcctgccgtgtaccagctgcgggatagcaagagcagcgacaagagcgtgtgtctgttcaccgacttcgacagccagaccaacgtgtcccagagcaaggactccgacgtgtacatcaccgataagtgcgtgctggacatgcggagcatggacttcaagagcaactccgccgtggcctggtccaacaagtccgatttcgcctgcgccaacgccttcaacaacagcattatccccgaggacacattcttcccaagccccgagagcagctgcgacgtgaagctggtggaaaagagcttcgagacagacaccaacctgaacttccagatcctgtacgagatcctgctgggcaaggccaccctgtacgccgtgctggtgtctgccctggtgctgatggctatggtcaagcggaaggacagccgggga

SEQ ID NO: 5749 - DNA, 2682 bp, synthetic construct
  source 1..2682: mol_type = other DNA
atggccttaccagtgaccgccttgctcctgccgctggccttgctgctccacgccgccaggccggaagtgcagctggttgaatctggcggaggactggttcagcctggcggatctctgagactgtcttgtgccgccagcggcttcagcttcagcgacttttggatgagctgggtccgacaggcccctggcaaaggacttgaatgggtcgccacaatcagccaggccggcagcgagaaggactacgtggactctgtgaagggcagattcaccatcagccgggacaacgccaagaagtccctgtacctccagatgaacagcctgagagccgaggacaccgccgtgtactattgtgcctctggcgtgtacagcttcgactacagaggccagggcaccctggtcacagtctcttctggtaccggcggaggcggatctggcggcggaggtagcggtggcggaggatctgaattcgagatcgtgctgacacagagccctgccaccctgtctctgagccctggcgaaagagccaccctgagctgtagagccagccagagcgtgtccagctacctggcctggtatcagcagaagcccggccaggctccccggctgctgatctacgatgccagcaatagagccaccggcatccccgccagattttccggctctggcagcggcaccgacttcaccctgaccatcagctccctggaacccgaggacttcgccgtgtactactgccagcagcggagcaactggcccatcacattcggccagggcacccggctggaaatcaaactcgaggacctgaagaacgtgttcccacctgaggtggccgtgttcgagcctagcgaggccgagatcagccacacccagaaagccaccctcgtgtgcctggctaccggcttctaccccgaccatgtggaactgtcttggtgggtcaacggcaaagaggtgcacagcggcgtgtgtaccgacccccagccactgaaagaacagcccgccctgaacgacagccggtactgcctgagcagcagactgagagtgtccgccaccttctggcagaacccccggaaccacttcagatgccaggtgcagttctacggcctgagcgagaacgacgagtggacccaggacagagccaagcccgtgacccagatcgtgtctgccgaagcctggggcagagccgattgcggctttaccagcgagagctaccagcagggcgtgctgagcgccaccaacctgagcgtgatcggcttcagaatcctgctgctgaaagtggccggctttaacctgctgatgaccctgcggctgtggtccagcagggccaagcgatctggatctggagcaacaaacttctcactactcaaacaagcaggtgacgtggaggagaatcccgggcctactagtatggactggatttggcgcatccttttccttgtcggcgctgctaccggcgcgcattccgggccccagctccagctgcaagagtctggacctggcctggtcaagcctagcgagacactgagcctgacctgtaccgtgtccggcgatagcatcagcagcggcgattactactggggctggatcagacagcctcctggcaaaggactggaatggatcggccacatctactacagcggcgtgacctactacaaccccagcctgaagtccagagtgaccatcagcgtggacaccagccggaaccagttctccctgaagctgtctagcgtgacagccgccgataccgccgtgtactactgcaccagagaggacagcagcaactggcggagtagaggccagggaacactggtcacagttagctctggatccggcggaggcggaagtggaggcggaggatctggcggcggaggctctttcgaagaggtgcagcttgttgagtctggcggaggactggtgcagcccgatagaagcctgagactgtcttgtgccgccagcggcttcaccttccacgattatgccatgcactgggtccgacaggcccctggcaaaggacttgaatgggtgtccaccatctcttggaacagcggcacaatcggctacgccgactctgtgaagggcagattcaccatcagccgggacaacgccaagaacagcctgtacctccagatgaactccctgagagccgaggacacagccctgtactactgcgccaaggacatccagtacggcaactactactacggcatggacgtgtggggccagggcacaacagtgacagtctcttctacgcgtatccagaaccctgatcctgccgtgtaccagctgcgggatagcaagagcagcgacaagagcgtgtgtctgttcaccgacttcgacagccagaccaacgtgtcccagagcaaggactccgacgtgtacatcaccgataagtgcgtgctggacatgcggagcatggacttcaagagcaactccgccgtggcctggtccaacaagtccgatttcgcctgcgccaacgccttcaacaacagcattatccccgaggacacattcttcccaagccccgagagcagctgcgacgtgaagctggtggaaaagagcttcgagacagacaccaacctgaacttccagatcctgtacgagatcctgctgggcaaggccaccctgtacgccgtgctggtgtctgccctggtgctgatggctatggtcaagcggaaggacagccgggga

SEQ ID NO: 5750 - DNA, 2667 bp, synthetic construct
  source 1..2667: mol_type = other DNA
atggccttaccagtgaccgccttgctcctgccgctggccttgctgctccacgccgccaggccggaagtgcagctggttgaatctggcggaggactggttcagcctggcggatctctgagactgtcttgtgccgccagcggcttcagcttcagcgacttttggatgagctgggtccgacaggcccctggcaaaggacttgaatgggtcgccacaatcagccaggccggcagcgagaaggactacgtggactctgtgaagggcagattcaccatcagccgggacaacgccaagaagtccctgtacctccagatgaacagcctgagagccgaggacaccgccgtgtactattgtgcctctggcgtgtacagcttcgactacagaggccagggcaccctggtcacagtctcttctggtaccggcggaggcggatctggcggcggaggtagcggtggcggaggatctgaattcgacatccagatgacacagagccctagcagcctgtctgccagcgtgggagatagagtgaccatcaactgcaaggccagccaggacatcaacagctacctgagctggttccagcagaagcctggcaaggcccctaagacactgatctaccgggccaacagactggtggatggcgtgccaagcagattttctggcagcggcagcggccaggattacaccctgacaatatccagcctccagcctgaggacttcgccacctactactgcctccagtacgacgagttccctctgacctttggcggaggcaccaaggtggaaatcaaactcgaggacctgaagaacgtgttcccacctgaggtggccgtgttcgagcctagcgaggccgagatcagccacacccagaaagccaccctcgtgtgcctggctaccggcttctaccccgaccatgtggaactgtcttggtgggtcaacggcaaagaggtgcacagcggcgtgtgtaccgacccccagccactgaaagaacagcccgccctgaacgacagccggtactgcctgagcagcagactgagagtgtccgccaccttctggcagaacccccggaaccacttcagatgccaggtgcagttctacggcctgagcgagaacgacgagtggacccaggacagagccaagcccgtgacccagatcgtgtctgccgaagcctggggcagagccgattgcggctttaccagcgagagctaccagcagggcgtgctgagcgccaccaacctgagcgtgatcggcttcagaatcctgctgctgaaagtggccggctttaacctgctgatgaccctgcggctgtggtccagcagggccaagcgatctggatctggagcaacaaacttctcactactcaaacaagcaggtgacgtggaggagaatcccgggcctactagtatggactggatttggcgcatccttttccttgtcggcgctgctaccggcgcgcattccgggccccagctccagctgcaagagtctggacctggcctggtcaagcctagcgagacactgagcctgacctgtaccgtgtccggcgatagcatcagcagcggcgattactactggggctggatcagacagcctcctggcaaaggactggaatggatcggccacatctactacagcggcgtgacctactacaaccccagcctgaagtccagagtgaccatcagcgtggacaccagccggaaccagttctccctgaagctgtctagcgtgacagccgccgataccgccgtgtactactgcaccagagaggacagcagcaactggcggagtagaggccagggaacactggtcacagttagctctggatccggcggaggcggaagtggaggcggaggatctggcggcggaggctctttcgaacaggtgcaactggtgcagtctggggccgaagtgaagaaacctggggcctctgtgaaggtgtcctgcaaagccagcggctacacctttaccaactacgacatcaactgggtccgacaggctccaggccaaggactggaatggatcggctggatctatcctggcgacggcagcaccaagtacaacgagaagttcaaggccaaggccacactgaccgccgataccagcacaagcaccgcctacatggaactgcggagcctgagaagcgacgacaccgccgtgtactattgtgcctccggctacgaggacgctatggactattggggccagggcaccaccgtgacagtgtctagtacgcgtatccagaaccctgatcctgccgtgtaccagctgcgggatagcaagagcagcgacaagagcgtgtgtctgttcaccgacttcgacagccagaccaacgtgtcccagagcaaggactccgacgtgtacatcaccgataagtgcgtgctggacatgcggagcatggacttcaagagcaactccgccgtggcctggtccaacaagtccgatttcgcctgcgccaacgccttcaacaacagcattatccccgaggacacattcttcccaagccccgagagcagctgcgacgtgaagctggtggaaaagagcttcgagacagacaccaacctgaacttccagatcctgtacgagatcctgctgggcaaggccaccctgtacgccgtgctggtgtctgccctggtgctgatggctatggtcaagcggaaggacagccgggga

SEQ ID NO: 5751 - DNA, 2673 bp, synthetic construct
  source 1..2673: mol_type = other DNA
atggccttaccagtgaccgccttgctcctgccgctggccttgctgctccacgccgccaggccggaagtgcagctggttgaatctggcggaggactggttcagcctggcggatctctgagactgtcttgtgccgccagcggcttcagcttcagcgacttttggatgagctgggtccgacaggcccctggcaaaggacttgaatgggtcgccacaatcagccaggccggcagcgagaaggactacgtggactctgtgaagggcagattcaccatcagccgggacaacgccaagaagtccctgtacctccagatgaacagcctgagagccgaggacaccgccgtgtactattgtgcctctggcgtgtacagcttcgactacagaggccagggcaccctggtcacagtctcttctggtaccggcggaggcggatctggcggcggaggtagcggtggcggaggatctgaattcgacatcgtgatgacccagacacctctgagcctgagcgtgacacctggacagcctgccagcattagctgcaagagcagccagtctctgctggacggcgacggcaagacctacctgaattggctgctccagaagcctggacagagccctcagcggctgatctacctggtgtccaagctggatagcggcgtgcccgatagattttctggcagcggctctggcaccgacttcaccctgaagatcagcagagtggaagccgaggacgtgggcgtgtactactgttggcagggcacacacttccccagaacattcggccagggcacaaagctggaaatcaaactcgaggacctgaagaacgtgttcccacctgaggtggccgtgttcgagcctagcgaggccgagatcagccacacccagaaagccaccctcgtgtgcctggctaccggcttctaccccgaccatgtggaactgtcttggtgggtcaacggcaaagaggtgcacagcggcgtgtgtaccgacccccagccactgaaagaacagcccgccctgaacgacagccggtactgcctgagcagcagactgagagtgtccgccaccttctggcagaacccccggaaccacttcagatgccaggtgcagttctacggcctgagcgagaacgacgagtggacccaggacagagccaagcccgtgacccagatcgtgtctgccgaagcctggggcagagccgattgcggctttaccagcgagagctaccagcagggcgtgctgagcgccaccaacctgagcgtgatcggcttcagaatcctgctgctgaaagtggccggctttaacctgctgatgaccctgcggctgtggtccagcagggccaagcgatctggatctggagcaacaaacttctcactactcaaacaagcaggtgacgtggaggagaatcccgggcctactagtatggactggatttggcgcatccttttccttgtcggcgctgctaccggcgcgcattccgggccccagctccagctgcaagagtctggacctggcctggtcaagcctagcgagacactgagcctgacctgtaccgtgtccggcgatagcatcagcagcggcgattactactggggctggatcagacagcctcctggcaaaggactggaatggatcggccacatctactacagcggcgtgacctactacaaccccagcctgaagtccagagtgaccatcagcgtggacaccagccggaaccagttctccctgaagctgtctagcgtgacagccgccgataccgccgtgtactactgcaccagagaggacagcagcaactggcggagtagaggccagggaacactggtcacagttagctctggatccggcggaggcggaagtggaggcggaggatctggcggcggaggctctttcgaacaagtgcaactggttcagagcggagccgaagtgaagaaacctggggcctctgtgaaggtgtcctgcaaggccagcggctacaccttcaaggacacctacatccactgggtccgacaggcccctggacaaggacttgagtggatgggcagaatcgaccccgccaacggcaacaccaaatacgaccccaagttccagggcagagtgaccatgaccagagacaccagcatcagcaccgcctacatggaactgagccggctgagatccgatgacaccgccgtgtactattgcgctagaagaggcggagtggattggggccagggaacactggttaccgtgtctagtacgcgtatccagaaccctgatcctgccgtgtaccagctgcgggatagcaagagcagcgacaagagcgtgtgtctgttcaccgacttcgacagccagaccaacgtgtcccagagcaaggactccgacgtgtacatcaccgataagtgcgtgctggacatgcggagcatggacttcaagagcaactccgccgtggcctggtccaacaagtccgatttcgcctgcgccaacgccttcaacaacagcattatccccgaggacacattcttcccaagccccgagagcagctgcgacgtgaagctggtggaaaagagcttcgagacagacaccaacctgaacttccagatcctgtacgagatcctgctgggcaaggccaccctgtacgccgtgctggtgtctgccctggtgctgatggctatggtcaagcggaaggacagccgggga

SEQ ID NO: 5752 - DNA, 2676 bp, synthetic construct
  source 1..2676: mol_type = other DNA
atggccttaccagtgaccgccttgctcctgccgctggccttgctgctccacgccgccaggccggaagtgcagctggttgaatctggcggaggactggttcagcctggcggatctctgagactgtcttgtgccgccagcggcttcagcttcagcgacttttggatgagctgggtccgacaggcccctggcaaaggacttgaatgggtcgccacaatcagccaggccggcagcgagaaggactacgtggactctgtgaagggcagattcaccatcagccgggacaacgccaagaagtccctgtacctccagatgaacagcctgagagccgaggacaccgccgtgtactattgtgcctctggcgtgtacagcttcgactacagaggccagggcaccctggtcacagtctcttctggtaccggcggaggcggatctggcggcggaggtagcggtggcggaggatctgaattcgacatccagatgacacagagccctagcagcctgtctgccagcgtgggagacagagtgaccatcacatgcaaggccagccaggatgtgtctacagccgtggcctggttccagcagaagcctggaaaagcccctaagctgctgatctacagccccagctacagatacaccggcgtgcccagcagattttctggcagcggctctggcaccgacttcaccctgacaatatccagcctccagcctgaggacttcacctactactgccagcagctctacagcaccccttacacattcggccagggcaccaaggtggaaatcaaactcgaggacctgaagaacgtgttcccacctgaggtggccgtgttcgagcctagcgaggccgagatcagccacacccagaaagccaccctcgtgtgcctggctaccggcttctaccccgaccatgtggaactgtcttggtgggtcaacggcaaagaggtgcacagcggcgtgtgtaccgacccccagccactgaaagaacagcccgccctgaacgacagccggtactgcctgagcagcagactgagagtgtccgccaccttctggcagaacccccggaaccacttcagatgccaggtgcagttctacggcctgagcgagaacgacgagtggacccaggacagagccaagcccgtgacccagatcgtgtctgccgaagcctggggcagagccgattgcggctttaccagcgagagctaccagcagggcgtgctgagcgccaccaacctgagcgtgatcggcttcagaatcctgctgctgaaagtggccggctttaacctgctgatgaccctgcggctgtggtccagcagggccaagcgatctggatctggagcaacaaacttctcactactcaaacaagcaggtgacgtggaggagaatcccgggcctactagtatggactggatttggcgcatccttttccttgtcggcgctgctaccggcgcgcattccgggccccagctccagctgcaagagtctggacctggcctggtcaagcctagcgagacactgagcctgacctgtaccgtgtccggcgatagcatcagcagcggcgattactactggggctggatcagacagcctcctggcaaaggactggaatggatcggccacatctactacagcggcgtgacctactacaaccccagcctgaagtccagagtgaccatcagcgtggacaccagccggaaccagttctccctgaagctgtctagcgtgacagccgccgataccgccgtgtactactgcaccagagaggacagcagcaactggcggagtagaggccagggaacactggtcacagttagctctggatccggcggaggcggaagtggaggcggaggatctggcggcggaggctctttcgaagaagtgcaactggttcagagcggagccgaagtgaagaaacctggggcctctgtgaaggtgtcctgcaaagccagcggctacacctttaccgactactacctggacgtggtcgtgcggcaagctcctggacaaggactggaatggatcggcagagtgaacccctacaacggcggcaccatctacaaccagaaattcaagggaagagtgaccctgaccagagacaccagcacctccacagcctacctggaactgagcagcctgagaagcgaagataccgccgtgtactactgcgccagggaccactacagatatgaccctctgctggactactggggccagggaaccctggttacagtgtctagtacgcgtatccagaaccctgatcctgccgtgtaccagctgcgggatagcaagagcagcgacaagagcgtgtgtctgttcaccgacttcgacagccagaccaacgtgtcccagagcaaggactccgacgtgtacatcaccgataagtgcgtgctggacatgcggagcatggacttcaagagcaactccgccgtggcctggtccaacaagtccgatttcgcctgcgccaacgccttcaacaacagcattatccccgaggacacattcttcccaagccccgagagcagctgcgacgtgaagctggtggaaaagagcttcgagacagacaccaacctgaacttccagatcctgtacgagatcctgctgggcaaggccaccctgtacgccgtgctggtgtctgccctggtgctgatggctatggtcaagcggaaggacagccgggga

SEQ ID NO: 5753 - DNA, 2694 bp, synthetic construct
  source 1..2694: mol_type = other DNA
atggccttaccagtgaccgccttgctcctgccgctggccttgctgctccacgccgccaggccggaagtgcagctggttgaatctggcggaggactggttcagcctggcggatctctgagactgtcttgtgccgccagcggcttcagcttcagcgacttttggatgagctgggtccgacaggcccctggcaaaggacttgaatgggtcgccacaatcagccaggccggcagcgagaaggactacgtggactctgtgaagggcagattcaccatcagccgggacaacgccaagaagtccctgtacctccagatgaacagcctgagagccgaggacaccgccgtgtactattgtgcctctggcgtgtacagcttcgactacagaggccagggcaccctggtcacagtctcttctggtaccggcggaggcggatctggcggcggaggtagcggtggcggaggatctgaattcgacatccagatgacacagagccctagcagcctgtctgccagcgtgggagacagagtgaccatcacctgtagagccagccagagcgtgtccaccagcagctacaactacatgcactggtatcagcagaagcccggcaagcctcctaagctgctgattaagtacgccagcaacctggaaagcggcgtgcccagcagattttctggcagcggctctggcaccgacttcaccctgacaatatccagcctccagcctgaggacttcgccacctactactgtcagcactcctgggagatccctctgacattcggccagggcaccaaggtggaaatcaaactcgaggacctgaagaacgtgttcccacctgaggtggccgtgttcgagcctagcgaggccgagatcagccacacccagaaagccaccctcgtgtgcctggctaccggcttctaccccgaccatgtggaactgtcttggtgggtcaacggcaaagaggtgcacagcggcgtgtgtaccgacccccagccactgaaagaacagcccgccctgaacgacagccggtactgcctgagcagcagactgagagtgtccgccaccttctggcagaacccccggaaccacttcagatgccaggtgcagttctacggcctgagcgagaacgacgagtggacccaggacagagccaagcccgtgacccagatcgtgtctgccgaagcctggggcagagccgattgcggctttaccagcgagagctaccagcagggcgtgctgagcgccaccaacctgagcgtgatcggcttcagaatcctgctgctgaaagtggccggctttaacctgctgatgaccctgcggctgtggtccagcagggccaagcgatctggatctggagcaacaaacttctcactactcaaacaagcaggtgacgtggaggagaatcccgggcctactagtatggactggatttggcgcatccttttccttgtcggcgctgctaccggcgcgcattccgggccccagctccagctgcaagagtctggacctggcctggtcaagcctagcgagacactgagcctgacctgtaccgtgtccggcgatagcatcagcagcggcgattactactggggctggatcagacagcctcctggcaaaggactggaatggatcggccacatctactacagcggcgtgacctactacaaccccagcctgaagtccagagtgaccatcagcgtggacaccagccggaaccagttctccctgaagctgtctagcgtgacagccgccgataccgccgtgtactactgcaccagagaggacagcagcaactggcggagtagaggccagggaacactggtcacagttagctctggatccggcggaggcggaagtggaggcggaggatctggcggcggaggctctttcgaagaagtgcaactggttcagagcggagccgaagtgaagaaacctggggcctctgtgaaggtgtcctgcaaggccagcggctacagcttcaccgactattatatgcactgggtccgacaggctccaggccagggacttgagtggatcggcagaatcaacccctacaacggcgctgccttctacagccagaacttcaaggatagagtgaccctgaccgtggacaccagcaccagcacagcctacctggaactgagcagcctgagaagcgaggacaccgccgtgtactactgcgccattgagagaggcgctgacctggaaggctacgctatggattattggggccagggaaccctggtcaccgtgtcatctacgcgtatccagaaccctgatcctgccgtgtaccagctgcgggatagcaagagcagcgacaagagcgtgtgtctgttcaccgacttcgacagccagaccaacgtgtcccagagcaaggactccgacgtgtacatcaccgataagtgcgtgctggacatgcggagcatggacttcaagagcaactccgccgtggcctggtccaacaagtccgatttcgcctgcgccaacgccttcaacaacagcattatccccgaggacacattcttcccaagccccgagagcagctgcgacgtgaagctggtggaaaagagcttcgagacagacaccaacctgaacttccagatcctgtacgagatcctgctgggcaaggccaccctgtacgccgtgctggtgtctgccctggtgctgatggctatggtcaagcggaaggacagccgggga

SEQ ID NO: 5754 - DNA, 2688 bp, synthetic construct
  source 1..2688: mol_type = other DNA
atggccttaccagtgaccgccttgctcctgccgctggccttgctgctccacgccgccaggccggaagtgcagctggttgaatctggcggaggactggttcagcctggcggatctctgagactgtcttgtgccgccagcggcttcagcttcagcgacttttggatgagctgggtccgacaggcccctggcaaaggacttgaatgggtcgccacaatcagccaggccggcagcgagaaggactacgtggactctgtgaagggcagattcaccatcagccgggacaacgccaagaagtccctgtacctccagatgaacagcctgagagccgaggacaccgccgtgtactattgtgcctctggcgtgtacagcttcgactacagaggccagggcaccctggtcacagtctcttctggtaccggcggaggcggatctggcggcggaggtagcggtggcggaggatctgaattcgagatcgtgctgacacagtctccagccacactgagcgcttctccaggcgagagagtgaccctgacctgtagagccagcagcaacgtgatctccagctacgtgcactggtatcagcagaagcctggcagcagccccagactgtttctgtacagcaccagcaatctggcctccggcgtgccaagcagattttctggctctggcagcggcaccgacttcacctttaccatctctagcctggaagccgaggacgccgccacctactactgtcagcagtacagcggctaccctctgaccttcggccagggcacaagactggaaatcaaactcgaggacctgaagaacgtgttcccacctgaggtggccgtgttcgagcctagcgaggccgagatcagccacacccagaaagccaccctcgtgtgcctggctaccggcttctaccccgaccatgtggaactgtcttggtgggtcaacggcaaagaggtgcacagcggcgtgtgtaccgacccccagccactgaaagaacagcccgccctgaacgacagccggtactgcctgagcagcagactgagagtgtccgccaccttctggcagaacccccggaaccacttcagatgccaggtgcagttctacggcctgagcgagaacgacgagtggacccaggacagagccaagcccgtgacccagatcgtgtctgccgaagcctggggcagagccgattgcggctttaccagcgagagctaccagcagggcgtgctgagcgccaccaacctgagcgtgatcggcttcagaatcctgctgctgaaagtggccggctttaacctgctgatgaccctgcggctgtggtccagcagggccaagcgatctggatctggagcaacaaacttctcactactcaaacaagcaggtgacgtggaggagaatcccgggcctactagtatggactggatttggcgcatccttttccttgtcggcgctgctaccggcgcgcattccgggccccagctccagctgcaagagtctggacctggcctggtcaagcctagcgagacactgagcctgacctgtaccgtgtccggcgatagcatcagcagcggcgattactactggggctggatcagacagcctcctggcaaaggactggaatggatcggccacatctactacagcggcgtgacctactacaaccccagcctgaagtccagagtgaccatcagcgtggacaccagccggaaccagttctccctgaagctgtctagcgtgacagccgccgataccgccgtgtactactgcaccagagaggacagcagcaactggcggagtagaggccagggaacactggtcacagttagctctggatccggcggaggcggaagtggaggcggaggatctggcggcggaggctctttcgaacaagttcagctgcaagagtctggccctggcctggtcaagcctagcgaaacactgagcctgacctgcgccgtgtctggctactctatcaccagcgcctactattggaactggatcagacagcctcctggcaaaggactggaatggatcggctacatcagctacgacggcagaaacaactacaaccccagcctgaagaaccggatcaccatcaatcccgacaccagcaagaaccagttcagcctccagctgaacagcgtgacccctgaggataccgccgtgtactactgtgccagagaaggcgactacgacgtgggcaactactacgctatggactactggggccagggaaccctggtcacagtctcttctacgcgtatccagaaccctgatcctgccgtgtaccagctgcgggatagcaagagcagcgacaagagcgtgtgtctgttcaccgacttcgacagccagaccaacgtgtcccagagcaaggactccgacgtgtacatcaccgataagtgcgtgctggacatgcggagcatggacttcaagagcaactccgccgtggcctggtccaacaagtccgatttcgcctgcgccaacgccttcaacaacagcattatccccgaggacacattcttcccaagccccgagagcagctgcgacgtgaagctggtggaaaagagcttcgagacagacaccaacctgaacttccagatcctgtacgagatcctgctgggcaaggccaccctgtacgccgtgctggtgtctgccctggtgctgatggctatggtcaagcggaaggacagccgggga

SEQ ID NO: 5755 - DNA, 2688 bp, synthetic construct
  source 1..2688: mol_type = other DNA
atggccttaccagtgaccgccttgctcctgccgctggccttgctgctccacgccgccaggccggaagtgcagctggttgaatctggcggaggactggttcagcctggcggatctctgagactgtcttgtgccgccagcggcttcagcttcagcgacttttggatgagctgggtccgacaggcccctggcaaaggacttgaatgggtcgccacaatcagccaggccggcagcgagaaggactacgtggactctgtgaagggcagattcaccatcagccgggacaacgccaagaagtccctgtacctccagatgaacagcctgagagccgaggacaccgccgtgtactattgtgcctctggcgtgtacagcttcgactacagaggccagggcaccctggtcacagtctcttctggtaccggcggaggcggatctggcggcggaggtagcggtggcggaggatctgaattcgagatcgtgctgacacagtctcccgccacactgtcactgtctccaggcgaaagagccacactgagctgtagagccagcagcaacgtgatctccagctacgtgcactggtatcagcagaagcctggacaggcccctcggctgctgatctacagcacaagcaatctggcctctggcatccccgccagattttctggctctggaagcggcaccgacttcaccctgaccataagcagcctggaacctgaggacttcgccgtgtactactgccagcagtatagcggctaccctctgaccttcggccagggcacaagactggaaatcaaactcgaggacctgaagaacgtgttcccacctgaggtggccgtgttcgagcctagcgaggccgagatcagccacacccagaaagccaccctcgtgtgcctggctaccggcttctaccccgaccatgtggaactgtcttggtgggtcaacggcaaagaggtgcacagcggcgtgtgtaccgacccccagccactgaaagaacagcccgccctgaacgacagccggtactgcctgagcagcagactgagagtgtccgccaccttctggcagaacccccggaaccacttcagatgccaggtgcagttctacggcctgagcgagaacgacgagtggacccaggacagagccaagcccgtgacccagatcgtgtctgccgaagcctggggcagagccgattgcggctttaccagcgagagctaccagcagggcgtgctgagcgccaccaacctgagcgtgatcggcttcagaatcctgctgctgaaagtggccggctttaacctgctgatgaccctgcggctgtggtccagcagggccaagcgatctggatctggagcaacaaacttctcactactcaaacaagcaggtgacgtggaggagaatcccgggcctactagtatggactggatttggcgcatccttttccttgtcggcgctgctaccggcgcgcattccgggccccagctccagctgcaagagtctggacctggcctggtcaagcctagcgagacactgagcctgacctgtaccgtgtccggcgatagcatcagcagcggcgattactactggggctggatcagacagcctcctggcaaaggactggaatggatcggccacatctactacagcggcgtgacctactacaaccccagcctgaagtccagagtgaccatcagcgtggacaccagccggaaccagttctccctgaagctgtctagcgtgacagccgccgataccgccgtgtactactgcaccagagaggacagcagcaactggcggagtagaggccagggaacactggtcacagttagctctggatccggcggaggcggaagtggaggcggaggatctggcggcggaggctctttcgaagaagtgcaactggtggaaagtggcggcggactggtgcaacctggaagaagcctgagactgtcctgtgccgccagcggctactctatcacaagcgcctactactggaactgggtccgacaggctcctggcaaaggactggaatgggtgtcctacatcagctacgacggcagaaacaactacaaccccagcctgaagaaccgcttcaccatcagccgggacaacgccaagaagtccctgtacctccagatgaacagcctgagagccgaggacacagccctgtactattgcgccaaagagggcgactacgacgtcggcaactactacgctatggactactggggccagggaaccaccgtgactgtctcttctacgcgtatccagaaccctgatcctgccgtgtaccagctgcgggatagcaagagcagcgacaagagcgtgtgtctgttcaccgacttcgacagccagaccaacgtgtcccagagcaaggactccgacgtgtacatcaccgataagtgcgtgctggacatgcggagcatggacttcaagagcaactccgccgtggcctggtccaacaagtccgatttcgcctgcgccaacgccttcaacaacagcattatccccgaggacacattcttcccaagccccgagagcagctgcgacgtgaagctggtggaaaagagcttcgagacagacaccaacctgaacttccagatcctgtacgagatcctgctgggcaaggccaccctgtacgccgtgctggtgtctgccctggtgctgatggctatggtcaagcggaaggacagccgggga

SEQ ID NO: 5756 - DNA, 2685 bp, synthetic construct
  source 1..2685: mol_type = other DNA
atggccttaccagtgaccgccttgctcctgccgctggccttgctgctccacgccgccaggccggaagtgcagctggttgaatctggcggaggactggttcagcctggcggatctctgagactgtcttgtgccgccagcggcttcagcttcagcgacttttggatgagctgggtccgacaggcccctggcaaaggacttgaatgggtcgccacaatcagccaggccggcagcgagaaggactacgtggactctgtgaagggcagattcaccatcagccgggacaacgccaagaagtccctgtacctccagatgaacagcctgagagccgaggacaccgccgtgtactattgtgcctctggcgtgtacagcttcgactacagaggccagggcaccctggtcacagtctcttctggtaccggcggaggcggatctggcggcggaggtagcggtggcggaggatctgaattcgacgtggtcatgacacagaccccactgagcctgcctgtgtctctgggagatcaggccagcatctcctgtagaagcagccagagcctggtgcacagcaacggcaacacctacctgcggtggtatctccagaagcctggacagagccccaaggtgctgatctacaaggtgtccaacagagtgtccggcgtgcccgatagattttctggcagcggctctggcaccgacttcaccctgaagatcaatagagtggaagccgaggacctgggcgtgtacttctgtagccagagcacccatgtgccttggacctttggcggaggcaccaagctggaaatcaagctcgaggacctgaagaacgtgttcccacctgaggtggccgtgttcgagcctagcgaggccgagatcagccacacccagaaagccaccctcgtgtgcctggctaccggcttctaccccgaccatgtggaactgtcttggtgggtcaacggcaaagaggtgcacagcggcgtgtgtaccgacccccagccactgaaagaacagcccgccctgaacgacagccggtactgcctgagcagcagactgagagtgtccgccaccttctggcagaacccccggaaccacttcagatgccaggtgcagttctacggcctgagcgagaacgacgagtggacccaggacagagccaagcccgtgacccagatcgtgtctgccgaagcctggggcagagccgattgcggctttaccagcgagagctaccagcagggcgtgctgagcgccaccaacctgagcgtgatcggcttcagaatcctgctgctgaaagtggccggctttaacctgctgatgaccctgcggctgtggtccagcagggccaagcgatctggatctggagcaacaaacttctcactactcaaacaagcaggtgacgtggaggagaatcccgggcctactagtatggactggatttggcgcatccttttccttgtcggcgctgctaccggcgcgcattccgggccccagctccagctgcaagagtctggacctggcctggtcaagcctagcgagacactgagcctgacctgtaccgtgtccggcgatagcatcagcagcggcgattactactggggctggatcagacagcctcctggcaaaggactggaatggatcggccacatctactacagcggcgtgacctactacaaccccagcctgaagtccagagtgaccatcagcgtggacaccagccggaaccagttctccctgaagctgtctagcgtgacagccgccgataccgccgtgtactactgcaccagagaggacagcagcaactggcggagtagaggccagggaacactggtcacagttagctctggatccggcggaggcggaagtggaggcggaggatctggcggcggaggctctttcgaaggcgtgaagctggacgagacaggcggaggacttgttcaacctggcggagccatgaagctgagctgtgtgaccagcggctttaccttcggccactactggatgaactgggtccgacagtcccctgagaaaggactggaatgggtcgcccagttcagaaacaagccctacaactacgaaacctactacagcgacagcgtgaagggcagattcaccatcagccgggacgacagcaagtccagcgtgtacctccagatgaacaacctgcgcgtggaagataccggcatctactactgtaccggggccagctacggcatggaatatctcggccagggcaccagcgtgaccgtgtctacaacgcgtatccagaaccctgatcctgccgtgtaccagctgcgggatagcaagagcagcgacaagagcgtgtgtctgttcaccgacttcgacagccagaccaacgtgtcccagagcaaggactccgacgtgtacatcaccgataagtgcgtgctggacatgcggagcatggacttcaagagcaactccgccgtggcctggtccaacaagtccgatttcgcctgcgccaacgccttcaacaacagcattatccccgaggacacattcttcccaagccccgagagcagctgcgacgtgaagctggtggaaaagagcttcgagacagacaccaacctgaacttccagatcctgtacgagatcctgctgggcaaggccaccctgtacgccgtgctggtgtctgccctggtgctgatggctatggtcaagcggaaggacagccgggga

SEQ ID NO: 5757 - DNA, 2703 bp, synthetic construct
  source 1..2703: mol_type = other DNA
atggccttaccagtgaccgccttgctcctgccgctggccttgctgctccacgccgccaggccggaagtgcagctggttgaatctggcggaggactggttcagcctggcggatctctgagactgtcttgtgccgccagcggcttcagcttcagcgacttttggatgagctgggtccgacaggcccctggcaaaggacttgaatgggtcgccacaatcagccaggccggcagcgagaaggactacgtggactctgtgaagggcagattcaccatcagccgggacaacgccaagaagtccctgtacctccagatgaacagcctgagagccgaggacaccgccgtgtactattgtgcctctggcgtgtacagcttcgactacagaggccagggcaccctggtcacagtctcttctggtaccggcggaggcggatctggcggcggaggtagcggtggcggaggatctgaattccaggtgcaactggtggaatctggcggcaatctggttcagcctggcggctctctgagactgtcttgtgccgccagcggcttcaccttcggcagcttttctatgagctgggtccgacaagctcctggcggaggacttgaatgggtggcaggactgtctgccagaagcagcctgacacactacgccgactctgtgaagggcagattcaccatcagccgggacaacgccaagaacagcgtgtacctccagatgaacagcctgagagtggaagataccgccgtgtactactgcgccagaagaagctacgacagcagcggctactggggccacttctacagctacatggatgtgtggggccagggcaccctggttacagtttctctcgaggacctgaagaacgtgttcccacctgaggtggccgtgttcgagcctagcgaggccgagatcagccacacccagaaagccaccctcgtgtgcctggctaccggcttctaccccgaccatgtggaactgtcttggtgggtcaacggcaaagaggtgcacagcggcgtgtgtaccgacccccagccactgaaagaacagcccgccctgaacgacagccggtactgcctgagcagcagactgagagtgtccgccaccttctggcagaacccccggaaccacttcagatgccaggtgcagttctacggcctgagcgagaacgacgagtggacccaggacagagccaagcccgtgacccagatcgtgtctgccgaagcctggggcagagccgattgcggctttaccagcgagagctaccagcagggcgtgctgagcgccaccaacctgagcgtgatcggcttcagaatcctgctgctgaaagtggccggctttaacctgctgatgaccctgcggctgtggtccagcagggccaagcgatctggatctggagcaacaaacttctcactactcaaacaagcaggtgacgtggaggagaatcccgggcctactagtatggactggatttggcgcatccttttccttgtcggcgctgctaccggcgcgcattccgggccccagctccagctgcaagagtctggacctggcctggtcaagcctagcgagacactgagcctgacctgtaccgtgtccggcgatagcatcagcagcggcgattactactggggctggatcagacagcctcctggcaaaggactggaatggatcggccacatctactacagcggcgtgacctactacaaccccagcctgaagtccagagtgaccatcagcgtggacaccagccggaaccagttctccctgaagctgtctagcgtgacagccgccgataccgccgtgtactactgcaccagagaggacagcagcaactggcggagtagaggccagggaacactggtcacagttagctctggatccggcggaggcggaagtggaggcggaggatctggcggcggaggctctttcgaatctgtgctgacccagcctagctccgtgtctgctgctcctggacagaaagtgaccatctcctgtagcggcagcaccagcaacatcggcaacaactacgtgtcctggtatcagcagcaccccggcaaggcccctaagctgatgatctacgacgtgtccaagaggcccagcggcgtgccagatagattttccggcagcaagagcggcaacagcgccagcctggatattagcggactccagtctgaggacgaggccgactactattgcgccgcctgggatgatagcctgagcgagtttctgtttggcaccggcaccaagctgacagtgcttggaacgcgtatccagaaccctgatcctgccgtgtaccagctgcgggatagcaagagcagcgacaagagcgtgtgtctgttcaccgacttcgacagccagaccaacgtgtcccagagcaaggactccgacgtgtacatcaccgataagtgcgtgctggacatgcggagcatggacttcaagagcaactccgccgtggcctggtccaacaagtccgatttcgcctgcgccaacgccttcaacaacagcattatccccgaggacacattcttcccaagccccgagagcagctgcgacgtgaagctggtggaaaagagcttcgagacagacaccaacctgaacttccagatcctgtacgagatcctgctgggcaaggccaccctgtacgccgtgctggtgtctgccctggtgctgatggctatggtcaagcggaaggacagccgggga

SEQ ID NO: 5758 - DNA, 2688 bp, synthetic construct
  source 1..2688: mol_type = other DNA
atggccttaccagtgaccgccttgctcctgccgctggccttgctgctccacgccgccaggccggaagtgcagctggttgaatctggcggaggactggttcagcctggcggatctctgagactgtcttgtgccgccagcggcttcagcttcagcgacttttggatgagctgggtccgacaggcccctggcaaaggacttgaatgggtcgccacaatcagccaggccggcagcgagaaggactacgtggactctgtgaagggcagattcaccatcagccgggacaacgccaagaagtccctgtacctccagatgaacagcctgagagccgaggacaccgccgtgtactattgtgcctctggcgtgtacagcttcgactacagaggccagggcaccctggtcacagtctcttctggtaccggcggaggcggatctggcggcggaggtagcggtggcggaggatctgaattcgacgtggtcatgacacagagcccttctagcctgtctgccagcgtgggcgacagagtgacaatcacctgtcagagcagcctggacatcagccactacctgaactggtatcagcagaagcccggcaaggcccctaagctgctgatctacgacgccagcaatctggaaaccggcgtgcccagcagattttctggcagcggaagcggcacccacttcaccttcacaatatccagcctccagcctgaggacttcgccacctactactgccagcagtacgacaacctgcctctgacctttggcggaggcaccaagctggaaatcaagagactcgaggacctgaagaacgtgttcccacctgaggtggccgtgttcgagcctagcgaggccgagatcagccacacccagaaagccaccctcgtgtgcctggctaccggcttctaccccgaccatgtggaactgtcttggtgggtcaacggcaaagaggtgcacagcggcgtgtgtaccgacccccagccactgaaagaacagcccgccctgaacgacagccggtactgcctgagcagcagactgagagtgtccgccaccttctggcagaacccccggaaccacttcagatgccaggtgcagttctacggcctgagcgagaacgacgagtggacccaggacagagccaagcccgtgacccagatcgtgtctgccgaagcctggggcagagccgattgcggctttaccagcgagagctaccagcagggcgtgctgagcgccaccaacctgagcgtgatcggcttcagaatcctgctgctgaaagtggccggctttaacctgctgatgaccctgcggctgtggtccagcagggccaagcgatctggatctggagcaacaaacttctcactactcaaacaagcaggtgacgtggaggagaatcccgggcctactagtatggactggatttggcgcatccttttccttgtcggcgctgctaccggcgcgcattccgggccccagctccagctgcaagagtctggacctggcctggtcaagcctagcgagacactgagcctgacctgtaccgtgtccggcgatagcatcagcagcggcgattactactggggctggatcagacagcctcctggcaaaggactggaatggatcggccacatctactacagcggcgtgacctactacaaccccagcctgaagtccagagtgaccatcagcgtggacaccagccggaaccagttctccctgaagctgtctagcgtgacagccgccgataccgccgtgtactactgcaccagagaggacagcagcaactggcggagtagaggccagggaacactggtcacagttagctctggatccggcggaggcggaagtggaggcggaggatctggcggcggaggctctttcgaacaagttcaactggttcaatcaggcggaggcgtggtgcaacctggtggctctctgagagtgtcttgtgctgcctctggcgtgaccctgagcgactatggaatgcactgggtccgacaggcccctggcaaaggacttgagtgggtcgccttcatcagaaacgacggcagcgacaagtattacgccgacagcgtgaagggcagattcaccatcagccgggacaacagcgagaaaaccgtgtctctccagatgtctagcctgagagccgaggacaccgccgtgtactactgtgccaagaatggcgagagcggccctctggactactggtatctggatctgtggggcagaggcaccctggtcacagtctcttctacgcgtatccagaaccctgatcctgccgtgtaccagctgcgggatagcaagagcagcgacaagagcgtgtgtctgttcaccgacttcgacagccagaccaacgtgtcccagagcaaggactccgacgtgtacatcaccgataagtgcgtgctggacatgcggagcatggacttcaagagcaactccgccgtggcctggtccaacaagtccgatttcgcctgcgccaacgccttcaacaacagcattatccccgaggacacattcttcccaagccccgagagcagctgcgacgtgaagctggtggaaaagagcttcgagacagacaccaacctgaacttccagatcctgtacgagatcctgctgggcaaggccaccctgtacgccgtgctggtgtctgccctggtgctgatggctatggtcaagcggaaggacagccgggga

SEQ ID NO: 5759 - DNA, 2700 bp, synthetic construct
  source 1..2700: mol_type = other DNA
atggccttaccagtgaccgccttgctcctgccgctggccttgctgctccacgccgccaggccggaagtgcagctggttgaatctggcggaggactggttcagcctggcggatctctgagactgtcttgtgccgccagcggcttcagcttcagcgacttttggatgagctgggtccgacaggcccctggcaaaggacttgaatgggtcgccacaatcagccaggccggcagcgagaaggactacgtggactctgtgaagggcagattcaccatcagccgggacaacgccaagaagtccctgtacctccagatgaacagcctgagagccgaggacaccgccgtgtactattgtgcctctggcgtgtacagcttcgactacagaggccagggcaccctggtcacagtctcttctggtaccggcggaggcggatctggcggcggaggtagcggtggcggaggatctgaattcagctacgagctgacacagcctccatccgtgtctggcacacctggacagagagtggctatctcctgtagcggcagcagcagcaacatcggcaccagaatggtcacctggtatcagcacgtgccaggcacagcccctaagctgctgatcttcaacaacaaccagcggcctagcggcgtgcccgatagattttctgccagcaagagcggcacaagcgccagcctggctatcatcggactccagtctgacgacgaggccgactactactgtgccacctgggacgacaacgtgaagtcctacgtgttcggcaccggcaccaaagtgacagtgcttggaagtagactcgaggacctgaagaacgtgttcccacctgaggtggccgtgttcgagcctagcgaggccgagatcagccacacccagaaagccaccctcgtgtgcctggctaccggcttctaccccgaccatgtggaactgtcttggtgggtcaacggcaaagaggtgcacagcggcgtgtgtaccgacccccagccactgaaagaacagcccgccctgaacgacagccggtactgcctgagcagcagactgagagtgtccgccaccttctggcagaacccccggaaccacttcagatgccaggtgcagttctacggcctgagcgagaacgacgagtggacccaggacagagccaagcccgtgacccagatcgtgtctgccgaagcctggggcagagccgattgcggctttaccagcgagagctaccagcagggcgtgctgagcgccaccaacctgagcgtgatcggcttcagaatcctgctgctgaaagtggccggctttaacctgctgatgaccctgcggctgtggtccagcagggccaagcgatctggatctggagcaacaaacttctcactactcaaacaagcaggtgacgtggaggagaatcccgggcctactagtatggactggatttggcgcatccttttccttgtcggcgctgctaccggcgcgcattccgggccccagctccagctgcaagagtctggacctggcctggtcaagcctagcgagacactgagcctgacctgtaccgtgtccggcgatagcatcagcagcggcgattactactggggctggatcagacagcctcctggcaaaggactggaatggatcggccacatctactacagcggcgtgacctactacaaccccagcctgaagtccagagtgaccatcagcgtggacaccagccggaaccagttctccctgaagctgtctagcgtgacagccgccgataccgccgtgtactactgcaccagagaggacagcagcaactggcggagtagaggccagggaacactggtcacagttagctctggatccggcggaggcggaagtggaggcggaggatctggcggcggaggctctttcgaacttgaaatggcccaggttcagctccagcagtggggagctggactgctgaagcctagcgagacactgagcctgacctgtgctgtgtacggcggcagcttcagcggctactactggtcctggatcagacagcctcctggcaaaggactggaatggatcggcgagatcaaccacagcggctccaccaactacaaccccagcctgaagtccagagtgaccatcagcgtggacaccagcaagaaccagttctccctgaagctgagcagcgtgacagccgctgataccgccgtgtactattgcgctagagcccctcagtcttggtacgtgggagatgtgtggggccagggcacactggttacagtgtcatctacgcgtatccagaaccctgatcctgccgtgtaccagctgcgggatagcaagagcagcgacaagagcgtgtgtctgttcaccgacttcgacagccagaccaacgtgtcccagagcaaggactccgacgtgtacatcaccgataagtgcgtgctggacatgcggagcatggacttcaagagcaactccgccgtggcctggtccaacaagtccgatttcgcctgcgccaacgccttcaacaacagcattatccccgaggacacattcttcccaagccccgagagcagctgcgacgtgaagctggtggaaaagagcttcgagacagacaccaacctgaacttccagatcctgtacgagatcctgctgggcaaggccaccctgtacgccgtgctggtgtctgccctggtgctgatggctatggtcaagcggaaggacagccgggga

SEQ ID NO: 5760 - DNA, 2691 bp, synthetic construct
  source 1..2691: mol_type = other DNA
atggccttaccagtgaccgccttgctcctgccgctggccttgctgctccacgccgccaggccggaagtgcagctggttgaatctggcggaggactggttcagcctggcggatctctgagactgtcttgtgccgccagcggcttcagcttcagcgacttttggatgagctgggtccgacaggcccctggcaaaggacttgaatgggtcgccacaatcagccaggccggcagcgagaaggactacgtggactctgtgaagggcagattcaccatcagccgggacaacgccaagaagtccctgtacctccagatgaacagcctgagagccgaggacaccgccgtgtactattgtgcctctggcgtgtacagcttcgactacagaggccagggcaccctggtcacagtctcttctggtaccggcggaggcggatctggcggcggaggtagcggtggcggaggatctgaattccagtctgtgctgacacagcctcctagcctgtctgtggcccctggaaagacagccagcatcacatgcggcggcaacaacatcggcatgaagtccgtgcactggtatcagcagaggccaggacaggctcctgtgctggtcatctactacgacagcgacagaccctctggcatccccggcagattttccggcagcaactctggcaataccgccacactgaccatctccagagtggaagctggcgacgaggccgactactactgccaagtgtgggataccaccggcgatcaccctggctatgtgtttggcaccggcaccaaagtgacagtgcttctcgaggacctgaagaacgtgttcccacctgaggtggccgtgttcgagcctagcgaggccgagatcagccacacccagaaagccaccctcgtgtgcctggctaccggcttctaccccgaccatgtggaactgtcttggtgggtcaacggcaaagaggtgcacagcggcgtgtgtaccgacccccagccactgaaagaacagcccgccctgaacgacagccggtactgcctgagcagcagactgagagtgtccgccaccttctggcagaacccccggaaccacttcagatgccaggtgcagttctacggcctgagcgagaacgacgagtggacccaggacagagccaagcccgtgacccagatcgtgtctgccgaagcctggggcagagccgattgcggctttaccagcgagagctaccagcagggcgtgctgagcgccaccaacctgagcgtgatcggcttcagaatcctgctgctgaaagtggccggctttaacctgctgatgaccctgcggctgtggtccagcagggccaagcgatctggatctggagcaacaaacttctcactactcaaacaagcaggtgacgtggaggagaatcccgggcctactagtatggactggatttggcgcatccttttccttgtcggcgctgctaccggcgcgcattccgggccccagctccagctgcaagagtctggacctggcctggtcaagcctagcgagacactgagcctgacctgtaccgtgtccggcgatagcatcagcagcggcgattactactggggctggatcagacagcctcctggcaaaggactggaatggatcggccacatctactacagcggcgtgacctactacaaccccagcctgaagtccagagtgaccatcagcgtggacaccagccggaaccagttctccctgaagctgtctagcgtgacagccgccgataccgccgtgtactactgcaccagagaggacagcagcaactggcggagtagaggccagggaacactggtcacagttagctctggatccggcggaggcggaagtggaggcggaggatctggcggcggaggctctttcgaacaagttcaactggttcagagcggagccgaagtgaagaaacctggcagcagcgtgaaggtgtcctgcaaagcaagcggcggcacctttagcagctacgccatctcttgggtccgacaggcacctggacaaggactggaatggatgggcggcatcatccccatcttcggcacagccaattacgcccagaaattccagggcagagtgaccatcaccgccgacgagtctacaagcaccgcctacatggaactgagcagcctgagaagcgaggacaccgccgtgtactattgtgccagaggcgtgtacggctacagcggctctgccccttatgatgagtggggccagggaaccctggtcaccgtttcttctacgcgtatccagaaccctgatcctgccgtgtaccagctgcgggatagcaagagcagcgacaagagcgtgtgtctgttcaccgacttcgacagccagaccaacgtgtcccagagcaaggactccgacgtgtacatcaccgataagtgcgtgctggacatgcggagcatggacttcaagagcaactccgccgtggcctggtccaacaagtccgatttcgcctgcgccaacgccttcaacaacagcattatccccgaggacacattcttcccaagccccgagagcagctgcgacgtgaagctggtggaaaagagcttcgagacagacaccaacctgaacttccagatcctgtacgagatcctgctgggcaaggccaccctgtacgccgtgctggtgtctgccctggtgctgatggctatggtcaagcggaaggacagccgggga

SEQ ID NO: 5761 - DNA, 2685 bp, synthetic construct
  source 1..2685: mol_type = other DNA
atggccttaccagtgaccgccttgctcctgccgctggccttgctgctccacgccgccaggccggaagtgcagctggttgaatctggcggaggactggttcagcctggcggatctctgagactgtcttgtgccgccagcggcttcagcttcagcgacttttggatgagctgggtccgacaggcccctggcaaaggacttgaatgggtcgccacaatcagccaggccggcagcgagaaggactacgtggactctgtgaagggcagattcaccatcagccgggacaacgccaagaagtccctgtacctccagatgaacagcctgagagccgaggacaccgccgtgtactattgtgcctctggcgtgtacagcttcgactacagaggccagggcaccctggtcacagtctcttctggtaccggcggaggcggatctggcggcggaggtagcggtggcggaggatctgaattcgaggtgcaactggttgagtctggcggaggactggtgcagcctggaagaagcctgagactgtcttgtgccgccagcggcttcaccttcgacgattatgccatgcactgggtccgacaggcccctggcaaaggacttgaatgggtgtccggcatctcctggaacagcggctctatcggctacgccgattccgtgaagggcagattcaccatcagccgggacaacgccaagaacagcctgtacctccagatgaactccctgagagccgaggacacagccctgtactactgcgccaaagacaaaggcggaggctactacgacttttggagcggcagcgattattggggccagggcacactggtcacagtgtctagcctcgaggacctgaagaacgtgttcccacctgaggtggccgtgttcgagcctagcgaggccgagatcagccacacccagaaagccaccctcgtgtgcctggctaccggcttctaccccgaccatgtggaactgtcttggtgggtcaacggcaaagaggtgcacagcggcgtgtgtaccgacccccagccactgaaagaacagcccgccctgaacgacagccggtactgcctgagcagcagactgagagtgtccgccaccttctggcagaacccccggaaccacttcagatgccaggtgcagttctacggcctgagcgagaacgacgagtggacccaggacagagccaagcccgtgacccagatcgtgtctgccgaagcctggggcagagccgattgcggctttaccagcgagagctaccagcagggcgtgctgagcgccaccaacctgagcgtgatcggcttcagaatcctgctgctgaaagtggccggctttaacctgctgatgaccctgcggctgtggtccagcagggccaagcgatctggatctggagcaacaaacttctcactactcaaacaagcaggtgacgtggaggagaatcccgggcctactagtatggactggatttggcgcatccttttccttgtcggcgctgctaccggcgcgcattccgggccccagctccagctgcaagagtctggacctggcctggtcaagcctagcgagacactgagcctgacctgtaccgtgtccggcgatagcatcagcagcggcgattactactggggctggatcagacagcctcctggcaaaggactggaatggatcggccacatctactacagcggcgtgacctactacaaccccagcctgaagtccagagtgaccatcagcgtggacaccagccggaaccagttctccctgaagctgtctagcgtgacagccgccgataccgccgtgtactactgcaccagagaggacagcagcaactggcggagtagaggccagggaacactggtcacagttagctctggatccggcggaggcggaagtggaggcggaggatctggcggcggaggctctttcgaatcttctgagctgacacaggaccctgccgtgtctgttgctctgggccagacagtgcggattacctgtcagggcgatagcctgagaagctactacgcctcctggtatcagcagaagccaggccaggctcctgtgctggtcatctacggcaagaacaacagacccagcggcatccccgatagattcagcggaagcagctctggcaataccgccagcctgacaattactggcgctcaggccgaggacgaggccgactactactgcaacagcagagatagcagcggctgggttttcggcggaggcacaaaactgacagtgctgacgcgtatccagaaccctgatcctgccgtgtaccagctgcgggatagcaagagcagcgacaagagcgtgtgtctgttcaccgacttcgacagccagaccaacgtgtcccagagcaaggactccgacgtgtacatcaccgataagtgcgtgctggacatgcggagcatggacttcaagagcaactccgccgtggcctggtccaacaagtccgatttcgcctgcgccaacgccttcaacaacagcattatccccgaggacacattcttcccaagccccgagagcagctgcgacgtgaagctggtggaaaagagcttcgagacagacaccaacctgaacttccagatcctgtacgagatcctgctgggcaaggccaccctgtacgccgtgctggtgtctgccctggtgctgatggctatggtcaagcggaaggacagccgggga

SEQ ID NO: 5762 - DNA, 2712 bp, synthetic construct
  source 1..2712: mol_type = other DNA
atggccttaccagtgaccgccttgctcctgccgctggccttgctgctccacgccgccaggccggaagtgcagctggttgaatctggcggaggactggttcagcctggcggatctctgagactgtcttgtgccgccagcggcttcagcttcagcgacttttggatgagctgggtccgacaggcccctggcaaaggacttgaatgggtcgccacaatcagccaggccggcagcgagaaggactacgtggactctgtgaagggcagattcaccatcagccgggacaacgccaagaagtccctgtacctccagatgaacagcctgagagccgaggacaccgccgtgtactattgtgcctctggcgtgtacagcttcgactacagaggccagggcaccctggtcacagtctcttctggtaccggcggaggcggatctggcggcggaggtagcggtggcggaggatctgaattcgaagtgcagctccagcagtctggacctggcctggttaagcctagccagacactgagcctgacctgtgccatcagcggcgatagcgtgctgagcaacagcgacacctggaactggatcagacagagccctagcagaggactggaatggctgggcagaacctaccacagaagcacttggtacgacgactacgccagctctgtgcggggcagagtgtccatcaatgtggacaccagcaagaaccagtacagcctgcaactgaacgccgtgacacctgaggataccggcgtgtactactgcgccagagacagactccaggacggcaactcttggagcgacgcctttgatgtgtggggccagggcacaatggtcaccgtttctagcctcgaggacctgaagaacgtgttcccacctgaggtggccgtgttcgagcctagcgaggccgagatcagccacacccagaaagccaccctcgtgtgcctggctaccggcttctaccccgaccatgtggaactgtcttggtgggtcaacggcaaagaggtgcacagcggcgtgtgtaccgacccccagccactgaaagaacagcccgccctgaacgacagccggtactgcctgagcagcagactgagagtgtccgccaccttctggcagaacccccggaaccacttcagatgccaggtgcagttctacggcctgagcgagaacgacgagtggacccaggacagagccaagcccgtgacccagatcgtgtctgccgaagcctggggcagagccgattgcggctttaccagcgagagctaccagcagggcgtgctgagcgccaccaacctgagcgtgatcggcttcagaatcctgctgctgaaagtggccggctttaacctgctgatgaccctgcggctgtggtccagcagggccaagcgatctggatctggagcaacaaacttctcactactcaaacaagcaggtgacgtggaggagaatcccgggcctactagtatggactggatttggcgcatccttttccttgtcggcgctgctaccggcgcgcattccgggccccagctccagctgcaagagtctggacctggcctggtcaagcctagcgagacactgagcctgacctgtaccgtgtccggcgatagcatcagcagcggcgattactactggggctggatcagacagcctcctggcaaaggactggaatggatcggccacatctactacagcggcgtgacctactacaaccccagcctgaagtccagagtgaccatcagcgtggacaccagccggaaccagttctccctgaagctgtctagcgtgacagccgccgataccgccgtgtactactgcaccagagaggacagcagcaactggcggagtagaggccagggaacactggtcacagttagctctggatccggcggaggcggaagtggaggcggaggatctggcggcggaggctctttcgaacaatctgctctgacacagcctgccagcgtgtcaggatctcctggacagagcatcaccatctcttgcaccggcaccagctctgatgtcggcggctacaattacgtgtcctggtatcagcagcaccccggcaaggcccctaagctgatgatctacgacgtgtccaacagacccagcggcgtgtccaatagattctccggcagcaagagcggcaacaccgccagcctgacaatttctggactgcaagccgaggacgaggccgactactactgtagcagctacaccagcagcagcacactggtgtacgtgttcggcacaggcaccaaagtgaccgtgcttacgcgtatccagaaccctgatcctgccgtgtaccagctgcgggatagcaagagcagcgacaagagcgtgtgtctgttcaccgacttcgacagccagaccaacgtgtcccagagcaaggactccgacgtgtacatcaccgataagtgcgtgctggacatgcggagcatggacttcaagagcaactccgccgtggcctggtccaacaagtccgatttcgcctgcgccaacgccttcaacaacagcattatccccgaggacacattcttcccaagccccgagagcagctgcgacgtgaagctggtggaaaagagcttcgagacagacaccaacctgaacttccagatcctgtacgagatcctgctgggcaaggccaccctgtacgccgtgctggtgtctgccctggtgctgatggctatggtcaagcggaaggacagccgggga

SEQ ID NO: 5763 - DNA, 2646 bp, synthetic construct
  source 1..2646: mol_type = other DNA
atggccttaccagtgaccgccttgctcctgccgctggccttgctgctccacgccgccaggccggaagtgcagctggttgaatctggcggaggactggttcagcctggcggatctctgagactgtcttgtgccgccagcggcttcagcttcagcgacttttggatgagctgggtccgacaggcccctggcaaaggacttgaatgggtcgccacaatcagccaggccggcagcgagaaggactacgtggactctgtgaagggcagattcaccatcagccgggacaacgccaagaagtccctgtacctccagatgaacagcctgagagccgaggacaccgccgtgtactattgtgcctctggcgtgtacagcttcgactacagaggccagggcaccctggtcacagtctcttctggtaccggcggaggcggatctggcggcggaggtagcggtggcggaggatctgaattccaggtgcaactggttcagtctggggccgaagtgaagaaacctggggcctctgtgaaggtgtcctgcaaggcttccggctacacctttaccagctacgacatcaactgggtccgacaggccacaggccaaggactggaatggatgggctggatgaaccccaacagcggcaataccggctacgcccagaaattccagggcagagtgaccatgaccagaaacaccagcatcagcaccgcctacatggaactgagcagcctgagaagcgaggacaccgccgtgtactattgcgccagaggcgacagcaccaaggtggaaatcaaactcgaggacctgaagaacgtgttcccacctgaggtggccgtgttcgagcctagcgaggccgagatcagccacacccagaaagccaccctcgtgtgcctggctaccggcttctaccccgaccatgtggaactgtcttggtgggtcaacggcaaagaggtgcacagcggcgtgtgtaccgacccccagccactgaaagaacagcccgccctgaacgacagccggtactgcctgagcagcagactgagagtgtccgccaccttctggcagaacccccggaaccacttcagatgccaggtgcagttctacggcctgagcgagaacgacgagtggacccaggacagagccaagcccgtgacccagatcgtgtctgccgaagcctggggcagagccgattgcggctttaccagcgagagctaccagcagggcgtgctgagcgccaccaacctgagcgtgatcggcttcagaatcctgctgctgaaagtggccggctttaacctgctgatgaccctgcggctgtggtccagcagggccaagcgatctggatctggagcaacaaacttctcactactcaaacaagcaggtgacgtggaggagaatcccgggcctactagtatggactggatttggcgcatccttttccttgtcggcgctgctaccggcgcgcattccgggccccagctccagctgcaagagtctggacctggcctggtcaagcctagcgagacactgagcctgacctgtaccgtgtccggcgatagcatcagcagcggcgattactactggggctggatcagacagcctcctggcaaaggactggaatggatcggccacatctactacagcggcgtgacctactacaaccccagcctgaagtccagagtgaccatcagcgtggacaccagccggaaccagttctccctgaagctgtctagcgtgacagccgccgataccgccgtgtactactgcaccagagaggacagcagcaactggcggagtagaggccagggaacactggtcacagttagctctggatccggcggaggcggaagtggaggcggaggatctggcggcggaggctctttcgaacaatctgtgctgacccagcctagatccgtgtctggctctcctggacagagcgtgaccatctcttgtaccggcaccagctctgatgtcggcggctacaattacgtgtcctggtatcagcagcaccccggcgaagcccctaagctgattatctacgacgccgacaagcggcccagcggcatcagcaatagattcagctctggcaagagcggcaacaccgccagcctgacaatcagcggactccaggtggaagatgaggccgactactactgctgctcctatgccggcggaagcacctgggttttcggaggcggtacaaaagtgaccgtgctgacgcgtatccagaaccctgatcctgccgtgtaccagctgcgggatagcaagagcagcgacaagagcgtgtgtctgttcaccgacttcgacagccagaccaacgtgtcccagagcaaggactccgacgtgtacatcaccgataagtgcgtgctggacatgcggagcatggacttcaagagcaactccgccgtggcctggtccaacaagtccgatttcgcctgcgccaacgccttcaacaacagcattatccccgaggacacattcttcccaagccccgagagcagctgcgacgtgaagctggtggaaaagagcttcgagacagacaccaacctgaacttccagatcctgtacgagatcctgctgggcaaggccaccctgtacgccgtgctggtgtctgccctggtgctgatggctatggtcaagcggaaggacagccgggga

SEQ ID NO: 5764 - DNA, 2712 bp, synthetic construct
  source 1..2712: mol_type = other DNA
atggccttaccagtgaccgccttgctcctgccgctggccttgctgctccacgccgccaggccggaagtgcagctggttgaatctggcggaggactggttcagcctggcggatctctgagactgtcttgtgccgccagcggcttcagcttcagcgacttttggatgagctgggtccgacaggcccctggcaaaggacttgaatgggtcgccacaatcagccaggccggcagcgagaaggactacgtggactctgtgaagggcagattcaccatcagccgggacaacgccaagaagtccctgtacctccagatgaacagcctgagagccgaggacaccgccgtgtactattgtgcctctggcgtgtacagcttcgactacagaggccagggcaccctggtcacagtctcttctggtaccggcggaggcggatctggcggcggaggtagcggtggcggaggatctgaattcgaagtgcagctccagcagtctggacctggcctggttaagcctagccagacactgagcctgacctgtgccatcagcggcgatagcgtgtcctctaatagcgccgcctggaactggatcagacagagccctagcagaggactggaatggctgggcagaacctactaccgcagcaagtggtacagcgactacgccgtgtccgtgaagtcccggatcaccatcaatcccgacaccagcaagaaccagttcagcctgcaactgaacagcgtgacccctgaggataccgccgtgtactactgcgccagagatccctacgacttttggagcggctaccccgacgcctttgacatctggggacagggcacaatggtcaccgtttctagcctcgaggacctgaagaacgtgttcccacctgaggtggccgtgttcgagcctagcgaggccgagatcagccacacccagaaagccaccctcgtgtgcctggctaccggcttctaccccgaccatgtggaactgtcttggtgggtcaacggcaaagaggtgcacagcggcgtgtgtaccgacccccagccactgaaagaacagcccgccctgaacgacagccggtactgcctgagcagcagactgagagtgtccgccaccttctggcagaacccccggaaccacttcagatgccaggtgcagttctacggcctgagcgagaacgacgagtggacccaggacagagccaagcccgtgacccagatcgtgtctgccgaagcctggggcagagccgattgcggctttaccagcgagagctaccagcagggcgtgctgagcgccaccaacctgagcgtgatcggcttcagaatcctgctgctgaaagtggccggctttaacctgctgatgaccctgcggctgtggtccagcagggccaagcgatctggatctggagcaacaaacttctcactactcaaacaagcaggtgacgtggaggagaatcccgggcctactagtatggactggatttggcgcatccttttccttgtcggcgctgctaccggcgcgcattccgggccccagctccagctgcaagagtctggacctggcctggtcaagcctagcgagacactgagcctgacctgtaccgtgtccggcgatagcatcagcagcggcgattactactggggctggatcagacagcctcctggcaaaggactggaatggatcggccacatctactacagcggcgtgacctactacaaccccagcctgaagtccagagtgaccatcagcgtggacaccagccggaaccagttctccctgaagctgtctagcgtgacagccgccgataccgccgtgtactactgcaccagagaggacagcagcaactggcggagtagaggccagggaacactggtcacagttagctctggatccggcggaggcggaagtggaggcggaggatctggcggcggaggctctttcgaacaatctgctctgacacagcctgccagcgtgtcaggatctcctggacagagcatcaccatctcttgcaccggcaccagctctgatgtcggcggctacaattacgtgtcctggtatcagcagcaccccggcaaggcccctaaagtgattatcagcgaagtgaacaacagacccagcggcgtgtcccacagattcagcggctctaagtctggcaacaccgccagcctgacaatctctggactgcaagccgaggacgaggccgactacttctgtagcagctacaccagcggcagaaccctgtacgtgttcggcacaggcagcaaagtgacagtgctgggaacgcgtatccagaaccctgatcctgccgtgtaccagctgcgggatagcaagagcagcgacaagagcgtgtgtctgttcaccgacttcgacagccagaccaacgtgtcccagagcaaggactccgacgtgtacatcaccgataagtgcgtgctggacatgcggagcatggacttcaagagcaactccgccgtggcctggtccaacaagtccgatttcgcctgcgccaacgccttcaacaacagcattatccccgaggacacattcttcccaagccccgagagcagctgcgacgtgaagctggtggaaaagagcttcgagacagacaccaacctgaacttccagatcctgtacgagatcctgctgggcaaggccaccctgtacgccgtgctggtgtctgccctggtgctgatggctatggtcaagcggaaggacagccgggga

SEQ ID NO: 5765 - DNA, 2709 bp, synthetic construct
  source 1..2709: mol_type = other DNA
atggccttaccagtgaccgccttgctcctgccgctggccttgctgctccacgccgccaggccggaagtgcagctggttgaatctggcggaggactggttcagcctggcggatctctgagactgtcttgtgccgccagcggcttcagcttcagcgacttttggatgagctgggtccgacaggcccctggcaaaggacttgaatgggtcgccacaatcagccaggccggcagcgagaaggactacgtggactctgtgaagggcagattcaccatcagccgggacaacgccaagaagtccctgtacctccagatgaacagcctgagagccgaggacaccgccgtgtactattgtgcctctggcgtgtacagcttcgactacagaggccagggcaccctggtcacagtctcttctggtaccggcggaggcggatctggcggcggaggtagcggtggcggaggatctgaattccaatctgctctgacacagcctgccagcgcctctggatctcctggacagagcgtgaccatctcctgtaccggcacctcttctgatgtcggcggctacaactacgtgtcctggtatcagcagcaccccggcaaggcccctaagctgatgatctacgacgtgtccaacagacccagcggcgtgtccaatagattctccggcagcaagagcggcaacaccgccagcctgacaatttctggactgcaagccgaggacgaggccgactactactgtagcagctacaccagcagcagcacactgtacgtgttcggcacaggcacccagctcacagttcttctcgaggacctgaagaacgtgttcccacctgaggtggccgtgttcgagcctagcgaggccgagatcagccacacccagaaagccaccctcgtgtgcctggctaccggcttctaccccgaccatgtggaactgtcttggtgggtcaacggcaaagaggtgcacagcggcgtgtgtaccgacccccagccactgaaagaacagcccgccctgaacgacagccggtactgcctgagcagcagactgagagtgtccgccaccttctggcagaacccccggaaccacttcagatgccaggtgcagttctacggcctgagcgagaacgacgagtggacccaggacagagccaagcccgtgacccagatcgtgtctgccgaagcctggggcagagccgattgcggctttaccagcgagagctaccagcagggcgtgctgagcgccaccaacctgagcgtgatcggcttcagaatcctgctgctgaaagtggccggctttaacctgctgatgaccctgcggctgtggtccagcagggccaagcgatctggatctggagcaacaaacttctcactactcaaacaagcaggtgacgtggaggagaatcccgggcctactagtatggactggatttggcgcatccttttccttgtcggcgctgctaccggcgcgcattccgggccccagctccagctgcaagagtctggacctggcctggtcaagcctagcgagacactgagcctgacctgtaccgtgtccggcgatagcatcagcagcggcgattactactggggctggatcagacagcctcctggcaaaggactggaatggatcggccacatctactacagcggcgtgacctactacaaccccagcctgaagtccagagtgaccatcagcgtggacaccagccggaaccagttctccctgaagctgtctagcgtgacagccgccgataccgccgtgtactactgcaccagagaggacagcagcaactggcggagtagaggccagggaacactggtcacagttagctctggatccggcggaggcggaagtggaggcggaggatctggcggcggaggctctttcgaagaagtgcagctccagcagtctggacctggcctggttaagcctagccagacactgagcctgacctgtgccatcagcggcgattccatgctgagcaacagcgacacctggaactggatcagacagagccccagcagaggcctggaatggctgggcagaacataccacagaagcacttggtacgacgactacgccagctctgtgcggggcagagtgtccatcaatgtggacaccagcaagaaccagtacagcctgcaactgaacgccgtgacacctgaggataccggcgtgtactactgtgccagagtgcggctccaggacggcaattcttggagcgacgcctttgatgtgtggggccagggcacaatggtcaccgtttctagcacgcgtatccagaaccctgatcctgccgtgtaccagctgcgggatagcaagagcagcgacaagagcgtgtgtctgttcaccgacttcgacagccagaccaacgtgtcccagagcaaggactccgacgtgtacatcaccgataagtgcgtgctggacatgcggagcatggacttcaagagcaactccgccgtggcctggtccaacaagtccgatttcgcctgcgccaacgccttcaacaacagcattatccccgaggacacattcttcccaagccccgagagcagctgcgacgtgaagctggtggaaaagagcttcgagacagacaccaacctgaacttccagatcctgtacgagatcctgctgggcaaggccaccctgtacgccgtgctggtgtctgccctggtgctgatggctatggtcaagcggaaggacagccgggga

SEQ ID NO: 5766 - DNA, 2709 bp, synthetic construct
  source 1..2709: mol_type = other DNA
atggccttaccagtgaccgccttgctcctgccgctggccttgctgctccacgccgccaggccggaagtgcagctggttgaatctggcggaggactggttcagcctggcggatctctgagactgtcttgtgccgccagcggcttcagcttcagcgacttttggatgagctgggtccgacaggcccctggcaaaggacttgaatgggtcgccacaatcagccaggccggcagcgagaaggactacgtggactctgtgaagggcagattcaccatcagccgggacaacgccaagaagtccctgtacctccagatgaacagcctgagagccgaggacaccgccgtgtactattgtgcctctggcgtgtacagcttcgactacagaggccagggcaccctggtcacagtctcttctggtaccggcggaggcggatctggcggcggaggtagcggtggcggaggatctgaattcgacgtgatgctgacccagacaccactgagcctgcctgtgtctctgggcgatcaggccagcatctcctgtagaagcagccagagcatcctgcacagcaccggcgatacctacctggaatggtatctccagaagcctggacagagccccaagctgctgattaacaaggtgtccaaccggctgagcggcgtgcccgatagattttctggcagcggctctggcaccgacttcaccctgaagatcagcagagtggaagccgaggacctgggcgtgtactactgcttccaaggcagccatgttccttggacctttggcggaggcaccaagctggaaatcaagagagctgacgccgctcctaccgtgtccatctttcctctcgaggacctgaagaacgtgttcccacctgaggtggccgtgttcgagcctagcgaggccgagatcagccacacccagaaagccaccctcgtgtgcctggctaccggcttctaccccgaccatgtggaactgtcttggtgggtcaacggcaaagaggtgcacagcggcgtgtgtaccgacccccagccactgaaagaacagcccgccctgaacgacagccggtactgcctgagcagcagactgagagtgtccgccaccttctggcagaacccccggaaccacttcagatgccaggtgcagttctacggcctgagcgagaacgacgagtggacccaggacagagccaagcccgtgacccagatcgtgtctgccgaagcctggggcagagccgattgcggctttaccagcgagagctaccagcagggcgtgctgagcgccaccaacctgagcgtgatcggcttcagaatcctgctgctgaaagtggccggctttaacctgctgatgaccctgcggctgtggtccagcagggccaagcgatctggatctggagcaacaaacttctcactactcaaacaagcaggtgacgtggaggagaatcccgggcctactagtatggactggatttggcgcatccttttccttgtcggcgctgctaccggcgcgcattccgggccccagctccagctgcaagagtctggacctggcctggtcaagcctagcgagacactgagcctgacctgtaccgtgtccggcgatagcatcagcagcggcgattactactggggctggatcagacagcctcctggcaaaggactggaatggatcggccacatctactacagcggcgtgacctactacaaccccagcctgaagtccagagtgaccatcagcgtggacaccagccggaaccagttctccctgaagctgtctagcgtgacagccgccgataccgccgtgtactactgcaccagagaggacagcagcaactggcggagtagaggccagggaacactggtcacagttagctctggatccggcggaggcggaagtggaggcggaggatctggcggcggaggctctttcgaacaagtgaagctccagcagagcggccctagccttgtgaaacctggcgcttccgtgaagatgagctgcaaggccagcggctacaccttcaccgatttctacatgaaatgggtcaagcagagccacggcaagtctctggaatggatcggcgacatcaaccccaacatcggagacaccttctacaaccagaagttcaagggcaaagccacactgaccgtggacaagagcagcagcaccgcctacatgcagctcaacagcctgaccagcgaggacagcgccgtgtacttttgttccgtgggctacttcgacgtgtggggagccggaacaaccgtgacagtctcttctacgcgtatccagaaccctgatcctgccgtgtaccagctgcgggatagcaagagcagcgacaagagcgtgtgtctgttcaccgacttcgacagccagaccaacgtgtcccagagcaaggactccgacgtgtacatcaccgataagtgcgtgctggacatgcggagcatggacttcaagagcaactccgccgtggcctggtccaacaagtccgatttcgcctgcgccaacgccttcaacaacagcattatccccgaggacacattcttcccaagccccgagagcagctgcgacgtgaagctggtggaaaagagcttcgagacagacaccaacctgaacttccagatcctgtacgagatcctgctgggcaaggccaccctgtacgccgtgctggtgtctgccctggtgctgatggctatggtcaagcggaaggacagccgggga

SEQ ID NO: 5767 - DNA, 2697 bp, synthetic construct
  source 1..2697: mol_type = other DNA
atggccttaccagtgaccgccttgctcctgccgctggccttgctgctccacgccgccaggccggaagtgcagctggttgaatctggcggaggactggttcagcctggcggatctctgagactgtcttgtgccgccagcggcttcagcttcagcgacttttggatgagctgggtccgacaggcccctggcaaaggacttgaatgggtcgccacaatcagccaggccggcagcgagaaggactacgtggactctgtgaagggcagattcaccatcagccgggacaacgccaagaagtccctgtacctccagatgaacagcctgagagccgaggacaccgccgtgtactattgtgcctctggcgtgtacagcttcgactacagaggccagggcaccctggtcacagtctcttctggtaccggcggaggcggatctggcggcggaggtagcggtggcggaggatctgaattcgagatcgtgctgacacagtctcccgccacactgtcactgtctccaggcgaaagagccacactgagctgtagagccagccagagcgtgtccatctacctggcctggtatcagcagaagcctggacaggctccccggctgctgatctacgatgccagcaatagagccacaggcatccccgccagattttctggctctggcagcggcaccgatttcaccctgaccataagcagcctggaacctgaggacttcgccgtgtactactgccagcagagaagcaactggcctcctttcacattcggccctggcaccaaggtggacatcaaactcgaggacctgaagaacgtgttcccacctgaggtggccgtgttcgagcctagcgaggccgagatcagccacacccagaaagccaccctcgtgtgcctggctaccggcttctaccccgaccatgtggaactgtcttggtgggtcaacggcaaagaggtgcacagcggcgtgtgtaccgacccccagccactgaaagaacagcccgccctgaacgacagccggtactgcctgagcagcagactgagagtgtccgccaccttctggcagaacccccggaaccacttcagatgccaggtgcagttctacggcctgagcgagaacgacgagtggacccaggacagagccaagcccgtgacccagatcgtgtctgccgaagcctggggcagagccgattgcggctttaccagcgagagctaccagcagggcgtgctgagcgccaccaacctgagcgtgatcggcttcagaatcctgctgctgaaagtggccggctttaacctgctgatgaccctgcggctgtggtccagcagggccaagcgatctggatctggagcaacaaacttctcactactcaaacaagcaggtgacgtggaggagaatcccgggcctactagtatggactggatttggcgcatccttttccttgtcggcgctgctaccggcgcgcattccgggccccagctccagctgcaagagtctggacctggcctggtcaagcctagcgagacactgagcctgacctgtaccgtgtccggcgatagcatcagcagcggcgattactactggggctggatcagacagcctcctggcaaaggactggaatggatcggccacatctactacagcggcgtgacctactacaaccccagcctgaagtccagagtgaccatcagcgtggacaccagccggaaccagttctccctgaagctgtctagcgtgacagccgccgataccgccgtgtactactgcaccagagaggacagcagcaactggcggagtagaggccagggaacactggtcacagttagctctggatccggcggaggcggaagtggaggcggaggatctggcggcggaggctctttcgaacaggtgcagcttgttgaaagcggaggcggagttgtgcagcctggcagaagtctgagactgtcttgtgccgccagcggcttcaccttcagcagctatggaatgcactgggtccgacaggcccctggcaaaggacttgaatgggttgccgtgatctgggacgacggcagcaacaagtattacgtggacagcgtgaagggcagattcaccatcagccgggacaacagcaagaacaccctgtacctccagatgaacagcctgagagccgaggacacagccgtgtattattgcgccagagatgactactacggcagcggctccttcaacagctactatggcacagacgtgtggggccagggcacaacagttaccgttagctctacgcgtatccagaaccctgatcctgccgtgtaccagctgcgggatagcaagagcagcgacaagagcgtgtgtctgttcaccgacttcgacagccagaccaacgtgtcccagagcaaggactccgacgtgtacatcaccgataagtgcgtgctggacatgcggagcatggacttcaagagcaactccgccgtggcctggtccaacaagtccgatttcgcctgcgccaacgccttcaacaacagcattatccccgaggacacattcttcccaagccccgagagcagctgcgacgtgaagctggtggaaaagagcttcgagacagacaccaacctgaacttccagatcctgtacgagatcctgctgggcaaggccaccctgtacgccgtgctggtgtctgccctggtgctgatggctatggtcaagcggaaggacagccgggga

SEQ ID NO: 5768 - DNA, 2652 bp, synthetic construct
  source 1..2652: mol_type = other DNA
atggccttaccagtgaccgccttgctcctgccgctggccttgctgctccacgccgccaggccggaagtgcagctggttgaatctggcggaggactggttcagcctggcggatctctgagactgtcttgtgccgccagcggcttcagcttcagcgacttttggatgagctgggtccgacaggcccctggcaaaggacttgaatgggtcgccacaatcagccaggccggcagcgagaaggactacgtggactctgtgaagggcagattcaccatcagccgggacaacgccaagaagtccctgtacctccagatgaacagcctgagagccgaggacaccgccgtgtactattgtgcctctggcgtgtacagcttcgactacagaggccagggcaccctggtcacagtctcttctggtaccggcggaggcggatctggcggcggaggtagcggtggcggaggatctgaattcgacatccagatgacacagagccctagcagcctgtctgccagcgtgggagacagagtgaccatcacctgtagagccagccagggcatctcttcttggctggcctggtatcagcagaagcccgagaaggcccctaagagcctgatctatgccgccagctctctccagagcggagtgcctagcagattttctggcagcggctccggcaccgatttcaccctgacaatatccagcctccagcctgaggacttcgccacctactactgccagcagtacaacagctacccctacaccttcggccagggcaccaagctggaaatcaaactcgaggacctgaagaacgtgttcccacctgaggtggccgtgttcgagcctagcgaggccgagatcagccacacccagaaagccaccctcgtgtgcctggctaccggcttctaccccgaccatgtggaactgtcttggtgggtcaacggcaaagaggtgcacagcggcgtgtgtaccgacccccagccactgaaagaacagcccgccctgaacgacagccggtactgcctgagcagcagactgagagtgtccgccaccttctggcagaacccccggaaccacttcagatgccaggtgcagttctacggcctgagcgagaacgacgagtggacccaggacagagccaagcccgtgacccagatcgtgtctgccgaagcctggggcagagccgattgcggctttaccagcgagagctaccagcagggcgtgctgagcgccaccaacctgagcgtgatcggcttcagaatcctgctgctgaaagtggccggctttaacctgctgatgaccctgcggctgtggtccagcagggccaagcgatctggatctggagcaacaaacttctcactactcaaacaagcaggtgacgtggaggagaatcccgggcctactagtatggactggatttggcgcatccttttccttgtcggcgctgctaccggcgcgcattccgggccccagctccagctgcaagagtctggacctggcctggtcaagcctagcgagacactgagcctgacctgtaccgtgtccggcgatagcatcagcagcggcgattactactggggctggatcagacagcctcctggcaaaggactggaatggatcggccacatctactacagcggcgtgacctactacaaccccagcctgaagtccagagtgaccatcagcgtggacaccagccggaaccagttctccctgaagctgtctagcgtgacagccgccgataccgccgtgtactactgcaccagagaggacagcagcaactggcggagtagaggccagggaacactggtcacagttagctctggatccggcggaggcggaagtggaggcggaggatctggcggcggaggctctttcgaagaagtgcaactggttcaatctggcggcggactggttcatccaggcggttctctgagactgagctgtgccggctctggcttcaccttcagcacctacctgatgtactgggtccgacaggcccctggcaagacactggaatgggtgtccgctattggcagcggaggcgatacctactacgccgactctgtgaagggcagattcaccatcagccgggacaacgccaagaacagcctgtacctccagatgaactccctgagagccgaggacatggccgtgtactactgtgccagaggactcggctattggggccagggaacactggtcacagtgtcctctacgcgtatccagaaccctgatcctgccgtgtaccagctgcgggatagcaagagcagcgacaagagcgtgtgtctgttcaccgacttcgacagccagaccaacgtgtcccagagcaaggactccgacgtgtacatcaccgataagtgcgtgctggacatgcggagcatggacttcaagagcaactccgccgtggcctggtccaacaagtccgatttcgcctgcgccaacgccttcaacaacagcattatccccgaggacacattcttcccaagccccgagagcagctgcgacgtgaagctggtggaaaagagcttcgagacagacaccaacctgaacttccagatcctgtacgagatcctgctgggcaaggccaccctgtacgccgtgctggtgtctgccctggtgctgatggctatggtcaagcggaaggacagccgggga

SEQ ID NO: 5769 - DNA, 2709 bp, synthetic construct
  source 1..2709: mol_type = other DNA
atggccttaccagtgaccgccttgctcctgccgctggccttgctgctccacgccgccaggccggaagtgcagctggttgaatctggcggaggactggttcagcctggcggatctctgagactgtcttgtgccgccagcggcttcagcttcagcgacttttggatgagctgggtccgacaggcccctggcaaaggacttgaatgggtcgccacaatcagccaggccggcagcgagaaggactacgtggactctgtgaagggcagattcaccatcagccgggacaacgccaagaagtccctgtacctccagatgaacagcctgagagccgaggacaccgccgtgtactattgtgcctctggcgtgtacagcttcgactacagaggccagggcaccctggtcacagtctcttctggtaccggcggaggcggatctggcggcggaggtagcggtggcggaggatctgaattcctgcctgttctgacacagcctccatccgtgtctgtggcccctggaaagaccgccagaatcacatgcggcggcaacaacatcggcagcaagagcgtgcactggtatcagcagaagcctggacaggctcctgtgctggtggtgtacgacgacagcgatagacctagcggcatccccgagagattcagcggcagcaattccggcaataccgccacactgaccatcagcagagtggaagctggcgacgaggccgactactactgccaagtgtgggacagcagcagcgactacgtggtgtttggcggcggaacaaagctgacagtgcttctcgaggacctgaagaacgtgttcccacctgaggtggccgtgttcgagcctagcgaggccgagatcagccacacccagaaagccaccctcgtgtgcctggctaccggcttctaccccgaccatgtggaactgtcttggtgggtcaacggcaaagaggtgcacagcggcgtgtgtaccgacccccagccactgaaagaacagcccgccctgaacgacagccggtactgcctgagcagcagactgagagtgtccgccaccttctggcagaacccccggaaccacttcagatgccaggtgcagttctacggcctgagcgagaacgacgagtggacccaggacagagccaagcccgtgacccagatcgtgtctgccgaagcctggggcagagccgattgcggctttaccagcgagagctaccagcagggcgtgctgagcgccaccaacctgagcgtgatcggcttcagaatcctgctgctgaaagtggccggctttaacctgctgatgaccctgcggctgtggtccagcagggccaagcgatctggatctggagcaacaaacttctcactactcaaacaagcaggtgacgtggaggagaatcccgggcctactagtatggactggatttggcgcatccttttccttgtcggcgctgctaccggcgcgcattccgggccccagctccagctgcaagagtctggacctggcctggtcaagcctagcgagacactgagcctgacctgtaccgtgtccggcgatagcatcagcagcggcgattactactggggctggatcagacagcctcctggcaaaggactggaatggatcggccacatctactacagcggcgtgacctactacaaccccagcctgaagtccagagtgaccatcagcgtggacaccagccggaaccagttctccctgaagctgtctagcgtgacagccgccgataccgccgtgtactactgcaccagagaggacagcagcaactggcggagtagaggccagggaacactggtcacagttagctctggatccggcggaggcggaagtggaggcggaggatctggcggcggaggctctttcgaagaagttcaactggtgcagagcggagccgaagtgaagaagccaggcgagagcctgaagattagctgcaaaggcagcggctacagcttcaccagctactggatcggctgggtccgacagatgcctggcaaaggactggaatggatgggcatcatctaccccggcgacagcgacaccagatacagccctagctttcagggccaagtgaccatctccgccgacaagagcatcagcacagcctacctccagtggtcctctctgaaggccagcgataccgccatgtactactgcgccagacaagtctggggatggcaaggcggcatgtaccccaggtctaactggtggtacaacctggactcttggggccagggcacactggtcacagtctcttctacgcgtatccagaaccctgatcctgccgtgtaccagctgcgggatagcaagagcagcgacaagagcgtgtgtctgttcaccgacttcgacagccagaccaacgtgtcccagagcaaggactccgacgtgtacatcaccgataagtgcgtgctggacatgcggagcatggacttcaagagcaactccgccgtggcctggtccaacaagtccgatttcgcctgcgccaacgccttcaacaacagcattatccccgaggacacattcttcccaagccccgagagcagctgcgacgtgaagctggtggaaaagagcttcgagacagacaccaacctgaacttccagatcctgtacgagatcctgctgggcaaggccaccctgtacgccgtgctggtgtctgccctggtgctgatggctatggtcaagcggaaggacagccgggga

SEQ ID NO: 5770 - DNA, 2688 bp, synthetic construct
  source 1..2688: mol_type = other DNA
atggccttaccagtgaccgccttgctcctgccgctggccttgctgctccacgccgccaggccggaagtgcagctggttgaatctggcggaggactggttcagcctggcggatctctgagactgtcttgtgccgccagcggcttcagcttcagcgacttttggatgagctgggtccgacaggcccctggcaaaggacttgaatgggtcgccacaatcagccaggccggcagcgagaaggactacgtggactctgtgaagggcagattcaccatcagccgggacaacgccaagaagtccctgtacctccagatgaacagcctgagagccgaggacaccgccgtgtactattgtgcctctggcgtgtacagcttcgactacagaggccagggcaccctggtcacagtctcttctggtaccggcggaggcggatctggcggcggaggtagcggtggcggaggatctgaattcgagctggtcatgacacagagccctgcttctctggccgtgtcactgggacagagagccaccatctcttgcagagccagcgagagcgtggacagctacggcaagagcttcatgcactggtatcagctcaagcccggccagcctcctaagctgctgatctacagagcctccaacctggaaagcggcgtgccagccagattttctggcagcggcagcagaaccgacttcaccctgaccattgatcccgtggaagccgatgatgccgccacctactactgccagcagaacaacgaggacccctggacatttggcggaggcaccaagctggaaatcaaactcgaggacctgaagaacgtgttcccacctgaggtggccgtgttcgagcctagcgaggccgagatcagccacacccagaaagccaccctcgtgtgcctggctaccggcttctaccccgaccatgtggaactgtcttggtgggtcaacggcaaagaggtgcacagcggcgtgtgtaccgacccccagccactgaaagaacagcccgccctgaacgacagccggtactgcctgagcagcagactgagagtgtccgccaccttctggcagaacccccggaaccacttcagatgccaggtgcagttctacggcctgagcgagaacgacgagtggacccaggacagagccaagcccgtgacccagatcgtgtctgccgaagcctggggcagagccgattgcggctttaccagcgagagctaccagcagggcgtgctgagcgccaccaacctgagcgtgatcggcttcagaatcctgctgctgaaagtggccggctttaacctgctgatgaccctgcggctgtggtccagcagggccaagcgatctggatctggagcaacaaacttctcactactcaaacaagcaggtgacgtggaggagaatcccgggcctactagtatggactggatttggcgcatccttttccttgtcggcgctgctaccggcgcgcattccgggccccagctccagctgcaagagtctggacctggcctggtcaagcctagcgagacactgagcctgacctgtaccgtgtccggcgatagcatcagcagcggcgattactactggggctggatcagacagcctcctggcaaaggactggaatggatcggccacatctactacagcggcgtgacctactacaaccccagcctgaagtccagagtgaccatcagcgtggacaccagccggaaccagttctccctgaagctgtctagcgtgacagccgccgataccgccgtgtactactgcaccagagaggacagcagcaactggcggagtagaggccagggaacactggtcacagttagctctggatccggcggaggcggaagtggaggcggaggatctggcggcggaggctctttcgaagaagtgcagctcgaacagtctggccccgagcttgtgaaacctggcgcttccgtgaagatgagctgcaaggccagcggctacaccttcaccaactactacatgaaatgggtcaagcagagccacggcaagtccctggaatggatcggcgatctgaaccccaacaacggcgacaccttctacaaccagaagttcaagggcaaagccacactgaccgtggacaagagcagcaacaccgcctacatgcagctcaactccctgaccagcgaggacagcgccgtgtactactgtgccagaaccggcagatacgaagagaacgctatggactactggggccagggcacaagcgtgacagtctcttctacgcgtatccagaaccctgatcctgccgtgtaccagctgcgggatagcaagagcagcgacaagagcgtgtgtctgttcaccgacttcgacagccagaccaacgtgtcccagagcaaggactccgacgtgtacatcaccgataagtgcgtgctggacatgcggagcatggacttcaagagcaactccgccgtggcctggtccaacaagtccgatttcgcctgcgccaacgccttcaacaacagcattatccccgaggacacattcttcccaagccccgagagcagctgcgacgtgaagctggtggaaaagagcttcgagacagacaccaacctgaacttccagatcctgtacgagatcctgctgggcaaggccaccctgtacgccgtgctggtgtctgccctggtgctgatggctatggtcaagcggaaggacagccgggga

SEQ ID NO: 5771 - DNA, 2670 bp, synthetic construct
  source 1..2670: mol_type = other DNA
atggccttaccagtgaccgccttgctcctgccgctggccttgctgctccacgccgccaggccggaagtgcagctggttgaatctggcggaggactggttcagcctggcggatctctgagactgtcttgtgccgccagcggcttcagcttcagcgacttttggatgagctgggtccgacaggcccctggcaaaggacttgaatgggtcgccacaatcagccaggccggcagcgagaaggactacgtggactctgtgaagggcagattcaccatcagccgggacaacgccaagaagtccctgtacctccagatgaacagcctgagagccgaggacaccgccgtgtactattgtgcctctggcgtgtacagcttcgactacagaggccagggcaccctggtcacagtctcttctggtaccggcggaggcggatctggcggcggaggtagcggtggcggaggatctgaattcgacgtggtcatgacacagagcccttctagcctgtctgccagcgtgggcgacagagtgaccatcacctgtatggcctccgaggacatctacatccggctggcctggtatcagcagaagcctggaaacgcccctaagctgctgatctacgccgccacctctctggaaacaggcgtgccaagcagattttccggcagcggctctggcaccgatttcaccctgacaatatccagcctccagcctgaggacttcgccacctactactgccagcagtattggagcagcccctggacatttggcggaggcaccaaggtggaaatcaaactcgaggacctgaagaacgtgttcccacctgaggtggccgtgttcgagcctagcgaggccgagatcagccacacccagaaagccaccctcgtgtgcctggctaccggcttctaccccgaccatgtggaactgtcttggtgggtcaacggcaaagaggtgcacagcggcgtgtgtaccgacccccagccactgaaagaacagcccgccctgaacgacagccggtactgcctgagcagcagactgagagtgtccgccaccttctggcagaacccccggaaccacttcagatgccaggtgcagttctacggcctgagcgagaacgacgagtggacccaggacagagccaagcccgtgacccagatcgtgtctgccgaagcctggggcagagccgattgcggctttaccagcgagagctaccagcagggcgtgctgagcgccaccaacctgagcgtgatcggcttcagaatcctgctgctgaaagtggccggctttaacctgctgatgaccctgcggctgtggtccagcagggccaagcgatctggatctggagcaacaaacttctcactactcaaacaagcaggtgacgtggaggagaatcccgggcctactagtatggactggatttggcgcatccttttccttgtcggcgctgctaccggcgcgcattccgggccccagctccagctgcaagagtctggacctggcctggtcaagcctagcgagacactgagcctgacctgtaccgtgtccggcgatagcatcagcagcggcgattactactggggctggatcagacagcctcctggcaaaggactggaatggatcggccacatctactacagcggcgtgacctactacaaccccagcctgaagtccagagtgaccatcagcgtggacaccagccggaaccagttctccctgaagctgtctagcgtgacagccgccgataccgccgtgtactactgcaccagagaggacagcagcaactggcggagtagaggccagggaacactggtcacagttagctctggatccggcggaggcggaagtggaggcggaggatctggcggcggaggctctttcgaacaggttcagctgcaagagtctggccccggactggtcaagcctagccaaacactgagcctgacctgtaccgtgtccggctacagcatcaccagcgactacacctggaactggatcagacagcctcctggcaacggactggaatggatcggctacatcacctacagcggcagcaccagctacaaccccagcctgaaaagccgggtgctgatctccgtggacaccagcaagaatcaggtgtccctgaagctgagcagcgtgacagccgctgataccgccgtgtactactgtgccagactggggagaagatacacaatggactactggggccagggcaccaccgtgacagtttcttctacgcgtatccagaaccctgatcctgccgtgtaccagctgcgggatagcaagagcagcgacaagagcgtgtgtctgttcaccgacttcgacagccagaccaacgtgtcccagagcaaggactccgacgtgtacatcaccgataagtgcgtgctggacatgcggagcatggacttcaagagcaactccgccgtggcctggtccaacaagtccgatttcgcctgcgccaacgccttcaacaacagcattatccccgaggacacattcttcccaagccccgagagcagctgcgacgtgaagctggtggaaaagagcttcgagacagacaccaacctgaacttccagatcctgtacgagatcctgctgggcaaggccaccctgtacgccgtgctggtgtctgccctggtgctgatggctatggtcaagcggaaggacagccgggga

SEQ ID NO: 5772 - DNA, 2682 bp, synthetic construct
  source 1..2682: mol_type = other DNA
atggccttaccagtgaccgccttgctcctgccgctggccttgctgctccacgccgccaggccggaagtgcagctggttgaatctggcggaggactggttcagcctggcggatctctgagactgtcttgtgccgccagcggcttcagcttcagcgacttttggatgagctgggtccgacaggcccctggcaaaggacttgaatgggtcgccacaatcagccaggccggcagcgagaaggactacgtggactctgtgaagggcagattcaccatcagccgggacaacgccaagaagtccctgtacctccagatgaacagcctgagagccgaggacaccgccgtgtactattgtgcctctggcgtgtacagcttcgactacagaggccagggcaccctggtcacagtctcttctggtaccggcggaggcggatctggcggcggaggtagcggtggcggaggatctgaattcgatattgtgctgactcagagccctgccactctgagccttagtccaggcgacagagctaccatctcctgtagggcctctgaatccgtgaccattctgggctctcatctcatatattggtatcaacaaaagccgggccagcctccacggctgctcattcaactggcctctaacgtgcagaccggcgtgccagctagattttctggctctggctcccggaccgactttacactgacaatcagctccgtggaacccgaagattttgccgtctattattgcctccagtccaggaccattcctcggacattcggccagggaacaaaactcgaaatcaagcggctcgaggacctgaagaacgtgttcccacctgaggtggccgtgttcgagcctagcgaggccgagatcagccacacccagaaagccaccctcgtgtgcctggctaccggcttctaccccgaccatgtggaactgtcttggtgggtcaacggcaaagaggtgcacagcggcgtgtgtaccgacccccagccactgaaagaacagcccgccctgaacgacagccggtactgcctgagcagcagactgagagtgtccgccaccttctggcagaacccccggaaccacttcagatgccaggtgcagttctacggcctgagcgagaacgacgagtggacccaggacagagccaagcccgtgacccagatcgtgtctgccgaagcctggggcagagccgattgcggctttaccagcgagagctaccagcagggcgtgctgagcgccaccaacctgagcgtgatcggcttcagaatcctgctgctgaaagtggccggctttaacctgctgatgaccctgcggctgtggtccagcagggccaagcgatctggatctggagcaacaaacttctcactactcaaacaagcaggtgacgtggaggagaatcccgggcctactagtatggactggatttggcgcatccttttccttgtcggcgctgctaccggcgcgcattccgggccccagctccagctgcaagagtctggacctggcctggtcaagcctagcgagacactgagcctgacctgtaccgtgtccggcgatagcatcagcagcggcgattactactggggctggatcagacagcctcctggcaaaggactggaatggatcggccacatctactacagcggcgtgacctactacaaccccagcctgaagtccagagtgaccatcagcgtggacaccagccggaaccagttctccctgaagctgtctagcgtgacagccgccgataccgccgtgtactactgcaccagagaggacagcagcaactggcggagtagaggccagggaacactggtcacagttagctctggatccggcggaggcggaagtggaggcggaggatctggcggcggaggctctttcgaacaggtgcagctcgttcagagtggccccgaagtgaaaaagccaggcgagtccgtgaagatttcctgcaaagcctccggctacacattccggcactactctatgaattgggtcaagcaggccccaggccagggccttaagtggatgggacgcatcaataccgagtccggcgtgccaatctacgccgatgacttcaaaggccggttcagcttcaccgtggatacctctgcctccaccgcctacctggaaatcagcagcctgaccagcgaggatacagctgtgtacttctgtagcaacgattacctctacagcctggatttctggggacagggaaccacactgaccgtgtctagcacgcgtatccagaaccctgatcctgccgtgtaccagctgcgggatagcaagagcagcgacaagagcgtgtgtctgttcaccgacttcgacagccagaccaacgtgtcccagagcaaggactccgacgtgtacatcaccgataagtgcgtgctggacatgcggagcatggacttcaagagcaactccgccgtggcctggtccaacaagtccgatttcgcctgcgccaacgccttcaacaacagcattatccccgaggacacattcttcccaagccccgagagcagctgcgacgtgaagctggtggaaaagagcttcgagacagacaccaacctgaacttccagatcctgtacgagatcctgctgggcaaggccaccctgtacgccgtgctggtgtctgccctggtgctgatggctatggtcaagcggaaggacagccgggga

SEQ ID NO: 5773 - DNA, 2682 bp, synthetic construct
  source 1..2682: mol_type = other DNA
atggccttaccagtgaccgccttgctcctgccgctggccttgctgctccacgccgccaggccggaagtgcagctggttgaatctggcggaggactggttcagcctggcggatctctgagactgtcttgtgccgccagcggcttcagcttcagcgacttttggatgagctgggtccgacaggcccctggcaaaggacttgaatgggtcgccacaatcagccaggccggcagcgagaaggactacgtggactctgtgaagggcagattcaccatcagccgggacaacgccaagaagtccctgtacctccagatgaacagcctgagagccgaggacaccgccgtgtactattgtgcctctggcgtgtacagcttcgactacagaggccagggcaccctggtcacagtctcttctggtaccggcggaggcggatctggcggcggaggtagcggtggcggaggatctgaattcgacatcgtgctgacacagtctcccgccacactgtcactgagccctggcgatagagccacactgagctgtagagccagcgagagcgtgacaatcctgggcagccacctgatctactggtatcagcagaagcccggacaggcccctagactgctgattcagctcgccagcaatgtgcagacaggcatccctgccagattttccggcagcggcagcagaaccgatttcaccctgaccataagcagcctggaacctgaggacttcgccgtgtactactgcctccagagccggacaatccccagaacctttggacagggcaccaagctggaaatcaagagactcgaggacctgaagaacgtgttcccacctgaggtggccgtgttcgagcctagcgaggccgagatcagccacacccagaaagccaccctcgtgtgcctggctaccggcttctaccccgaccatgtggaactgtcttggtgggtcaacggcaaagaggtgcacagcggcgtgtgtaccgacccccagccactgaaagaacagcccgccctgaacgacagccggtactgcctgagcagcagactgagagtgtccgccaccttctggcagaacccccggaaccacttcagatgccaggtgcagttctacggcctgagcgagaacgacgagtggacccaggacagagccaagcccgtgacccagatcgtgtctgccgaagcctggggcagagccgattgcggctttaccagcgagagctaccagcagggcgtgctgagcgccaccaacctgagcgtgatcggcttcagaatcctgctgctgaaagtggccggctttaacctgctgatgaccctgcggctgtggtccagcagggccaagcgatctggatctggagcaacaaacttctcactactcaaacaagcaggtgacgtggaggagaatcccgggcctactagtatggactggatttggcgcatccttttccttgtcggcgctgctaccggcgcgcattccgggccccagctccagctgcaagagtctggacctggcctggtcaagcctagcgagacactgagcctgacctgtaccgtgtccggcgatagcatcagcagcggcgattactactggggctggatcagacagcctcctggcaaaggactggaatggatcggccacatctactacagcggcgtgacctactacaaccccagcctgaagtccagagtgaccatcagcgtggacaccagccggaaccagttctccctgaagctgtctagcgtgacagccgccgataccgccgtgtactactgcaccagagaggacagcagcaactggcggagtagaggccagggaacactggtcacagttagctctggatccggcggaggcggaagtggaggcggaggatctggcggcggaggctctttcgaacaggttcagctggtgcagtctggcagcgagctgaagaaacctggcgagagcgtgaagatcagctgcaaggccagcggctacaccttcacacactacagcatgaactgggtccgacaggcccctggacaaggactggaatggatgggcagaatcaacaccgagacaggcgagcccctgtacgccgacgatttcaagggcagattcgtgttcagcctggacaccagcgccagcacagcctatctccagatcagctctctgaaggccgaggacaccgccgtgtactactgctccaacgactacctgtactccctggactattggggccagggcacactggtcacagtgtctagtacgcgtatccagaaccctgatcctgccgtgtaccagctgcgggatagcaagagcagcgacaagagcgtgtgtctgttcaccgacttcgacagccagaccaacgtgtcccagagcaaggactccgacgtgtacatcaccgataagtgcgtgctggacatgcggagcatggacttcaagagcaactccgccgtggcctggtccaacaagtccgatttcgcctgcgccaacgccttcaacaacagcattatccccgaggacacattcttcccaagccccgagagcagctgcgacgtgaagctggtggaaaagagcttcgagacagacaccaacctgaacttccagatcctgtacgagatcctgctgggcaaggccaccctgtacgccgtgctggtgtctgccctggtgctgatggctatggtcaagcggaaggacagccgggga

SEQ ID NO: 5774 - DNA, 2685 bp, synthetic construct
  source 1..2685: mol_type = other DNA
atggccttaccagtgaccgccttgctcctgccgctggccttgctgctccacgccgccaggccggaagtgcagctggttgaatctggcggaggactggttcagcctggcggatctctgagactgtcttgtgccgccagcggcttcagcttcagcgacttttggatgagctgggtccgacaggcccctggcaaaggacttgaatgggtcgccacaatcagccaggccggcagcgagaaggactacgtggactctgtgaagggcagattcaccatcagccgggacaacgccaagaagtccctgtacctccagatgaacagcctgagagccgaggacaccgccgtgtactattgtgcctctggcgtgtacagcttcgactacagaggccagggcaccctggtcacagtctcttctggtaccggcggaggcggatctggcggcggaggtagcggtggcggaggatctgaattcgacatccagctgactcagagccctagctttctgagcgccagcgtgggcgacagagtgaccattacatgtagagccagccagggcatcagcaccgacctgaactggtatcagcagaagcctggcaaggcccctaagctgctgatctacgccgccagcaatctggaaagcggcgtgccaagcagattttccggctctggcagcggcaccgagttcaccctgacaatatctagcctccagcctgaggacttcgccacctactactgccagcagagctacaactggccctacacctttggcggaggcaccaaggtggaaatcaagagactcgaggacctgaagaacgtgttcccacctgaggtggccgtgttcgagcctagcgaggccgagatcagccacacccagaaagccaccctcgtgtgcctggctaccggcttctaccccgaccatgtggaactgtcttggtgggtcaacggcaaagaggtgcacagcggcgtgtgtaccgacccccagccactgaaagaacagcccgccctgaacgacagccggtactgcctgagcagcagactgagagtgtccgccaccttctggcagaacccccggaaccacttcagatgccaggtgcagttctacggcctgagcgagaacgacgagtggacccaggacagagccaagcccgtgacccagatcgtgtctgccgaagcctggggcagagccgattgcggctttaccagcgagagctaccagcagggcgtgctgagcgccaccaacctgagcgtgatcggcttcagaatcctgctgctgaaagtggccggctttaacctgctgatgaccctgcggctgtggtccagcagggccaagcgatctggatctggagcaacaaacttctcactactcaaacaagcaggtgacgtggaggagaatcccgggcctactagtatggactggatttggcgcatccttttccttgtcggcgctgctaccggcgcgcattccgggccccagctccagctgcaagagtctggacctggcctggtcaagcctagcgagacactgagcctgacctgtaccgtgtccggcgatagcatcagcagcggcgattactactggggctggatcagacagcctcctggcaaaggactggaatggatcggccacatctactacagcggcgtgacctactacaaccccagcctgaagtccagagtgaccatcagcgtggacaccagccggaaccagttctccctgaagctgtctagcgtgacagccgccgataccgccgtgtactactgcaccagagaggacagcagcaactggcggagtagaggccagggaacactggtcacagttagctctggatccggcggaggcggaagtggaggcggaggatctggcggcggaggctctttcgaagaagttcagctggttgaatcaggcggaggactcgtgaaacctggcggctctctgagactgtcttgtgccgccagcggcttcaccttcagcaacttcgagatgaactgggtccgacaggccccaggcaaaggactggaatgggtgtccggcatcagctccaatggccggtacatcaactacgccgacagcgtgaagggcagattcaccatcagccgggacaacgccaagaacagcctgtacctccagatgaactccctgagagccgaggacaccgccgtgtactattgtgccagagtggtggacttcgaccaggactacaacggcttcgactattggggccagggcaccctggttaccgttagctctacgcgtatccagaaccctgatcctgccgtgtaccagctgcgggatagcaagagcagcgacaagagcgtgtgtctgttcaccgacttcgacagccagaccaacgtgtcccagagcaaggactccgacgtgtacatcaccgataagtgcgtgctggacatgcggagcatggacttcaagagcaactccgccgtggcctggtccaacaagtccgatttcgcctgcgccaacgccttcaacaacagcattatccccgaggacacattcttcccaagccccgagagcagctgcgacgtgaagctggtggaaaagagcttcgagacagacaccaacctgaacttccagatcctgtacgagatcctgctgggcaaggccaccctgtacgccgtgctggtgtctgccctggtgctgatggctatggtcaagcggaaggacagccgggga

SEQ ID NO: 5775 - DNA, 2679 bp, synthetic construct
  source 1..2679: mol_type = other DNA
atggccttaccagtgaccgccttgctcctgccgctggccttgctgctccacgccgccaggccggaagtgcagctggttgaatctggcggaggactggttcagcctggcggatctctgagactgtcttgtgccgccagcggcttcagcttcagcgacttttggatgagctgggtccgacaggcccctggcaaaggacttgaatgggtcgccacaatcagccaggccggcagcgagaaggactacgtggactctgtgaagggcagattcaccatcagccgggacaacgccaagaagtccctgtacctccagatgaacagcctgagagccgaggacaccgccgtgtactattgtgcctctggcgtgtacagcttcgactacagaggccagggcaccctggtcacagtctcttctggtaccggcggaggcggatctggcggcggaggtagcggtggcggaggatctgaattcgacatccaactgactcagagccccagctttctgagcgcctctgtgggcgacagagtgaccatcacatgtagtctcagcctgggcatcagcacatggcgggattggtttccgccgaggcttggcaggggccttgagccgctgacctacgccgccagcacactgcaaagcggagtgcctagcagattttccggcagcggctctggcaccgagttcaccctgacaatatccagcctccagcctgaggacttcgccacctactactgccagcagctcaacagctaccctctgacctttggcggaggcaccaaggtggaaatcaagagactcgaggacctgaagaacgtgttcccacctgaggtggccgtgttcgagcctagcgaggccgagatcagccacacccagaaagccaccctcgtgtgcctggctaccggcttctaccccgaccatgtggaactgtcttggtgggtcaacggcaaagaggtgcacagcggcgtgtgtaccgacccccagccactgaaagaacagcccgccctgaacgacagccggtactgcctgagcagcagactgagagtgtccgccaccttctggcagaacccccggaaccacttcagatgccaggtgcagttctacggcctgagcgagaacgacgagtggacccaggacagagccaagcccgtgacccagatcgtgtctgccgaagcctggggcagagccgattgcggctttaccagcgagagctaccagcagggcgtgctgagcgccaccaacctgagcgtgatcggcttcagaatcctgctgctgaaagtggccggctttaacctgctgatgaccctgcggctgtggtccagcagggccaagcgatctggatctggagcaacaaacttctcactactcaaacaagcaggtgacgtggaggagaatcccgggcctactagtatggactggatttggcgcatccttttccttgtcggcgctgctaccggcgcgcattccgggccccagctccagctgcaagagtctggacctggcctggtcaagcctagcgagacactgagcctgacctgtaccgtgtccggcgatagcatcagcagcggcgattactactggggctggatcagacagcctcctggcaaaggactggaatggatcggccacatctactacagcggcgtgacctactacaaccccagcctgaagtccagagtgaccatcagcgtggacaccagccggaaccagttctccctgaagctgtctagcgtgacagccgccgataccgccgtgtactactgcaccagagaggacagcagcaactggcggagtagaggccagggaacactggtcacagttagctctggatccggcggaggcggaagtggaggcggaggatctggcggcggaggctctttcgaagaagttcaactggttgagtctggtggcggcctggttaagcctggcggatctctgagactgagctgtgccgccagcggcttcacctttagcacatacggcatgagctgggtccgacaggcccctggaaaaggacttgagtgggtcgcctacatcaacaacggctccggctacatctactacgccgacagcgtgaagggcagattcaccatcagccgggacaacgccaagaacagcctgtacctccagatgaactccctgagagccgaggacaccgccgtgtactattgtgccagaggacagtggtggagcggcggagactttgattattggggccagggcaccctggtcaccgtttcttctacgcgtatccagaaccctgatcctgccgtgtaccagctgcgggatagcaagagcagcgacaagagcgtgtgtctgttcaccgacttcgacagccagaccaacgtgtcccagagcaaggactccgacgtgtacatcaccgataagtgcgtgctggacatgcggagcatggacttcaagagcaactccgccgtggcctggtccaacaagtccgatttcgcctgcgccaacgccttcaacaacagcattatccccgaggacacattcttcccaagccccgagagcagctgcgacgtgaagctggtggaaaagagcttcgagacagacaccaacctgaacttccagatcctgtacgagatcctgctgggcaaggccaccctgtacgccgtgctggtgtctgccctggtgctgatggctatggtcaagcggaaggacagccgggga

SEQ ID NO: 5776 - DNA, 2682 bp, synthetic construct
  source 1..2682: mol_type = other DNA
atggccttaccagtgaccgccttgctcctgccgctggccttgctgctccacgccgccaggccggaagtgcagctggttgaatctggcggaggactggttcagcctggcggatctctgagactgtcttgtgccgccagcggcttcagcttcagcgacttttggatgagctgggtccgacaggcccctggcaaaggacttgaatgggtcgccacaatcagccaggccggcagcgagaaggactacgtggactctgtgaagggcagattcaccatcagccgggacaacgccaagaagtccctgtacctccagatgaacagcctgagagccgaggacaccgccgtgtactattgtgcctctggcgtgtacagcttcgactacagaggccagggcaccctggtcacagtctcttctggtaccggcggaggcggatctggcggcggaggtagcggtggcggaggatctgaattcgagatcgtgctgacacagtctcccgccacactgtcactgtctccaggcgaaagagccacactgagctgtagcgccagcagcagcgtgtcctacatgtactggtatcagcagaagcccggacaggcccctagactgctgatctacagaaccagcaacctggcctctggcatccccgccagattttctggctctggcagcggcaccgatttcaccctgaccataagcagcctggaacctgaggacttcgccgtgtactactgccagcagtaccacagctaccccaccacctttggacagggcaccaaggtggaaatcaagcggacagttctcgaggacctgaagaacgtgttcccacctgaggtggccgtgttcgagcctagcgaggccgagatcagccacacccagaaagccaccctcgtgtgcctggctaccggcttctaccccgaccatgtggaactgtcttggtgggtcaacggcaaagaggtgcacagcggcgtgtgtaccgacccccagccactgaaagaacagcccgccctgaacgacagccggtactgcctgagcagcagactgagagtgtccgccaccttctggcagaacccccggaaccacttcagatgccaggtgcagttctacggcctgagcgagaacgacgagtggacccaggacagagccaagcccgtgacccagatcgtgtctgccgaagcctggggcagagccgattgcggctttaccagcgagagctaccagcagggcgtgctgagcgccaccaacctgagcgtgatcggcttcagaatcctgctgctgaaagtggccggctttaacctgctgatgaccctgcggctgtggtccagcagggccaagcgatctggatctggagcaacaaacttctcactactcaaacaagcaggtgacgtggaggagaatcccgggcctactagtatggactggatttggcgcatccttttccttgtcggcgctgctaccggcgcgcattccgggccccagctccagctgcaagagtctggacctggcctggtcaagcctagcgagacactgagcctgacctgtaccgtgtccggcgatagcatcagcagcggcgattactactggggctggatcagacagcctcctggcaaaggactggaatggatcggccacatctactacagcggcgtgacctactacaaccccagcctgaagtccagagtgaccatcagcgtggacaccagccggaaccagttctccctgaagctgtctagcgtgacagccgccgataccgccgtgtactactgcaccagagaggacagcagcaactggcggagtagaggccagggaacactggtcacagttagctctggatccggcggaggcggaagtggaggcggaggatctggcggcggaggctctttcgaagaagtgcagctggttgaatcaggtggcggcctggttcaacctggcggatctctgagactgtcttgtgccgccagcggcttcagcttcaacacctacgccatgaactgggtccgacaggctcctggcaaaggactggaatgggtgtcccacatcagaagcaagagcaacaacttcgccacctactacgccgacagcgtgaaggacagattcaccatcagccgggacaacgccaagaacagcctgtacctccagatgaactccctgagagccgaggacaccgccgtgtattattgcgccagacaaggcggcgacttccctatggattattggggccagggcaccctggtcaccgtttcttctacgcgtatccagaaccctgatcctgccgtgtaccagctgcgggatagcaagagcagcgacaagagcgtgtgtctgttcaccgacttcgacagccagaccaacgtgtcccagagcaaggactccgacgtgtacatcaccgataagtgcgtgctggacatgcggagcatggacttcaagagcaactccgccgtggcctggtccaacaagtccgatttcgcctgcgccaacgccttcaacaacagcattatccccgaggacacattcttcccaagccccgagagcagctgcgacgtgaagctggtggaaaagagcttcgagacagacaccaacctgaacttccagatcctgtacgagatcctgctgggcaaggccaccctgtacgccgtgctggtgtctgccctggtgctgatggctatggtcaagcggaaggacagccgggga

SEQ ID NO: 5777 - DNA, 2670 bp, synthetic construct
  source 1..2670: mol_type = other DNA
atggccttaccagtgaccgccttgctcctgccgctggccttgctgctccacgccgccaggccggaagtgcagctggttgaatctggcggaggactggttcagcctggcggatctctgagactgtcttgtgccgccagcggcttcagcttcagcgacttttggatgagctgggtccgacaggcccctggcaaaggacttgaatgggtcgccacaatcagccaggccggcagcgagaaggactacgtggactctgtgaagggcagattcaccatcagccgggacaacgccaagaagtccctgtacctccagatgaacagcctgagagccgaggacaccgccgtgtactattgtgcctctggcgtgtacagcttcgactacagaggccagggcaccctggtcacagtctcttctggtaccggcggaggcggatctggcggcggaggtagcggtggcggaggatctgaattcgacgtggtcatgacacagagcccttctagcctgtctgccagcgtgggcgacagagtgaccatcacctgtaaagccagcgaggacatctacatccggctggcctggtatcagcagaagcctggaaaggcccctaagctgctgatctacgccgccacctctctggaaacaggcgtgccaagcagattttccggcagcggctctggcaccgatttcaccctgacaatatccagcctccagcctgaggacttcgccacctactactgccagcagtattggaccacaccttggacctttggcggaggcaccaaggtggaaatcaaactcgaggacctgaagaacgtgttcccacctgaggtggccgtgttcgagcctagcgaggccgagatcagccacacccagaaagccaccctcgtgtgcctggctaccggcttctaccccgaccatgtggaactgtcttggtgggtcaacggcaaagaggtgcacagcggcgtgtgtaccgacccccagccactgaaagaacagcccgccctgaacgacagccggtactgcctgagcagcagactgagagtgtccgccaccttctggcagaacccccggaaccacttcagatgccaggtgcagttctacggcctgagcgagaacgacgagtggacccaggacagagccaagcccgtgacccagatcgtgtctgccgaagcctggggcagagccgattgcggctttaccagcgagagctaccagcagggcgtgctgagcgccaccaacctgagcgtgatcggcttcagaatcctgctgctgaaagtggccggctttaacctgctgatgaccctgcggctgtggtccagcagggccaagcgatctggatctggagcaacaaacttctcactactcaaacaagcaggtgacgtggaggagaatcccgggcctactagtatggactggatttggcgcatccttttccttgtcggcgctgctaccggcgcgcattccgggccccagctccagctgcaagagtctggacctggcctggtcaagcctagcgagacactgagcctgacctgtaccgtgtccggcgatagcatcagcagcggcgattactactggggctggatcagacagcctcctggcaaaggactggaatggatcggccacatctactacagcggcgtgacctactacaaccccagcctgaagtccagagtgaccatcagcgtggacaccagccggaaccagttctccctgaagctgtctagcgtgacagccgccgataccgccgtgtactactgcaccagagaggacagcagcaactggcggagtagaggccagggaacactggtcacagttagctctggatccggcggaggcggaagtggaggcggaggatctggcggcggaggctctttcgaacaggtgcagctccaagagtctggccctggactggtcaagcctagccagacactgagcctgacctgtaccgtgtccggctacagcatcaccatcgactacacctggaactggatcagacagcctcctggcaaaggactggaatggatcggctacatcacctacagcggcagcaccgactacaaccccagcctgaaaagccgggtgctgatctccgtggacaccagcaagaatcaggtgtccctgaagctgagcagcgtgacagccgctgataccgccgtgtactactgtgccagactgggcagaagatacgccctggattattggggccagggcaccaccgtgacagtgtcatctacgcgtatccagaaccctgatcctgccgtgtaccagctgcgggatagcaagagcagcgacaagagcgtgtgtctgttcaccgacttcgacagccagaccaacgtgtcccagagcaaggactccgacgtgtacatcaccgataagtgcgtgctggacatgcggagcatggacttcaagagcaactccgccgtggcctggtccaacaagtccgatttcgcctgcgccaacgccttcaacaacagcattatccccgaggacacattcttcccaagccccgagagcagctgcgacgtgaagctggtggaaaagagcttcgagacagacaccaacctgaacttccagatcctgtacgagatcctgctgggcaaggccaccctgtacgccgtgctggtgtctgccctggtgctgatggctatggtcaagcggaaggacagccgggga

SEQ ID NO: 5778 - DNA, 2685 bp, synthetic construct
  source 1..2685: mol_type = other DNA
atggccttaccagtgaccgccttgctcctgccgctggccttgctgctccacgccgccaggccggaagtgcagctggttgaatctggcggaggactggttcagcctggcggatctctgagactgtcttgtgccgccagcggcttcagcttcagcgacttttggatgagctgggtccgacaggcccctggcaaaggacttgaatgggtcgccacaatcagccaggccggcagcgagaaggactacgtggactctgtgaagggcagattcaccatcagccgggacaacgccaagaagtccctgtacctccagatgaacagcctgagagccgaggacaccgccgtgtactattgtgcctctggcgtgtacagcttcgactacagaggccagggcaccctggtcacagtctcttctggtaccggcggaggcggatctggcggcggaggtagcggtggcggaggatctgaattcgacatccagatgacccagaccacaagcagcctgtctgccagcctgggcgacagagtgaccatctcttgtagagccagccaggacatcagcaactacctgaactggtatcagcagaaacccgacggcaccgtgaagctgctgatctactacaccagcatcctgcacagcggcgtgcccagcagattttctggctctggcagcggcaccgactacagcctgaccatcagcaatctggaacaagaggacttcgctacctacttctgccagcaaggcaacaccctgccttggacatttggcggaggcaccaagctggaaatcaaagctctcgaggacctgaagaacgtgttcccacctgaggtggccgtgttcgagcctagcgaggccgagatcagccacacccagaaagccaccctcgtgtgcctggctaccggcttctaccccgaccatgtggaactgtcttggtgggtcaacggcaaagaggtgcacagcggcgtgtgtaccgacccccagccactgaaagaacagcccgccctgaacgacagccggtactgcctgagcagcagactgagagtgtccgccaccttctggcagaacccccggaaccacttcagatgccaggtgcagttctacggcctgagcgagaacgacgagtggacccaggacagagccaagcccgtgacccagatcgtgtctgccgaagcctggggcagagccgattgcggctttaccagcgagagctaccagcagggcgtgctgagcgccaccaacctgagcgtgatcggcttcagaatcctgctgctgaaagtggccggctttaacctgctgatgaccctgcggctgtggtccagcagggccaagcgatctggatctggagcaacaaacttctcactactcaaacaagcaggtgacgtggaggagaatcccgggcctactagtatggactggatttggcgcatccttttccttgtcggcgctgctaccggcgcgcattccgggccccagctccagctgcaagagtctggacctggcctggtcaagcctagcgagacactgagcctgacctgtaccgtgtccggcgatagcatcagcagcggcgattactactggggctggatcagacagcctcctggcaaaggactggaatggatcggccacatctactacagcggcgtgacctactacaaccccagcctgaagtccagagtgaccatcagcgtggacaccagccggaaccagttctccctgaagctgtctagcgtgacagccgccgataccgccgtgtactactgcaccagagaggacagcagcaactggcggagtagaggccagggaacactggtcacagttagctctggatccggcggaggcggaagtggaggcggaggatctggcggcggaggctctttcgaagaagtgcaactggttgaatctggcggcggactggttaagcctggcggatctctgaagctgagctgtgccgcctctggcttcgccttcagcatctacgatatgagctgggtccgacagacccctgagaagagactggaatgggtcgcctacatctctagcggcggagggacctactatcccgacacagtgaagggcagattcaccatctccagagacaacgccaagaacaccctgtacctccagatgagcagcctgaagtccgaggacaccgccatgtactactgcgccagacacagcggctatggcacacattggggagtgctgtttgcctactggggccagggaacactggtcacagtttctgctacgcgtatccagaaccctgatcctgccgtgtaccagctgcgggatagcaagagcagcgacaagagcgtgtgtctgttcaccgacttcgacagccagaccaacgtgtcccagagcaaggactccgacgtgtacatcaccgataagtgcgtgctggacatgcggagcatggacttcaagagcaactccgccgtggcctggtccaacaagtccgatttcgcctgcgccaacgccttcaacaacagcattatccccgaggacacattcttcccaagccccgagagcagctgcgacgtgaagctggtggaaaagagcttcgagacagacaccaacctgaacttccagatcctgtacgagatcctgctgggcaaggccaccctgtacgccgtgctggtgtctgccctggtgctgatggctatggtcaagcggaaggacagccgggga

SEQ ID NO: 5779 - DNA, 2715 bp, synthetic construct
  source 1..2715: mol_type = other DNA
atggccttaccagtgaccgccttgctcctgccgctggccttgctgctccacgccgccaggccggaagtgcagctggttgaatctggcggaggactggttcagcctggcggatctctgagactgtcttgtgccgccagcggcttcagcttcagcgacttttggatgagctgggtccgacaggcccctggcaaaggacttgaatgggtcgccacaatcagccaggccggcagcgagaaggactacgtggactctgtgaagggcagattcaccatcagccgggacaacgccaagaagtccctgtacctccagatgaacagcctgagagccgaggacaccgccgtgtactattgtgcctctggcgtgtacagcttcgactacagaggccagggcaccctggtcacagtctcttctggtaccggcggaggcggatctggcggcggaggtagcggtggcggaggatctgaattcgacatcgtgatgacacagagccctgatagcctggccgtgtctctgggagagagagccaccatcaactgcaagagcagccagagcctgctgtacagaagcaaccagaagaactacctggcctggtatcagcagaagcccggccagcctcctaagctgctgatctactgggccagcaccagagaaagcggcgtgcccgatagattttctggctctggcagcggcaccgacttcaccctgacaatttctagcctgcaagccgaggacgtggccgtgtactactgccagcagtattacaactaccccagaaccttcggccagggcaccaaggtggaaatcaagagaacagttctcgaggacctgaagaacgtgttcccacctgaggtggccgtgttcgagcctagcgaggccgagatcagccacacccagaaagccaccctcgtgtgcctggctaccggcttctaccccgaccatgtggaactgtcttggtgggtcaacggcaaagaggtgcacagcggcgtgtgtaccgacccccagccactgaaagaacagcccgccctgaacgacagccggtactgcctgagcagcagactgagagtgtccgccaccttctggcagaacccccggaaccacttcagatgccaggtgcagttctacggcctgagcgagaacgacgagtggacccaggacagagccaagcccgtgacccagatcgtgtctgccgaagcctggggcagagccgattgcggctttaccagcgagagctaccagcagggcgtgctgagcgccaccaacctgagcgtgatcggcttcagaatcctgctgctgaaagtggccggctttaacctgctgatgaccctgcggctgtggtccagcagggccaagcgatctggatctggagcaacaaacttctcactactcaaacaagcaggtgacgtggaggagaatcccgggcctactagtatggactggatttggcgcatccttttccttgtcggcgctgctaccggcgcgcattccgggccccagctccagctgcaagagtctggacctggcctggtcaagcctagcgagacactgagcctgacctgtaccgtgtccggcgatagcatcagcagcggcgattactactggggctggatcagacagcctcctggcaaaggactggaatggatcggccacatctactacagcggcgtgacctactacaaccccagcctgaagtccagagtgaccatcagcgtggacaccagccggaaccagttctccctgaagctgtctagcgtgacagccgccgataccgccgtgtactactgcaccagagaggacagcagcaactggcggagtagaggccagggaacactggtcacagttagctctggatccggcggaggcggaagtggaggcggaggatctggcggcggaggctctttcgaagaagttcagctgcttgaatcaggcggcggactggttcaacctggcggatctctgagactgagctgtgccgccagcggctacagcatcacaagcgactatgcctggaactgggtccgacaggcccctggcaaaggactggaatgggtgtcctacatcagcaacagcggcagcaccagctacaaccccagcctgaagtcccggttcaccatcagcagagacaacagcaagaacaccctgtacctccagatgaacagcctgagagctgaggacaccgccgtgtattattgcgccaaagagcggaactacgactacgacgattactactacgctatggactactggggccagggaaccctggtcacagtctcttctacgcgtatccagaaccctgatcctgccgtgtaccagctgcgggatagcaagagcagcgacaagagcgtgtgtctgttcaccgacttcgacagccagaccaacgtgtcccagagcaaggactccgacgtgtacatcaccgataagtgcgtgctggacatgcggagcatggacttcaagagcaactccgccgtggcctggtccaacaagtccgatttcgcctgcgccaacgccttcaacaacagcattatccccgaggacacattcttcccaagccccgagagcagctgcgacgtgaagctggtggaaaagagcttcgagacagacaccaacctgaacttccagatcctgtacgagatcctgctgggcaaggccaccctgtacgccgtgctggtgtctgccctggtgctgatggctatggtcaagcggaaggacagccgggga

SEQ ID NO: 5780 - DNA, 2694 bp, synthetic construct
  source 1..2694: mol_type = other DNA
atggccttaccagtgaccgccttgctcctgccgctggccttgctgctccacgccgccaggccggaagtgcagctggttgaatctggcggaggactggttcagcctggcggatctctgagactgtcttgtgccgccagcggcttcagcttcagcgacttttggatgagctgggtccgacaggcccctggcaaaggacttgaatgggtcgccacaatcagccaggccggcagcgagaaggactacgtggactctgtgaagggcagattcaccatcagccgggacaacgccaagaagtccctgtacctccagatgaacagcctgagagccgaggacaccgccgtgtactattgtgcctctggcgtgtacagcttcgactacagaggccagggcaccctggtcacagtctcttctggtaccggcggaggcggatctggcggcggaggtagcggtggcggaggatctgaattcgacgtggtcatgacacagagccctctgagcctgcctgtgacacttggacagcctgccagcatcagctgtagaagcagccagagcctgctgcacagcagcggcaatacctacctggaatggtatcagcagaggcccggacagagccccagacctctgatctacaagatcagcacccggttcagcggcgtgcccgatagattttctggctctggcagcggcaccgacttcaccctgaagattagcagagtggaagccgaggacgtgggcgtgtactactgcttccaaggcagccacgtgccatacacctttggcggcggaacaaaggtggaaatcaagagactcgaggacctgaagaacgtgttcccacctgaggtggccgtgttcgagcctagcgaggccgagatcagccacacccagaaagccaccctcgtgtgcctggctaccggcttctaccccgaccatgtggaactgtcttggtgggtcaacggcaaagaggtgcacagcggcgtgtgtaccgacccccagccactgaaagaacagcccgccctgaacgacagccggtactgcctgagcagcagactgagagtgtccgccaccttctggcagaacccccggaaccacttcagatgccaggtgcagttctacggcctgagcgagaacgacgagtggacccaggacagagccaagcccgtgacccagatcgtgtctgccgaagcctggggcagagccgattgcggctttaccagcgagagctaccagcagggcgtgctgagcgccaccaacctgagcgtgatcggcttcagaatcctgctgctgaaagtggccggctttaacctgctgatgaccctgcggctgtggtccagcagggccaagcgatctggatctggagcaacaaacttctcactactcaaacaagcaggtgacgtggaggagaatcccgggcctactagtatggactggatttggcgcatccttttccttgtcggcgctgctaccggcgcgcattccgggccccagctccagctgcaagagtctggacctggcctggtcaagcctagcgagacactgagcctgacctgtaccgtgtccggcgatagcatcagcagcggcgattactactggggctggatcagacagcctcctggcaaaggactggaatggatcggccacatctactacagcggcgtgacctactacaaccccagcctgaagtccagagtgaccatcagcgtggacaccagccggaaccagttctccctgaagctgtctagcgtgacagccgccgataccgccgtgtactactgcaccagagaggacagcagcaactggcggagtagaggccagggaacactggtcacagttagctctggatccggcggaggcggaagtggaggcggaggatctggcggcggaggctctttcgaacaagttcagctggttcagagcggagccgaagtgaagaaacctggggcctctgtgaaggtgtcctgcaaagcctctggcctgaccatcgaggactactacatgcactgggtccgacaggcccctggacaaggacttgaatggatgggctggatcgaccccgagaacggcgatacagagtacggccctaagttccagggcagagtgaccatgaccagagacaccagcatcaacaccgcctacatggaactgagccggctgagatccgatgacaccgccgtgtactattgcgccgtgcacaatgcccactacggcacttggtttgcctattggggccagggcacactggtcaccgttagctctacgcgtatccagaaccctgatcctgccgtgtaccagctgcgggatagcaagagcagcgacaagagcgtgtgtctgttcaccgacttcgacagccagaccaacgtgtcccagagcaaggactccgacgtgtacatcaccgataagtgcgtgctggacatgcggagcatggacttcaagagcaactccgccgtggcctggtccaacaagtccgatttcgcctgcgccaacgccttcaacaacagcattatccccgaggacacattcttcccaagccccgagagcagctgcgacgtgaagctggtggaaaagagcttcgagacagacaccaacctgaacttccagatcctgtacgagatcctgctgggcaaggccaccctgtacgccgtgctggtgtctgccctggtgctgatggctatggtcaagcggaaggacagccgggga

SEQ ID NO: 5781 - DNA, 2670 bp, synthetic construct
  source 1..2670: mol_type = other DNA
atggccttaccagtgaccgccttgctcctgccgctggccttgctgctccacgccgccaggccggaagtgcagctggttgaatctggcggaggactggttcagcctggcggatctctgagactgtcttgtgccgccagcggcttcagcttcagcgacttttggatgagctgggtccgacaggcccctggcaaaggacttgaatgggtcgccacaatcagccaggccggcagcgagaaggactacgtggactctgtgaagggcagattcaccatcagccgggacaacgccaagaagtccctgtacctccagatgaacagcctgagagccgaggacaccgccgtgtactattgtgcctctggcgtgtacagcttcgactacagaggccagggcaccctggtcacagtctcttctggtaccggcggaggcggatctggcggcggaggtagcggtggcggaggatctgaattcgacatccagatgacacagagccctagcagcctgtctgccagcgtgggagacagagtgaccatcacctgtagagccagcgagaacatctacagcaacctggcctggtatcagcagaagcctggcaaggcccctaagctgctgatctacgccgccaccaatctggctgatggcgtgccaagcagattttccggctctggcagcggcaccgatttcaccctgacaatatccagcctccagcctgaggacttcgccacctactactgccagcacttttggggcacccctacattcggccagggcaccaaggtggaaatcaagagaacagttctcgaggacctgaagaacgtgttcccacctgaggtggccgtgttcgagcctagcgaggccgagatcagccacacccagaaagccaccctcgtgtgcctggctaccggcttctaccccgaccatgtggaactgtcttggtgggtcaacggcaaagaggtgcacagcggcgtgtgtaccgacccccagccactgaaagaacagcccgccctgaacgacagccggtactgcctgagcagcagactgagagtgtccgccaccttctggcagaacccccggaaccacttcagatgccaggtgcagttctacggcctgagcgagaacgacgagtggacccaggacagagccaagcccgtgacccagatcgtgtctgccgaagcctggggcagagccgattgcggctttaccagcgagagctaccagcagggcgtgctgagcgccaccaacctgagcgtgatcggcttcagaatcctgctgctgaaagtggccggctttaacctgctgatgaccctgcggctgtggtccagcagggccaagcgatctggatctggagcaacaaacttctcactactcaaacaagcaggtgacgtggaggagaatcccgggcctactagtatggactggatttggcgcatccttttccttgtcggcgctgctaccggcgcgcattccgggccccagctccagctgcaagagtctggacctggcctggtcaagcctagcgagacactgagcctgacctgtaccgtgtccggcgatagcatcagcagcggcgattactactggggctggatcagacagcctcctggcaaaggactggaatggatcggccacatctactacagcggcgtgacctactacaaccccagcctgaagtccagagtgaccatcagcgtggacaccagccggaaccagttctccctgaagctgtctagcgtgacagccgccgataccgccgtgtactactgcaccagagaggacagcagcaactggcggagtagaggccagggaacactggtcacagttagctctggatccggcggaggcggaagtggaggcggaggatctggcggcggaggctctttcgaagaagtgcagctggttgaatcaggtggcggcctggttcaacctggcggatctctgagactgagctgtgccgcctctggcttcagcctgacaaattacggcgtgcactgggtccgacaggcccctggaaaaggactggaatgggtgtccgtgatttggagcggcggcagcaccgattacaacgccgccttcatcagccggttcaccatcagcgccgacaccagcaagaataccgcctacctccagatgaactccctgagagccgaggacaccgccgtgtactattgcgccagagaactgatccacgctatggacaactggggccagggaaccctggtcacagtctcttctacgcgtatccagaaccctgatcctgccgtgtaccagctgcgggatagcaagagcagcgacaagagcgtgtgtctgttcaccgacttcgacagccagaccaacgtgtcccagagcaaggactccgacgtgtacatcaccgataagtgcgtgctggacatgcggagcatggacttcaagagcaactccgccgtggcctggtccaacaagtccgatttcgcctgcgccaacgccttcaacaacagcattatccccgaggacacattcttcccaagccccgagagcagctgcgacgtgaagctggtggaaaagagcttcgagacagacaccaacctgaacttccagatcctgtacgagatcctgctgggcaaggccaccctgtacgccgtgctggtgtctgccctggtgctgatggctatggtcaagcggaaggacagccgggga

SEQ ID NO: 5782 - DNA, 2691 bp, synthetic construct
  source 1..2691: mol_type = other DNA
atggccttaccagtgaccgccttgctcctgccgctggccttgctgctccacgccgccaggccggaagtgcagctggttgaatctggcggaggactggttcagcctggcggatctctgagactgtcttgtgccgccagcggcttcagcttcagcgacttttggatgagctgggtccgacaggcccctggcaaaggacttgaatgggtcgccacaatcagccaggccggcagcgagaaggactacgtggactctgtgaagggcagattcaccatcagccgggacaacgccaagaagtccctgtacctccagatgaacagcctgagagccgaggacaccgccgtgtactattgtgcctctggcgtgtacagcttcgactacagaggccagggcaccctggtcacagtctcttctggtaccggcggaggcggatctggcggcggaggtagcggtggcggaggatctgaattcgacttcgtgatgacacagagccctctgagcctgcctgtgacacctggcgaacctgccagcatcagctgtagaagcagccagagcatcgtgcacagcaacggcaacacctacctggaatggtatctccagaagcctggacagagcccacagctgctgatctacaaggtgtccaacagattcagcggcgtgcccgacagattttctggcagcggctctggcaccgacttcaccctgaagattagcagagtggaagccgaggacgtgggcgtgtactactgcttccaaggctctcacgtgcccctgacctttggacagggcaccaagctggaaatcaagagactcgaggacctgaagaacgtgttcccacctgaggtggccgtgttcgagcctagcgaggccgagatcagccacacccagaaagccaccctcgtgtgcctggctaccggcttctaccccgaccatgtggaactgtcttggtgggtcaacggcaaagaggtgcacagcggcgtgtgtaccgacccccagccactgaaagaacagcccgccctgaacgacagccggtactgcctgagcagcagactgagagtgtccgccaccttctggcagaacccccggaaccacttcagatgccaggtgcagttctacggcctgagcgagaacgacgagtggacccaggacagagccaagcccgtgacccagatcgtgtctgccgaagcctggggcagagccgattgcggctttaccagcgagagctaccagcagggcgtgctgagcgccaccaacctgagcgtgatcggcttcagaatcctgctgctgaaagtggccggctttaacctgctgatgaccctgcggctgtggtccagcagggccaagcgatctggatctggagcaacaaacttctcactactcaaacaagcaggtgacgtggaggagaatcccgggcctactagtatggactggatttggcgcatccttttccttgtcggcgctgctaccggcgcgcattccgggccccagctccagctgcaagagtctggacctggcctggtcaagcctagcgagacactgagcctgacctgtaccgtgtccggcgatagcatcagcagcggcgattactactggggctggatcagacagcctcctggcaaaggactggaatggatcggccacatctactacagcggcgtgacctactacaaccccagcctgaagtccagagtgaccatcagcgtggacaccagccggaaccagttctccctgaagctgtctagcgtgacagccgccgataccgccgtgtactactgcaccagagaggacagcagcaactggcggagtagaggccagggaacactggtcacagttagctctggatccggcggaggcggaagtggaggcggaggatctggcggcggaggctctttcgaagaagtgcagctggttgaaagcggagccgaagtgaagaaacctggggcctctgtgaaggtgtcctgcaaggccagcggctacacctttaccagctactggattcactgggtccgacaggcccctggacaaggacttgagtggatgggcgagaacgacccctccaacggcaggaccaactacaacgagaagttcaagaaccgcgtgaccctgaccgtggacaccagcatctctaccgcctacatggaactgagccggctgagatccgatgacaccgccgtgtactattgcgccagaggacccaactacttttacagcatggactactggggccagggcacaatggtcaccgttagctctacgcgtatccagaaccctgatcctgccgtgtaccagctgcgggatagcaagagcagcgacaagagcgtgtgtctgttcaccgacttcgacagccagaccaacgtgtcccagagcaaggactccgacgtgtacatcaccgataagtgcgtgctggacatgcggagcatggacttcaagagcaactccgccgtggcctggtccaacaagtccgatttcgcctgcgccaacgccttcaacaacagcattatccccgaggacacattcttcccaagccccgagagcagctgcgacgtgaagctggtggaaaagagcttcgagacagacaccaacctgaacttccagatcctgtacgagatcctgctgggcaaggccaccctgtacgccgtgctggtgtctgccctggtgctgatggctatggtcaagcggaaggacagccgggga

SEQ ID NO: 5783 - DNA, 2670 bp, synthetic construct
  source 1..2670: mol_type = other DNA
atggccttaccagtgaccgccttgctcctgccgctggccttgctgctccacgccgccaggccggaagtgcagctggttgaatctggcggaggactggttcagcctggcggatctctgagactgtcttgtgccgccagcggcttcagcttcagcgacttttggatgagctgggtccgacaggcccctggcaaaggacttgaatgggtcgccacaatcagccaggccggcagcgagaaggactacgtggactctgtgaagggcagattcaccatcagccgggacaacgccaagaagtccctgtacctccagatgaacagcctgagagccgaggacaccgccgtgtactattgtgcctctggcgtgtacagcttcgactacagaggccagggcaccctggtcacagtctcttctggtaccggcggaggcggatctggcggcggaggtagcggtggcggaggatctgaattcgacatccagctgactcagagccctagctttctgagcgccagcgtgggcgacagagtgaccatcacatgtagcgccagatccagcatcagcttcatgtactggtatcagcagaagcccggcaaggcccctaagctgctgatctacgacaccagcaatctggcctctggcgtgcccagcagattttctggaagcggcagcggcaccgagttcaccctgacaatctctagcctggaagccgaggatgccgccacctactattgccagcagtggtccagctatcccctgacatttggacagggcaccaagctggaaatcaaactcgaggacctgaagaacgtgttcccacctgaggtggccgtgttcgagcctagcgaggccgagatcagccacacccagaaagccaccctcgtgtgcctggctaccggcttctaccccgaccatgtggaactgtcttggtgggtcaacggcaaagaggtgcacagcggcgtgtgtaccgacccccagccactgaaagaacagcccgccctgaacgacagccggtactgcctgagcagcagactgagagtgtccgccaccttctggcagaacccccggaaccacttcagatgccaggtgcagttctacggcctgagcgagaacgacgagtggacccaggacagagccaagcccgtgacccagatcgtgtctgccgaagcctggggcagagccgattgcggctttaccagcgagagctaccagcagggcgtgctgagcgccaccaacctgagcgtgatcggcttcagaatcctgctgctgaaagtggccggctttaacctgctgatgaccctgcggctgtggtccagcagggccaagcgatctggatctggagcaacaaacttctcactactcaaacaagcaggtgacgtggaggagaatcccgggcctactagtatggactggatttggcgcatccttttccttgtcggcgctgctaccggcgcgcattccgggccccagctccagctgcaagagtctggacctggcctggtcaagcctagcgagacactgagcctgacctgtaccgtgtccggcgatagcatcagcagcggcgattactactggggctggatcagacagcctcctggcaaaggactggaatggatcggccacatctactacagcggcgtgacctactacaaccccagcctgaagtccagagtgaccatcagcgtggacaccagccggaaccagttctccctgaagctgtctagcgtgacagccgccgataccgccgtgtactactgcaccagagaggacagcagcaactggcggagtagaggccagggaacactggtcacagttagctctggatccggcggaggcggaagtggaggcggaggatctggcggcggaggctctttcgaacaggttcagctggttcagtctggggccgaagtgaagaaacctggggcctctgtgaaggtgtcctgcaaggcttccggctacacctttaccggctcttggatgaactgggtccgacaggctcctggacagggactcgaatggatcggcagaatctatcctggcgacggcgagacaaactacaacggcaagttcaaggaccgcgtgacaatcaccgccgacaagagcacaagcaccgcctacatggaactgagcagcctgcggagcgaagataccgccgtgtactactgcgcccggatctacggcaacaacgtgtacttcgatgtgtggggccagggcacaaccgtgacagtctcttctacgcgtatccagaaccctgatcctgccgtgtaccagctgcgggatagcaagagcagcgacaagagcgtgtgtctgttcaccgacttcgacagccagaccaacgtgtcccagagcaaggactccgacgtgtacatcaccgataagtgcgtgctggacatgcggagcatggacttcaagagcaactccgccgtggcctggtccaacaagtccgatttcgcctgcgccaacgccttcaacaacagcattatccccgaggacacattcttcccaagccccgagagcagctgcgacgtgaagctggtggaaaagagcttcgagacagacaccaacctgaacttccagatcctgtacgagatcctgctgggcaaggccaccctgtacgccgtgctggtgtctgccctggtgctgatggctatggtcaagcggaaggacagccgggga

SEQ ID NO: 5784 - DNA, 2694 bp, synthetic construct
  source 1..2694: mol_type = other DNA
atggccttaccagtgaccgccttgctcctgccgctggccttgctgctccacgccgccaggccggaagtgcagctggttgaatctggcggaggactggttcagcctggcggatctctgagactgtcttgtgccgccagcggcttcagcttcagcgacttttggatgagctgggtccgacaggcccctggcaaaggacttgaatgggtcgccacaatcagccaggccggcagcgagaaggactacgtggactctgtgaagggcagattcaccatcagccgggacaacgccaagaagtccctgtacctccagatgaacagcctgagagccgaggacaccgccgtgtactattgtgcctctggcgtgtacagcttcgactacagaggccagggcaccctggtcacagtctcttctggtaccggcggaggcggatctggcggcggaggtagcggtggcggaggatctgaattccagctggtgctgacacagtctccaagcgcctctgccagcctgggatctagcgtgaagctgacctgtacactgagcagcggccacaagaccgacaccatcgactggtatcagcagcagcctggcaaggcccctagatacctgatgaagctggaaggcagcggcagctacaacaaaggctctggcgtgcccgatagattcagcggcagttcttctggcgctgattggtatctgaccatcagcagcctccagagcgaggacgaggccgattactactgcggcacagactaccccggcaactacctgtttggcggcggaacacagctgacagtgcttggcctcgaggacctgaagaacgtgttcccacctgaggtggccgtgttcgagcctagcgaggccgagatcagccacacccagaaagccaccctcgtgtgcctggctaccggcttctaccccgaccatgtggaactgtcttggtgggtcaacggcaaagaggtgcacagcggcgtgtgtaccgacccccagccactgaaagaacagcccgccctgaacgacagccggtactgcctgagcagcagactgagagtgtccgccaccttctggcagaacccccggaaccacttcagatgccaggtgcagttctacggcctgagcgagaacgacgagtggacccaggacagagccaagcccgtgacccagatcgtgtctgccgaagcctggggcagagccgattgcggctttaccagcgagagctaccagcagggcgtgctgagcgccaccaacctgagcgtgatcggcttcagaatcctgctgctgaaagtggccggctttaacctgctgatgaccctgcggctgtggtccagcagggccaagcgatctggatctggagcaacaaacttctcactactcaaacaagcaggtgacgtggaggagaatcccgggcctactagtatggactggatttggcgcatccttttccttgtcggcgctgctaccggcgcgcattccgggccccagctccagctgcaagagtctggacctggcctggtcaagcctagcgagacactgagcctgacctgtaccgtgtccggcgatagcatcagcagcggcgattactactggggctggatcagacagcctcctggcaaaggactggaatggatcggccacatctactacagcggcgtgacctactacaaccccagcctgaagtccagagtgaccatcagcgtggacaccagccggaaccagttctccctgaagctgtctagcgtgacagccgccgataccgccgtgtactactgcaccagagaggacagcagcaactggcggagtagaggccagggaacactggtcacagttagctctggatccggcggaggcggaagtggaggcggaggatctggcggcggaggctctttcgaacaagaacagctggttgaaagcggcggaggactggttcaacctggcggttctctgagactgagctgtgccgccagcggcttcaccttcagcgactactacatgagctggatcagacaggccccaggcaaaggactggaatgggtcgccacaatctaccccagcagcggcaagacctactacgccgattctgccaagggcagactgaccatctccagcgacaacgccaaggacagcctgtacctccagatgaacagcctgagagccgaggacaccgccgtgtactactgcaccagagatagctacgccgacgacgccgctctgtttgacatttggggccagggcaccaccgtgaccgtttcttctacgcgtatccagaaccctgatcctgccgtgtaccagctgcgggatagcaagagcagcgacaagagcgtgtgtctgttcaccgacttcgacagccagaccaacgtgtcccagagcaaggactccgacgtgtacatcaccgataagtgcgtgctggacatgcggagcatggacttcaagagcaactccgccgtggcctggtccaacaagtccgatttcgcctgcgccaacgccttcaacaacagcattatccccgaggacacattcttcccaagccccgagagcagctgcgacgtgaagctggtggaaaagagcttcgagacagacaccaacctgaacttccagatcctgtacgagatcctgctgggcaaggccaccctgtacgccgtgctggtgtctgccctggtgctgatggctatggtcaagcggaaggacagccgggga

SEQ ID NO: 5785 - DNA, 2670 bp, synthetic construct; identical to SEQ ID NO: 5781
  source 1..2670: mol_type = other DNA

SEQ ID NO: 5786 - DNA, 2691 bp, synthetic construct; identical to SEQ ID NO: 5782
  source 1..2691: mol_type = other DNA

SEQ ID NO: 5787 - DNA, 2670 bp, synthetic construct; identical to SEQ ID NO: 5783
  source 1..2670: mol_type = other DNA

SEQ ID NO: 5788 - DNA, 2694 bp, synthetic construct; identical to SEQ ID NO: 5784
  source 1..2694: mol_type = other DNA

SEQ ID NO: 5789 - DNA, 2691 bp, synthetic construct
  source 1..2691: mol_type = other DNA
atggccttaccagtgaccgccttgctcctgccgctggccttgctgctccacgccgccaggccggaagtgcagctggttgaatctggcggaggactggttcagcctggcggatctctgagactgtcttgtgccgccagcggcttcagcttcagcgacttttggatgagctgggtccgacaggcccctggcaaaggacttgaatgggtcgccacaatcagccaggccggcagcgagaaggactacgtggactctgtgaagggcagattcaccatcagccgggacaacgccaagaagtccctgtacctccagatgaacagcctgagagccgaggacaccgccgtgtactattgtgcctctggcgtgtacagcttcgactacagaggccagggcaccctggtcacagtctcttctggtaccggcggaggcggatctggcggcggaggtagcggtggcggaggatctgaattcgatatccagctcactcaaagcccctctagtctctctgcctcagtgggggatcgggtcagttttacttgtcaagcttcacaggatatcaacaacttccttaattggtatcagcagaagccaggaaaagcacccaagctgctcatctatgatgcctcaaatttggagacgggtgttcccagtcgattctctgggtcagggtccgggaccgactttacgtttacgatctcctctctgcagcccgaagacatcgccacatactattgtcaacagtacggcaacttgcctttcacatttgggggcgggactaaggttgaaatcaagaggctcgaggacctgaagaacgtgttcccacctgaggtggccgtgttcgagcctagcgaggccgagatcagccacacccagaaagccaccctcgtgtgcctggctaccggcttctaccccgaccatgtggaactgtcttggtgggtcaacggcaaagaggtgcacagcggcgtgtgtaccgacccccagccactgaaagaacagcccgccctgaacgacagccggtactgcctgagcagcagactgagagtgtccgccaccttctggcagaacccccggaaccacttcagatgccaggtgcagttctacggcctgagcgagaacgacgagtggacccaggacagagccaagcccgtgacccagatcgtgtctgccgaagcctggggcagagccgattgcggctttaccagcgagagctaccagcagggcgtgctgagcgccaccaacctgagcgtgatcggcttcagaatcctgctgctgaaagtggccggctttaacctgctgatgaccctgcggctgtggtccagcagggccaagcgatctggatctggagcaacaaacttctcactactcaaacaagcaggtgacgtggaggagaatcccgggcctactagtatggactggatttggcgcatccttttccttgtcggcgctgctaccggcgcgcattccgggccccagctccagctgcaagagtctggacctggcctggtcaagcctagcgagacactgagcctgacctgtaccgtgtccggcgatagcatcagcagcggcgattactactggggctggatcagacagcctcctggcaaaggactggaatggatcggccacatctactacagcggcgtgacctactacaaccccagcctgaagtccagagtgaccatcagcgtggacaccagccggaaccagttctccctgaagctgtctagcgtgacagccgccgataccgccgtgtactactgcaccagagaggacagcagcaactggcggagtagaggccagggaacactggtcacagttagctctggatccggcggaggcggaagtggaggcggaggatctggcggcggaggctctttcgaacaggtacagctgcaggaatctgggcccggacttgtcaagccaagtcagacactttctcttacatgtaccgtgagcggcggaagtataagcagtggaggcttttactggtcttggatacggcagcacccaggcaaaggcttggagtggattggatacattcatcattcaggatctacacactataatccatcccttaagtcccgggtcaccattagcattgatacgtctaagaatctgttcagtctcaggctgtcctccgtcactgctgccgacacagccgtgtactactgcgcctccttggtttactgcggaggcgactgttatagcggctttgattattgggggcaggggaccctcgtaaccgtgagctctacgcgtatccagaaccctgatcctgccgtgtaccagctgcgggatagcaagagcagcgacaagagcgtgtgtctgttcaccgacttcgacagccagaccaacgtgtcccagagcaaggactccgacgtgtacatcaccgataagtgcgtgctggacatgcggagcatggacttcaagagcaactccgccgtggcctggtccaacaagtccgatttcgcctgcgccaacgccttcaacaacagcattatccccgaggacacattcttcccaagccccgagagcagctgcgacgtgaagctggtggaaaagagcttcgagacagacaccaacctgaacttccagatcctgtacgagatcctgctgggcaaggccaccctgtacgccgtgctggtgtctgccctggtgctgatggctatggtcaagcggaaggacagccgggga

SEQ ID NO: 5790 - DNA, 2679 bp, synthetic construct
  source 1..2679: mol_type = other DNA
atggccttaccagtgaccgccttgctcctgccgctggccttgctgctccacgccgccaggccggaagtgcagctggttgaatctggcggaggactggttcagcctggcggatctctgagactgtcttgtgccgccagcggcttcagcttcagcgacttttggatgagctgggtccgacaggcccctggcaaaggacttgaatgggtcgccacaatcagccaggccggcagcgagaaggactacgtggactctgtgaagggcagattcaccatcagccgggacaacgccaagaagtccctgtacctccagatgaacagcctgagagccgaggacaccgccgtgtactattgtgcctctggcgtgtacagcttcgactacagaggccagggcaccctggtcacagtctcttctggtaccggcggaggcggatctggcggcggaggtagcggtggcggaggatctgaattcgacattcagatgacacagagccctagcagcctgagcgcctctgtgggagacagagtgaccatcacatgcaagagcagccagagcgtgctgtactccagcaatcagaagaactacctggcctggttccagcagaagcctggcaaggctcctaagctgctgatctactgggccagcaccagagaaagcggcgtgccaagcagattttctggcagcggctctggcaccgacttcaccctgacaatatccagcctccagcctgaggacttcgccacctacttttgccaccagtacctgagcagctacacattcggacagggcaccaaggtggaaatcaagcggctcgaggacctgaagaacgtgttcccacctgaggtggccgtgttcgagcctagcgaggccgagatcagccacacccagaaagccaccctcgtgtgcctggctaccggcttctaccccgaccatgtggaactgtcttggtgggtcaacggcaaagaggtgcacagcggcgtgtgtaccgacccccagccactgaaagaacagcccgccctgaacgacagccggtactgcctgagcagcagactgagagtgtccgccaccttctggcagaacccccggaaccacttcagatgccaggtgcagttctacggcctgagcgagaacgacgagtggacccaggacagagccaagcccgtgacccagatcgtgtctgccgaagcctggggcagagccgattgcggctttaccagcgagagctaccagcagggcgtgctgagcgccaccaacctgagcgtgatcggcttcagaatcctgctgctgaaagtggccggctttaacctgctgatgaccctgcggctgtggtccagcagggccaagcgatctggatctggagcaacaaacttctcactactcaaacaagcaggtgacgtggaggagaatcccgggcctactagtatggactggatttggcgcatccttttccttgtcggcgctgctaccggcgcgcattccgggccccagctccagctgcaagagtctggacctggcctggtcaagcctagcgagacactgagcctgacctgtaccgtgtccggcgatagcatcagcagcggcgattactactggggctggatcagacagcctcctggcaaaggactggaatggatcggccacatctactacagcggcgtgacctactacaaccccagcctgaagtccagagtgaccatcagcgtggacaccagccggaaccagttctccctgaagctgtctagcgtgacagccgccgataccgccgtgtactactgcaccagagaggacagcagcaactggcggagtagaggccagggaacactggtcacagttagctctggatccggcggaggcggaagtggaggcggaggatctggcggcggaggctctttcgaagaggtgcagctggttgaatctggcggaggactggttcagcctggcggatctctgagactgtcttgtgccgccagcggctacaccttcaccacctattggatgcactgggtccgacaggcccctggcaaaggacttgagtgggtcggatatatcaggcccagcaccggctacacagagtacaaccagaagttcaaggaccgcttcaccatcagcgccgacaccagcaagaataccgcctacctccagatgaacagcctgagagccgaggacaccgccgtgtactactgtgccagatccagatggctgctggactattggggccagggcacactggttacagtttctacgcgtatccagaaccctgatcctgccgtgtaccagctgcgggatagcaagagcagcgacaagagcgtgtgtctgttcaccgacttcgacagccagaccaacgtgtcccagagcaaggactccgacgtgtacatcaccgataagtgcgtgctggacatgcggagcatggacttcaagagcaactccgccgtggcctggtccaacaagtccgatttcgcctgcgccaacgccttcaacaacagcattatccccgaggacacattcttcccaagccccgagagcagctgcgacgtgaagctggtggaaaagagcttcgagacagacaccaacctgaacttccagatcctgtacgagatcctgctgggcaaggccaccctgtacgccgtgctggtgtctgccctggtgctgatggctatggtcaagcggaaggacagccgggga

SEQ ID NO: 5791 - DNA, 2670 bp, synthetic construct
  source 1..2670: mol_type = other DNA
atggccttaccagtgaccgccttgctcctgccgctggccttgctgctccacgccgccaggccggaagtgcagctggttgaatctggcggaggactggttcagcctggcggatctctgagactgtcttgtgccgccagcggcttcagcttcagcgacttttggatgagctgggtccgacaggcccctggcaaaggacttgaatgggtcgccacaatcagccaggccggcagcgagaaggactacgtggactctgtgaagggcagattcaccatcagccgggacaacgccaagaagtccctgtacctccagatgaacagcctgagagccgaggacaccgccgtgtactattgtgcctctggcgtgtacagcttcgactacagaggccagggcaccctggtcacagtctcttctggtaccggcggaggcggatctggcggcggaggtagcggtggcggaggatctgaattcgacatccagatgacacagagccctagcagcctgtctgccagcgtgggagacagagtgaccatcacctgtagagccagccaggacatcagcaactacctgaactggtatcagcagaagcccggcaaggcccctaagctgctgatctactacaccagcagactgcacagcggcgtgcccagcagattttctggctctggcagcggcaccgacttcaccctgacaatatctagcctccagcctgaggacttcgccacctactattgccagcagggcaacaccctgccttacacatttggacagggcaccaaggtggaaatcaagagactcgaggacctgaagaacgtgttcccacctgaggtggccgtgttcgagcctagcgaggccgagatcagccacacccagaaagccaccctcgtgtgcctggctaccggcttctaccccgaccatgtggaactgtcttggtgggtcaacggcaaagaggtgcacagcggcgtgtgtaccgacccccagccactgaaagaacagcccgccctgaacgacagccggtactgcctgagcagcagactgagagtgtccgccaccttctggcagaacccccggaaccacttcagatgccaggtgcagttctacggcctgagcgagaacgacgagtggacccaggacagagccaagcccgtgacccagatcgtgtctgccgaagcctggggcagagccgattgcggctttaccagcgagagctaccagcagggcgtgctgagcgccaccaacctgagcgtgatcggcttcagaatcctgctgctgaaagtggccggctttaacctgctgatgaccctgcggctgtggtccagcagggccaagcgatctggatctggagcaacaaacttctcactactcaaacaagcaggtgacgtggaggagaatcccgggcctactagtatggactggatttggcgcatccttttccttgtcggcgctgctaccggcgcgcattccgggccccagctccagctgcaagagtctggacctggcctggtcaagcctagcgagacactgagcctgacctgtaccgtgtccggcgatagcatcagcagcggcgattactactggggctggatcagacagcctcctggcaaaggactggaatggatcggccacatctactacagcggcgtgacctactacaaccccagcctgaagtccagagtgaccatcagcgtggacaccagccggaaccagttctccctgaagctgtctagcgtgacagccgccgataccgccgtgtactactgcaccagagaggacagcagcaactggcggagtagaggccagggaacactggtcacagttagctctggatccggcggaggcggaagtggaggcggaggatctggcggcggaggctctttcgaagaagtgcagctggttgaatcaggtggcggcctggttcaacctggcggatctctgagactgagctgtgccgccagcggcttcaccttcagcgactactttatgagctgggtccgacaggcccctggcaaaggacttgaatgggtcgccaccatcagcaatggcggcacctacacttactaccccgacagcgtgaagggcagattcaccatctccagagacaacagcaagaacaccctgtacctccagatgaactccctgagagccgaggacaccgccgtgtactactgcgccagattcgacggctacatcttcgactattggggccagggcaccctggtcacagtctcttctacgcgtatccagaaccctgatcctgccgtgtaccagctgcgggatagcaagagcagcgacaagagcgtgtgtctgttcaccgacttcgacagccagaccaacgtgtcccagagcaaggactccgacgtgtacatcaccgataagtgcgtgctggacatgcggagcatggacttcaagagcaactccgccgtggcctggtccaacaagtccgatttcgcctgcgccaacgccttcaacaacagcattatccccgaggacacattcttcccaagccccgagagcagctgcgacgtgaagctggtggaaaagagcttcgagacagacaccaacctgaacttccagatcctgtacgagatcctgctgggcaaggccaccctgtacgccgtgctggtgtctgccctggtgctgatggctatggtcaagcggaaggacagccgggga

SEQ ID NO: 5792 - DNA, 2685 bp, synthetic construct
  source 1..2685: mol_type = other DNA
atggccttaccagtgaccgccttgctcctgccgctggccttgctgctccacgccgccaggccggaagtgcagctggttgaatctggcggaggactggttcagcctggcggatctctgagactgtcttgtgccgccagcggcttcagcttcagcgacttttggatgagctgggtccgacaggcccctggcaaaggacttgaatgggtcgccacaatcagccaggccggcagcgagaaggactacgtggactctgtgaagggcagattcaccatcagccgggacaacgccaagaagtccctgtacctccagatgaacagcctgagagccgaggacaccgccgtgtactattgtgcctctggcgtgtacagcttcgactacagaggccagggcaccctggtcacagtctcttctggtaccggcggaggcggatctggcggcggaggtagcggtggcggaggatctgaattcgacatccagatgacacagactacatcctccctgtctgcctctctgggagacagagtcaccatcagttgcagggcaagtcaggacattagtaagtacctgaactggtatcagcagaaaccagatggaactgttaaactcctgatctaccatacatcaagattacactcaggagtcccatcaaggttcagtggcagtgggtctggaacagattattctctcaccattagcaacctggagcaagaagatattgccacttacttttgccaacagggtaatacgcttccgtacacgttcggaggggggaccaagctggagatcacactcgagatccagaaccctgatcctgccgtgtaccagctgcgggatagcaagagcagcgacaagagcgtgtgtctgttcaccgacttcgacagccagaccaacgtgtcccagagcaaggactccgacgtgtacatcaccgataagtgcgtgctggacatgcggagcatggacttcaagagcaactccgccgtggcctggtccaacaagtccgatttcgcctgcgccaacgccttcaacaacagcattatccccgaggacacattcttcccaagccccgagagcagctgcgacgtgaagctggtggaaaagagcttcgagacagacaccaacctgaacttccagatcctgtacgagatcctgctgggcaaggccaccctgtacgccgtgctggtgtctgccctggtgctgatggctatggtcaagcggaaggacagccggggacgcgccaagagaagcggatctggcgtgaagcagaccctgaatttcgacctgctgaagctggctggcgacgtggaatccaacccaggccctactagtatggactggatttggcgcatccttttccttgtcggcgctgctaccggcgcgcattccgggccccagctccagctgcaagagtctggacctggcctggtcaagcctagcgagacactgagcctgacctgtaccgtgtccggcgatagcatcagcagcggcgattactactggggctggatcagacagcctcctggcaaaggactggaatggatcggccacatctactacagcggcgtgacctactacaaccccagcctgaagtccagagtgaccatcagcgtggacaccagccggaaccagttctccctgaagctgtctagcgtgacagccgccgataccgccgtgtactactgcaccagagaggacagcagcaactggcggagtagaggccagggaacactggtcacagttagctctggatccggcggaggcggaagtggaggcggaggatctggcggcggaggctctttcgaagtgaaactgcaggagtcaggacctggcctggtggcgccctcacagagcctgtccgtcacatgcactgtctcaggggtctcattacccgactatggtgtaagctggattcgccagcctccacgaaagggtctggagtggctgggagtaatatggggtagtgaaaccacatactataattcagctctcaaatccagactgaccatcatcaaggacaactccaagagccaagttttcttaaaaatgaacagtctgcaaactgatgacacagccatttactactgtgccaaacattattactacggtggtagctatgctatggactactggggccaaggaacctcagtcaccgtctcctcaacgcgtgaggacctgaagaacgtgttcccacctgaggtggccgtgttcgagcctagcgaggccgagatcagccacacccagaaagccaccctcgtgtgcctggctaccggcttctaccccgaccatgtggaactgtcttggtgggtcaacggcaaagaggtgcacagcggcgtgtgtaccgacccccagccactgaaagaacagcccgccctgaacgacagccggtactgcctgagcagcagactgagagtgtccgccaccttctggcagaacccccggaaccacttcagatgccaggtgcagttctacggcctgagcgagaacgacgagtggacccaggacagagccaagcccgtgacccagatcgtgtctgccgaagcctggggcagagccgattgcggctttaccagcgagagctaccagcagggcgtgctgagcgccaccaacctgagcgtgatcggcttcagaatcctgctgctgaaagtggccggctttaacctgctgatgaccctgcggctgtggtccagc

SEQ ID NO: 5793 - DNA, 2688 bp, synthetic construct
  source 1..2688: mol_type = other DNA
atggccttaccagtgaccgccttgctcctgccgctggccttgctgctccacgccgccaggccggaagtgcagctggttgaatctggcggaggactggttcagcctggcggatctctgagactgtcttgtgccgccagcggcttcagcttcagcgacttttggatgagctgggtccgacaggcccctggcaaaggacttgaatgggtcgccacaatcagccaggccggcagcgagaaggactacgtggactctgtgaagggcagattcaccatcagccgggacaacgccaagaagtccctgtacctccagatgaacagcctgagagccgaggacaccgccgtgtactattgtgcctctggcgtgtacagcttcgactacagaggccagggcaccctggtcacagtctcttctggtaccggcggaggcggatctggcggcggaggtagcggtggcggaggatctgaattcgagatcgtgatgacccagagccctgccaccctgtctctgagccctggcgaaagagccaccctgagctgtagagccagccaggacatcagcaagtacctgaactggtatcagcagaagcccggccaggcccccagactgctgatctaccacaccagcagactgcacagcggcatccccgccagattttctggctctggcagcggcaccgactacaccctgacaatcagcagcctccagcccgaggacttcgccgtgtacttctgtcagcaaggcaacaccctgccctacaccttcggccagggcaccaagctggaaatcaagctcgagatccagaaccctgatcctgccgtgtaccagctgcgggatagcaagagcagcgacaagagcgtgtgtctgttcaccgacttcgacagccagaccaacgtgtcccagagcaaggactccgacgtgtacatcaccgataagtgcgtgctggacatgcggagcatggacttcaagagcaactccgccgtggcctggtccaacaagtccgatttcgcctgcgccaacgccttcaacaacagcattatccccgaggacacattcttcccaagccccgagagcagctgcgacgtgaagctggtggaaaagagcttcgagacagacaccaacctgaacttccagatcctgtacgagatcctgctgggcaaggccaccctgtacgccgtgctggtgtctgccctggtgctgatggctatggtcaagcggaaggacagccggggacgcgccaagagaagcggatctggcgtgaagcagaccctgaatttcgacctgctgaagctggctggcgacgtggaatccaacccaggccctactagtatggactggatttggcgcatccttttccttgtcggcgctgctaccggcgcgcattccgggccccagctccagctgcaagagtctggacctggcctggtcaagcctagcgagacactgagcctgacctgtaccgtgtccggcgatagcatcagcagcggcgattactactggggctggatcagacagcctcctggcaaaggactggaatggatcggccacatctactacagcggcgtgacctactacaaccccagcctgaagtccagagtgaccatcagcgtggacaccagccggaaccagttctccctgaagctgtctagcgtgacagccgccgataccgccgtgtactactgcaccagagaggacagcagcaactggcggagtagaggccagggaacactggtcacagttagctctggatccggcggaggcggaagtggaggcggaggatctggcggcggaggctctttcgaacaggtgcaactccaggaatctggccctggcctcgtgaagcccagcgagacactgagcctgacctgtaccgtgtccggcgtgtccctgcctgactatggcgtgtcctggatcagacagccccctggcaagggcctggaatggatcggagtgatttggggcagcgaaaccacctactacaacagctccctgaagtccagagtgaccatctccaaggacaactccaagaaccaggtgtccctgaagctgagcagcgtgacagccgccgacaccgccgtgtattactgcgccaagcactactactacggcggcagctacgctatggactactggggccagggaaccctcgtgaccgtgtctagtacgcgtgaggacctgaagaacgtgttcccacctgaggtggccgtgttcgagcctagcgaggccgagatcagccacacccagaaagccaccctcgtgtgcctggctaccggcttctaccccgaccatgtggaactgtcttggtgggtcaacggcaaagaggtgcacagcggcgtgtgtaccgacccccagccactgaaagaacagcccgccctgaacgacagccggtactgcctgagcagcagactgagagtgtccgccaccttctggcagaacccccggaaccacttcagatgccaggtgcagttctacggcctgagcgagaacgacgagtggacccaggacagagccaagcccgtgacccagatcgtgtctgccgaagcctggggcagagccgattgcggctttaccagcgagagctaccagcagggcgtgctgagcgccaccaacctgagcgtgatcggcttcagaatcctgctgctgaaagtggccggctttaacctgctgatgaccctgcggctgtggtccagc

SEQ ID NO: 5794 - DNA, 2691 bp, synthetic construct
  source 1..2691: mol_type = other DNA
atggccttaccagtgaccgccttgctcctgccgctggccttgctgctccacgccgccaggccggaagtgcagctggttgaatctggcggaggactggttcagcctggcggatctctgagactgtcttgtgccgccagcggcttcagcttcagcgacttttggatgagctgggtccgacaggcccctggcaaaggacttgaatgggtcgccacaatcagccaggccggcagcgagaaggactacgtggactctgtgaagggcagattcaccatcagccgggacaacgccaagaagtccctgtacctccagatgaacagcctgagagccgaggacaccgccgtgtactattgtgcctctggcgtgtacagcttcgactacagaggccagggcaccctggtcacagtctcttctggtaccggcggaggcggatctggcggcggaggtagcggtggcggaggatctgaattcgacgagatcgtgctgacacagagccccgccaccctgtcactgtctccaggcgaaagagccaccctgagctgtagcgccagcagcagcgtgtcctacatgcactggtatcagcagaagcccggccaggcccccagactgctgatctacgataccagcaagctggcctccggcatccccgccagattttctggcagcggctccggcaccgacttcaccctgacaatcagcagcctggaacccgaggacgtggccgtgtactactgttttcaaggcagcgtgtaccccttcaccttcggccagggcaccaagctggaaatcaagagactcgagatccagaaccctgatcctgccgtgtaccagctgcgggatagcaagagcagcgacaagagcgtgtgtctgttcaccgacttcgacagccagaccaacgtgtcccagagcaaggactccgacgtgtacatcaccgataagtgcgtgctggacatgcggagcatggacttcaagagcaactccgccgtggcctggtccaacaagtccgatttcgcctgcgccaacgccttcaacaacagcattatccccgaggacacattcttcccaagccccgagagcagctgcgacgtgaagctggtggaaaagagcttcgagacagacaccaacctgaacttccagatcctgtacgagatcctgctgggcaaggccaccctgtacgccgtgctggtgtctgccctggtgctgatggctatggtcaagcggaaggacagccggggacgcgccaagagaagcggatctggcgtgaagcagaccctgaatttcgacctgctgaagctggctggcgacgtggaatccaacccaggccctactagtatggactggatttggcgcatccttttccttgtcggcgctgctaccggcgcgcattccgggccccagctccagctgcaagagtctggacctggcctggtcaagcctagcgagacactgagcctgacctgtaccgtgtccggcgatagcatcagcagcggcgattactactggggctggatcagacagcctcctggcaaaggactggaatggatcggccacatctactacagcggcgtgacctactacaaccccagcctgaagtccagagtgaccatcagcgtggacaccagccggaaccagttctccctgaagctgtctagcgtgacagccgccgataccgccgtgtactactgcaccagagaggacagcagcaactggcggagtagaggccagggaacactggtcacagttagctctggatccggcggaggcggaagtggaggcggaggatctggcggcggaggctctttcgaacaggtgcagctccaggaatctggccctggcctcgtgaagcctagccagaccctgagcctgacctgtaccgtgtctggcggcagcatcagcacaagcggcatgggcgtgggctggatcagacagcaccctggcaagggcctggaatggatcggccacatttggtgggacgacgacaagcggtacaaccccgccctgaagtccagagtgaccatcagcgtggacaccagcaagaaccagttcagcctgaagctgagcagcgtgacagccgccgataccgccgtgtattattgcgcccggatggaactgtggtcctactacttcgactactggggccagggaaccctcgtgaccgtgtctagtacgcgtgaggacctgaagaacgtgttcccacctgaggtggccgtgttcgagcctagcgaggccgagatcagccacacccagaaagccaccctcgtgtgcctggctaccggcttctaccccgaccatgtggaactgtcttggtgggtcaacggcaaagaggtgcacagcggcgtgtgtaccgacccccagccactgaaagaacagcccgccctgaacgacagccggtactgcctgagcagcagactgagagtgtccgccaccttctggcagaacccccggaaccacttcagatgccaggtgcagttctacggcctgagcgagaacgacgagtggacccaggacagagccaagcccgtgacccagatcgtgtctgccgaagcctggggcagagccgattgcggctttaccagcgagagctaccagcagggcgtgctgagcgccaccaacctgagcgtgatcggcttcagaatcctgctgctgaaagtggccggctttaacctgctgatgaccctgcggctgtggtccagc

SEQ ID NO: 5795 - DNA, 2685 bp, synthetic construct
  source 1..2685: mol_type = other DNA
atggccttaccagtgaccgccttgctcctgccgctggccttgctgctccacgccgccaggccggaagtgcagctggttgaatctggcggaggactggttcagcctggcggatctctgagactgtcttgtgccgccagcggcttcagcttcagcgacttttggatgagctgggtccgacaggcccctggcaaaggacttgaatgggtcgccacaatcagccaggccggcagcgagaaggactacgtggactctgtgaagggcagattcaccatcagccgggacaacgccaagaagtccctgtacctccagatgaacagcctgagagccgaggacaccgccgtgtactattgtgcctctggcgtgtacagcttcgactacagaggccagggcaccctggtcacagtctcttctggtaccggcggaggcggatctggcggcggaggtagcggtggcggaggatctgaattcgactacatccacgtgacacagagccctagcagcctgtccgtgtccatcggcgatagagtgaccatcaactgccagacctctcaaggcgtgggcagcgacctgcactggtatcagcacaaacctggcagagcccctaagctgctgatccaccatgccagctctgtggaagatggcgtgcccagcagattttccggcaccggatttcacaccagcttcaacctgacaatcaacgacctccaggccgacgacatcggcacctactactgtcaagtgctccagagcttcggcagaggcagcagactggatacaaaactcgagatccagaaccctgatcctgccgtgtaccagctgcgggatagcaagagcagcgacaagagcgtgtgtctgttcaccgacttcgacagccagaccaacgtgtcccagagcaaggactccgacgtgtacatcaccgataagtgcgtgctggacatgcggagcatggacttcaagagcaactccgccgtggcctggtccaacaagtccgatttcgcctgcgccaacgccttcaacaacagcattatccccgaggacacattcttcccaagccccgagagcagctgcgacgtgaagctggtggaaaagagcttcgagacagacaccaacctgaacttccagatcctgtacgagatcctgctgggcaaggccaccctgtacgccgtgctggtgtctgccctggtgctgatggctatggtcaagcggaaggacagccggggacgcgccaagagaagcggatctggcgtgaagcagaccctgaatttcgacctgctgaagctggctggcgacgtggaatccaacccaggccctactagtatggactggatttggcgcatccttttccttgtcggcgctgctaccggcgcgcattccgggccccagctccagctgcaagagtctggacctggcctggtcaagcctagcgagacactgagcctgacctgtaccgtgtccggcgatagcatcagcagcggcgattactactggggctggatcagacagcctcctggcaaaggactggaatggatcggccacatctactacagcggcgtgacctactacaaccccagcctgaagtccagagtgaccatcagcgtggacaccagccggaaccagttctccctgaagctgtctagcgtgacagccgccgataccgccgtgtactactgcaccagagaggacagcagcaactggcggagtagaggccagggaacactggtcacagttagctctggatccggcggaggcggaagtggaggcggaggatctggcggcggaggctctttcgaaagggcacacctggtgcagtctggcaccgccatgaagaaacctggcgcttccgtcagagtgtcctgtcagacaagcggctacaccttcacagcccacatcctgttctggttcagacaggccccaggcagaggactggaatgggtcggatggatcaagccccagtacggggccgtgaatttcggcggaggcttcagagacagagtgaccctgaccagggacgtgtaccgggaaatcgcctacatggacatccggggcctgaagcctgatgacaccgccgtgtactactgcgccagggatagaagctacggcgacagctcttgggctctcgatgcttggggacagggcacaacagtggtggtgtctgctacgcgtgaggacctgaagaacgtgttcccacctgaggtggccgtgttcgagcctagcgaggccgagatcagccacacccagaaagccaccctcgtgtgcctggctaccggcttctaccccgaccatgtggaactgtcttggtgggtcaacggcaaagaggtgcacagcggcgtgtgtaccgacccccagccactgaaagaacagcccgccctgaacgacagccggtactgcctgagcagcagactgagagtgtccgccaccttctggcagaacccccggaaccacttcagatgccaggtgcagttctacggcctgagcgagaacgacgagtggacccaggacagagccaagcccgtgacccagatcgtgtctgccgaagcctggggcagagccgattgcggctttaccagcgagagctaccagcagggcgtgctgagcgccaccaacctgagcgtgatcggcttcagaatcctgctgctgaaagtggccggctttaacctgctgatgaccctgcggctgtggtccagc

SEQ ID NO: 5796 - DNA, 2715 bp, synthetic construct
  source 1..2715: mol_type = other DNA
atggccttaccagtgaccgccttgctcctgccgctggccttgctgctccacgccgccaggccggaagtgcagctggttgaatctggcggaggactggttcagcctggcggatctctgagactgtcttgtgccgccagcggcttcagcttcagcgacttttggatgagctgggtccgacaggcccctggcaaaggacttgaatgggtcgccacaatcagccaggccggcagcgagaaggactacgtggactctgtgaagggcagattcaccatcagccgggacaacgccaagaagtccctgtacctccagatgaacagcctgagagccgaggacaccgccgtgtactattgtgcctctggcgtgtacagcttcgactacagaggccagggcaccctggtcacagtctcttctggtaccggcggaggcggatctggcggcggaggtagcggtggcggaggatctgaattcgacgtgcagatgatccagacccccgatagcctggccgtgtccctgggacagagagccaccatctcttgcagagccagcgagagcgtggacaactacggcatcagcttcatgcactggtatcagcagaagcccggccagagccccaagctgctgatctacagagcctccaacctggaaagcggcatccccgccagattttccggcagcggcagcagaaccgacttcaccctgaccatcaaccccgtggaaaccgacgacgtggcaacctactactgccagcagaacaacaaggacccccccacctttggcggaggcaccaagctggaaatcaagctcgagatccagaaccctgatcctgccgtgtaccagctgcgggatagcaagagcagcgacaagagcgtgtgtctgttcaccgacttcgacagccagaccaacgtgtcccagagcaaggactccgacgtgtacatcaccgataagtgcgtgctggacatgcggagcatggacttcaagagcaactccgccgtggcctggtccaacaagtccgatttcgcctgcgccaacgccttcaacaacagcattatccccgaggacacattcttcccaagccccgagagcagctgcgacgtgaagctggtggaaaagagcttcgagacagacaccaacctgaacttccagatcctgtacgagatcctgctgggcaaggccaccctgtacgccgtgctggtgtctgccctggtgctgatggctatggtcaagcggaaggacagccggggacgcgccaagagaagcggatctggcgtgaagcagaccctgaatttcgacctgctgaagctggctggcgacgtggaatccaacccaggccctactagtatggactggatttggcgcatccttttccttgtcggcgctgctaccggcgcgcattccgggccccagctccagctgcaagagtctggacctggcctggtcaagcctagcgagacactgagcctgacctgtaccgtgtccggcgatagcatcagcagcggcgattactactggggctggatcagacagcctcctggcaaaggactggaatggatcggccacatctactacagcggcgtgacctactacaaccccagcctgaagtccagagtgaccatcagcgtggacaccagccggaaccagttctccctgaagctgtctagcgtgacagccgccgataccgccgtgtactactgcaccagagaggacagcagcaactggcggagtagaggccagggaacactggtcacagttagctctggatccggcggaggcggaagtggaggcggaggatctggcggcggaggctctttcgaagggggaggcggctctcaggtgcaactccagcagtctggcgctgagcttgtgaagcctggggccagcgtgaagattagctgcaaggccagcggctacgccttcagcagctactggatgaactgggtcaagcagcggcctggcaagggcctggaatggatcggccaaatctaccccggcgacggcgacaccacctacaacggcaagttcaagggcaaggccaccctgacagccgacaagagcagcagcaccgtgtacatgcaactgaacagcctgaccagcgaggacagcgccgtgtacttctgcgtgcggtactactacggcagctccggctacttcgactattggggccagggcaccacactgaccgtgtcctctacgcgtgaggacctgaagaacgtgttcccacctgaggtggccgtgttcgagcctagcgaggccgagatcagccacacccagaaagccaccctcgtgtgcctggctaccggcttctaccccgaccatgtggaactgtcttggtgggtcaacggcaaagaggtgcacagcggcgtgtgtaccgacccccagccactgaaagaacagcccgccctgaacgacagccggtactgcctgagcagcagactgagagtgtccgccaccttctggcagaacccccggaaccacttcagatgccaggtgcagttctacggcctgagcgagaacgacgagtggacccaggacagagccaagcccgtgacccagatcgtgtctgccgaagcctggggcagagccgattgcggctttaccagcgagagctaccagcagggcgtgctgagcgccaccaacctgagcgtgatcggcttcagaatcctgctgctgaaagtggccggctttaacctgctgatgaccctgcggctgtggtccagc

SEQ ID NO: 5797 - DNA, 2688 bp, synthetic construct
  source 1..2688: mol_type = other DNA
atggccttaccagtgaccgccttgctcctgccgctggccttgctgctccacgccgccaggccggaagtgcagctggttgaatctggcggaggactggttcagcctggcggatctctgagactgtcttgtgccgccagcggcttcagcttcagcgacttttggatgagctgggtccgacaggcccctggcaaaggacttgaatgggtcgccacaatcagccaggccggcagcgagaaggactacgtggactctgtgaagggcagattcaccatcagccgggacaacgccaagaagtccctgtacctccagatgaacagcctgagagccgaggacaccgccgtgtactattgtgcctctggcgtgtacagcttcgactacagaggccagggcaccctggtcacagtctcttctggtaccggcggaggcggatctggcggcggaggtagcggtggcggaggatctgaattcgacgtgcagatgatccagacccccagcagcctgtctgccagcctgggcgatagagtgaccatcagctgtcgggccagccaggacatcggcaactacctgaactggtatcagcagaaacccgacggcaccgtgaagctgctgatctactacaccagcagactgcacagcggcgtgcccagcagattttctggcagcggctctggcaccgagtacagcctgaccatctccaacctggaacaggaagatattgctacctacttctgtcagcaaggcagcgccctgccccctacatttggcggcggaacaaagctggaaatcaacctcgagatccagaaccctgatcctgccgtgtaccagctgcgggatagcaagagcagcgacaagagcgtgtgtctgttcaccgacttcgacagccagaccaacgtgtcccagagcaaggactccgacgtgtacatcaccgataagtgcgtgctggacatgcggagcatggacttcaagagcaactccgccgtggcctggtccaacaagtccgatttcgcctgcgccaacgccttcaacaacagcattatccccgaggacacattcttcccaagccccgagagcagctgcgacgtgaagctggtggaaaagagcttcgagacagacaccaacctgaacttccagatcctgtacgagatcctgctgggcaaggccaccctgtacgccgtgctggtgtctgccctggtgctgatggctatggtcaagcggaaggacagccggggacgcgccaagagaagcggatctggcgtgaagcagaccctgaatttcgacctgctgaagctggctggcgacgtggaatccaacccaggccctactagtatggactggatttggcgcatccttttccttgtcggcgctgctaccggcgcgcattccgggccccagctccagctgcaagagtctggacctggcctggtcaagcctagcgagacactgagcctgacctgtaccgtgtccggcgatagcatcagcagcggcgattactactggggctggatcagacagcctcctggcaaaggactggaatggatcggccacatctactacagcggcgtgacctactacaaccccagcctgaagtccagagtgaccatcagcgtggacaccagccggaaccagttctccctgaagctgtctagcgtgacagccgccgataccgccgtgtactactgcaccagagaggacagcagcaactggcggagtagaggccagggaacactggtcacagttagctctggatccggcggaggcggaagtggaggcggaggatctggcggcggaggctctttcgaagctctccagctccagcagtctggcgcagaactcgtgcggcctggcgcttctgtgaccctgagctgtaaagccagcggctacaccttcaccgactacgagatgcactgggtcaagcagacccctgtgcacggcctggaatggatcggagccatcgaccctgagacaggcggcaccgcctacaaccagaagttcgagggcaaggccatcctgaccgccgacaagagcagcagcacagcctacatggaactgcggagcctgacctccgaggacagccccgtgtactactgtgccagacggcggtactacggcagcagctccttcgactattggggccagggcaccaccctgaccgtgtctagtacgcgtgaggacctgaagaacgtgttcccacctgaggtggccgtgttcgagcctagcgaggccgagatcagccacacccagaaagccaccctcgtgtgcctggctaccggcttctaccccgaccatgtggaactgtcttggtgggtcaacggcaaagaggtgcacagcggcgtgtgtaccgacccccagccactgaaagaacagcccgccctgaacgacagccggtactgcctgagcagcagactgagagtgtccgccaccttctggcagaacccccggaaccacttcagatgccaggtgcagttctacggcctgagcgagaacgacgagtggacccaggacagagccaagcccgtgacccagatcgtgtctgccgaagcctggggcagagccgattgcggctttaccagcgagagctaccagcagggcgtgctgagcgccaccaacctgagcgtgatcggcttcagaatcctgctgctgaaagtggccggctttaacctgctgatgaccctgcggctgtggtccagc

SEQ ID NO: 5798 - DNA, 2700 bp, synthetic construct
  source 1..2700: mol_type = other DNA
atggccttaccagtgaccgccttgctcctgccgctggccttgctgctccacgccgccaggccggaagtgcagctggttgaatctggcggaggactggttcagcctggcggatctctgagactgtcttgtgccgccagcggcttcagcttcagcgacttttggatgagctgggtccgacaggcccctggcaaaggacttgaatgggtcgccacaatcagccaggccggcagcgagaaggactacgtggactctgtgaagggcagattcaccatcagccgggacaacgccaagaagtccctgtacctccagatgaacagcctgagagccgaggacaccgccgtgtactattgtgcctctggcgtgtacagcttcgactacagaggccagggcaccctggtcacagtctcttctggtaccggcggaggcggatctggcggcggaggtagcggtggcggaggatctgaattcgacatcgtcctgacccagtccccagccagcctggcggtgtccctgggtcaacgagctaccatttcctgcagagcctctaagtccgtatccacttccggctatagttacctgcattggtaccaacagaaaccagggcagccacccaagctgctcatctatctggcctcaaacctggagtccggcgtgcccgccagattctccggaagtgggagcggcaccgactttacattgaacatccacccagtcgaagaggaagatgctgccacttattactgtcagcactccagggagctgccatttacatttggctctggcacaaaactggagatcaaactcgagatccagaaccctgatcctgccgtgtaccagctgcgggatagcaagagcagcgacaagagcgtgtgtctgttcaccgacttcgacagccagaccaacgtgtcccagagcaaggactccgacgtgtacatcaccgataagtgcgtgctggacatgcggagcatggacttcaagagcaactccgccgtggcctggtccaacaagtccgatttcgcctgcgccaacgccttcaacaacagcattatccccgaggacacattcttcccaagccccgagagcagctgcgacgtgaagctggtggaaaagagcttcgagacagacaccaacctgaacttccagatcctgtacgagatcctgctgggcaaggccaccctgtacgccgtgctggtgtctgccctggtgctgatggctatggtcaagcggaaggacagccggggacgcgccaagagaagcggatctggcgtgaagcagaccctgaatttcgacctgctgaagctggctggcgacgtggaatccaacccaggccctactagtatggactggatttggcgcatccttttccttgtcggcgctgctaccggcgcgcattccgggccccagctccagctgcaagagtctggacctggcctggtcaagcctagcgagacactgagcctgacctgtaccgtgtccggcgatagcatcagcagcggcgattactactggggctggatcagacagcctcctggcaaaggactggaatggatcggccacatctactacagcggcgtgacctactacaaccccagcctgaagtccagagtgaccatcagcgtggacaccagccggaaccagttctccctgaagctgtctagcgtgacagccgccgataccgccgtgtactactgcaccagagaggacagcagcaactggcggagtagaggccagggaacactggtcacagttagctctggatccggcggaggcggaagtggaggcggaggatctggcggcggaggctctttcgaacaggttcagctggtcgagtccgggggaggtctggtacagccgggtggcagcctcaagctgtcatgtgccgcatctggttttgactttagcaggtattggatgagctgggtccgccaggccccgggcaagggacttgagtggattggagaaataaaccctacttccagcacaatcaacttcacaccttctttgaaagataaggtttttatctctcgggataacgctaaaaacacactgtacttgcagatgtctaaggtgcgaagcgaagacaccgccctctattattgcgcccggggtaattactaccgctatggggatgcgatggactattgggggcaaggtacctccgtcacggtctcaacgcgtgaggacctgaagaacgtgttcccacctgaggtggccgtgttcgagcctagcgaggccgagatcagccacacccagaaagccaccctcgtgtgcctggctaccggcttctaccccgaccatgtggaactgtcttggtgggtcaacggcaaagaggtgcacagcggcgtgtgtaccgacccccagccactgaaagaacagcccgccctgaacgacagccggtactgcctgagcagcagactgagagtgtccgccaccttctggcagaacccccggaaccacttcagatgccaggtgcagttctacggcctgagcgagaacgacgagtggacccaggacagagccaagcccgtgacccagatcgtgtctgccgaagcctggggcagagccgattgcggctttaccagcgagagctaccagcagggcgtgctgagcgccaccaacctgagcgtgatcggcttcagaatcctgctgctgaaagtggccggctttaacctgctgatgaccctgcggctgtggtccagc

SEQ ID NO: 5799 - DNA, 2694 bp, synthetic construct
  source 1..2694: mol_type = other DNA
atggccttaccagtgaccgccttgctcctgccgctggccttgctgctccacgccgccaggccggaagtgcagctggttgaatctggcggaggactggttcagcctggcggatctctgagactgtcttgtgccgccagcggcttcagcttcagcgacttttggatgagctgggtccgacaggcccctggcaaaggacttgaatgggtcgccacaatcagccaggccggcagcgagaaggactacgtggactctgtgaagggcagattcaccatcagccgggacaacgccaagaagtccctgtacctccagatgaacagcctgagagccgaggacaccgccgtgtactattgtgcctctggcgtgtacagcttcgactacagaggccagggcaccctggtcacagtctcttctggtaccggcggaggcggatctggcggcggaggtagcggtggcggaggatctgaattcgacatccagatgacccagagccctagctcactgagcgccagcgtgggcgacagggtgaccattacctgctccgccagccaggacatcagcaactacctgaactggtaccagcagaagcccggcaaggcccccaagctgctgatctactacacctccaacctgcactccggcgtgcccagcaggttcagcggaagcggcagcggcaccgatttcaccctgaccatctccagcctgcagcccgaggacttcgccacctactactgccagcagtacaggaagctcccctggactttcggccagggcaccaaactggagatcaagcgtctcgagatccagaaccctgatcctgccgtgtaccagctgcgggatagcaagagcagcgacaagagcgtgtgtctgttcaccgacttcgacagccagaccaacgtgtcccagagcaaggactccgacgtgtacatcaccgataagtgcgtgctggacatgcggagcatggacttcaagagcaactccgccgtggcctggtccaacaagtccgatttcgcctgcgccaacgccttcaacaacagcattatccccgaggacacattcttcccaagccccgagagcagctgcgacgtgaagctggtggaaaagagcttcgagacagacaccaacctgaacttccagatcctgtacgagatcctgctgggcaaggccaccctgtacgccgtgctggtgtctgccctggtgctgatggctatggtcaagcggaaggacagccggggacgcgccaagagaagcggatctggcgtgaagcagaccctgaatttcgacctgctgaagctggctggcgacgtggaatccaacccaggccctactagtatggactggatttggcgcatccttttccttgtcggcgctgctaccggcgcgcattccgggccccagctccagctgcaagagtctggacctggcctggtcaagcctagcgagacactgagcctgacctgtaccgtgtccggcgatagcatcagcagcggcgattactactggggctggatcagacagcctcctggcaaaggactggaatggatcggccacatctactacagcggcgtgacctactacaaccccagcctgaagtccagagtgaccatcagcgtggacaccagccggaaccagttctccctgaagctgtctagcgtgacagccgccgataccgccgtgtactactgcaccagagaggacagcagcaactggcggagtagaggccagggaacactggtcacagttagctctggatccggcggaggcggaagtggaggcggaggatctggcggcggaggctctttcgaacaggtgcagctggtccagagcggcgccgaagtgaagaagcccggcagctccgtgaaagtgagctgcaaggccagcggcggcaccttcagcaactactggatgcactgggtgaggcaggcccccggacagggcctggagtggatgggcgccacctacaggggccacagcgacacctactacaaccagaagttcaagggccgggtgaccatcaccgccgacaagagcaccagcaccgcctacatggaactgagcagcctcaggagcgaggacaccgctgtgtattactgcgccaggggcgccatctacgacggctacgacgtgctggacaactggggccagggcacactggtgaccgtgtccagcacgcgtgaggacctgaagaacgtgttcccacctgaggtggccgtgttcgagcctagcgaggccgagatcagccacacccagaaagccaccctcgtgtgcctggctaccggcttctaccccgaccatgtggaactgtcttggtgggtcaacggcaaagaggtgcacagcggcgtgtgtaccgacccccagccactgaaagaacagcccgccctgaacgacagccggtactgcctgagcagcagactgagagtgtccgccaccttctggcagaacccccggaaccacttcagatgccaggtgcagttctacggcctgagcgagaacgacgagtggacccaggacagagccaagcccgtgacccagatcgtgtctgccgaagcctggggcagagccgattgcggctttaccagcgagagctaccagcagggcgtgctgagcgccaccaacctgagcgtgatcggcttcagaatcctgctgctgaaagtggccggctttaacctgctgatgaccctgcggctgtggtccagc

SEQ ID NO: 5800 - DNA, 2694 bp, synthetic construct
  source 1..2694: mol_type = other DNA
atggccttaccagtgaccgccttgctcctgccgctggccttgctgctccacgccgccaggccggaagtgcagctggttgaatctggcggaggactggttcagcctggcggatctctgagactgtcttgtgccgccagcggcttcagcttcagcgacttttggatgagctgggtccgacaggcccctggcaaaggacttgaatgggtcgccacaatcagccaggccggcagcgagaaggactacgtggactctgtgaagggcagattcaccatcagccgggacaacgccaagaagtccctgtacctccagatgaacagcctgagagccgaggacaccgccgtgtactattgtgcctctggcgtgtacagcttcgactacagaggccagggcaccctggtcacagtctcttctggtaccggcggaggcggatctggcggcggaggtagcggtggcggaggatctgaattcgacatcgtgctgacacagagccctgccaccctgtctctgagccctggcgatagagccaccatcagctgtagagccagcgagagcgtgaccatcctgggcagccacctgatctactggtatcagcagaagcccggccagccccccagactgctgattcagctggcctccaatgtgcagaccggcgtgccagccagattttccggcagcggcagcagaaccgacttcaccctgaccatcagcagcgtggaacccgaggacttcgccgtgtactactgcctccagagccggaccatccccagaacattcggccagggcaccaagctggaaatcaagagactcgagatccagaaccctgatcctgccgtgtaccagctgcgggatagcaagagcagcgacaagagcgtgtgtctgttcaccgacttcgacagccagaccaacgtgtcccagagcaaggactccgacgtgtacatcaccgataagtgcgtgctggacatgcggagcatggacttcaagagcaactccgccgtggcctggtccaacaagtccgatttcgcctgcgccaacgccttcaacaacagcattatccccgaggacacattcttcccaagccccgagagcagctgcgacgtgaagctggtggaaaagagcttcgagacagacaccaacctgaacttccagatcctgtacgagatcctgctgggcaaggccaccctgtacgccgtgctggtgtctgccctggtgctgatggctatggtcaagcggaaggacagccggggacgcgccaagagaagcggatctggcgtgaagcagaccctgaatttcgacctgctgaagctggctggcgacgtggaatccaacccaggccctactagtatggactggatttggcgcatccttttccttgtcggcgctgctaccggcgcgcattccgggccccagctccagctgcaagagtctggacctggcctggtcaagcctagcgagacactgagcctgacctgtaccgtgtccggcgatagcatcagcagcggcgattactactggggctggatcagacagcctcctggcaaaggactggaatggatcggccacatctactacagcggcgtgacctactacaaccccagcctgaagtccagagtgaccatcagcgtggacaccagccggaaccagttctccctgaagctgtctagcgtgacagccgccgataccgccgtgtactactgcaccagagaggacagcagcaactggcggagtagaggccagggaacactggtcacagttagctctggatccggcggaggcggaagtggaggcggaggatctggcggcggaggctctttcgaacaggtgcagctggtgcagtctggccccgaagtgaagaaacccggcgagtccgtgaagatcagctgcaaggccagcggctacaccttccggcactacagcatgaactgggtcaagcaggccccaggccagggcctgaagtggatgggcagaatcaacaccgagagcggcgtgcccatctacgccgacgacttcaagggccggttcagcttcaccgtggacaccagcgccagcaccgcctacctggaaatctccagcctgaccagcgaggataccgccgtgtatttctgctccaacgactacctgtacagcctggatttctggggccagggaaccaccctgacagtgtcctctacgcgtgaggacctgaagaacgtgttcccacctgaggtggccgtgttcgagcctagcgaggccgagatcagccacacccagaaagccaccctcgtgtgcctggctaccggcttctaccccgaccatgtggaactgtcttggtgggtcaacggcaaagaggtgcacagcggcgtgtgtaccgacccccagccactgaaagaacagcccgccctgaacgacagccggtactgcctgagcagcagactgagagtgtccgccaccttctggcagaacccccggaaccacttcagatgccaggtgcagttctacggcctgagcgagaacgacgagtggacccaggacagagccaagcccgtgacccagatcgtgtctgccgaagcctggggcagagccgattgcggctttaccagcgagagctaccagcagggcgtgctgagcgccaccaacctgagcgtgatcggcttcagaatcctgctgctgaaagtggccggctttaacctgctgatgaccctgcggctgtggtccagc

SEQ ID NO: 5801 - DNA, 2697 bp, synthetic construct
  source 1..2697: mol_type = other DNA
atggccttaccagtgaccgccttgctcctgccgctggccttgctgctccacgccgccaggccggaagtgcagctggttgaatctggcggaggactggttcagcctggcggatctctgagactgtcttgtgccgccagcggcttcagcttcagcgacttttggatgagctgggtccgacaggcccctggcaaaggacttgaatgggtcgccacaatcagccaggccggcagcgagaaggactacgtggactctgtgaagggcagattcaccatcagccgggacaacgccaagaagtccctgtacctccagatgaacagcctgagagccgaggacaccgccgtgtactattgtgcctctggcgtgtacagcttcgactacagaggccagggcaccctggtcacagtctcttctggtaccggcggaggcggatctggcggcggaggtagcggtggcggaggatctgaattccagtctgtgctgacacagcctcctagtgtgtctggcgctcctggacagagagtgaccatcagctgtacaggcagcagcagcaatatcggagccggctttgacgtgcactggtatcagcagctgcctggcacagcccctaaactgctgatctacggcaacagcaacagacccagcggcgtgcccgatagattttccggctctaagagcggcacaagcgccagcctggctattactggactccaggccgaggacgaggccgactactactgtcagagctacgacagcagcctgagcggctacgttttcggcaccggcaccaaagtgacagtgcttggtctcgagatccagaaccctgatcctgccgtgtaccagctgcgggatagcaagagcagcgacaagagcgtgtgtctgttcaccgacttcgacagccagaccaacgtgtcccagagcaaggactccgacgtgtacatcaccgataagtgcgtgctggacatgcggagcatggacttcaagagcaactccgccgtggcctggtccaacaagtccgatttcgcctgcgccaacgccttcaacaacagcattatccccgaggacacattcttcccaagccccgagagcagctgcgacgtgaagctggtggaaaagagcttcgagacagacaccaacctgaacttccagatcctgtacgagatcctgctgggcaaggccaccctgtacgccgtgctggtgtctgccctggtgctgatggctatggtcaagcggaaggacagccggggacgcgccaagagaagcggatctggcgtgaagcagaccctgaatttcgacctgctgaagctggctggcgacgtggaatccaacccaggccctactagtatggactggatttggcgcatccttttccttgtcggcgctgctaccggcgcgcattccgggccccagctccagctgcaagagtctggacctggcctggtcaagcctagcgagacactgagcctgacctgtaccgtgtccggcgatagcatcagcagcggcgattactactggggctggatcagacagcctcctggcaaaggactggaatggatcggccacatctactacagcggcgtgacctactacaaccccagcctgaagtccagagtgaccatcagcgtggacaccagccggaaccagttctccctgaagctgtctagcgtgacagccgccgataccgccgtgtactactgcaccagagaggacagcagcaactggcggagtagaggccagggaacactggtcacagttagctctggatccggcggaggcggaagtggaggcggaggatctggcggcggaggctctttcgaacaagttcagctggttcagagcggagccgaagtgaagaaacctggggcctctgtgaaggtgtcctgcaaggcttccggctacacctttaccgattactacatgcactgggtccgacaggctcccggccaaagacttgaatggatgggctggatcaaccccaacagcggcggcacaaattacgcccagaagttccaggaccggatcaccgtgaccagagacaccagctccaacaccggctacatggaactgacccggctgagatccgatgacaccgccgtgtactactgcgctagaagcccttactccggcgtgctggataagtggggacagggcacactggtcaccgtgtcatctacgcgtgaggacctgaagaacgtgttcccacctgaggtggccgtgttcgagcctagcgaggccgagatcagccacacccagaaagccaccctcgtgtgcctggctaccggcttctaccccgaccatgtggaactgtcttggtgggtcaacggcaaagaggtgcacagcggcgtgtgtaccgacccccagccactgaaagaacagcccgccctgaacgacagccggtactgcctgagcagcagactgagagtgtccgccaccttctggcagaacccccggaaccacttcagatgccaggtgcagttctacggcctgagcgagaacgacgagtggacccaggacagagccaagcccgtgacccagatcgtgtctgccgaagcctggggcagagccgattgcggctttaccagcgagagctaccagcagggcgtgctgagcgccaccaacctgagcgtgatcggcttcagaatcctgctgctgaaagtggccggctttaacctgctgatgaccctgcggctgtggtccagc

SEQ ID NO: 5802 - DNA, 2688 bp, synthetic construct
  source 1..2688: mol_type = other DNA
atggccttaccagtgaccgccttgctcctgccgctggccttgctgctccacgccgccaggccggaagtgcagctggttgaatctggcggaggactggttcagcctggcggatctctgagactgtcttgtgccgccagcggcttcagcttcagcgacttttggatgagctgggtccgacaggcccctggcaaaggacttgaatgggtcgccacaatcagccaggccggcagcgagaaggactacgtggactctgtgaagggcagattcaccatcagccgggacaacgccaagaagtccctgtacctccagatgaacagcctgagagccgaggacaccgccgtgtactattgtgcctctggcgtgtacagcttcgactacagaggccagggcaccctggtcacagtctcttctggtaccggcggaggcggatctggcggcggaggtagcggtggcggaggatctgaattccaggctgttctgacacagcctccatctgcctctggcacacctggacagagagtgaccatctcctgtagcggcagcagcagcaacatcggcagctacaccgtgtcctggtatcagcagctccctggaacagcccctaagttcctgatctacagcaacaaccagcggcctagcggcgtgcccgatagattttctggcagcaagagcggcacaagcgccagcctggctatttctggactccagtctgaggacgaggccgactactattgtgccgcctgggacgatagcctgaacggctatgtgtttggcaccggcaccaaagtgacagtgcttggtctcgagatccagaaccctgatcctgccgtgtaccagctgcgggatagcaagagcagcgacaagagcgtgtgtctgttcaccgacttcgacagccagaccaacgtgtcccagagcaaggactccgacgtgtacatcaccgataagtgcgtgctggacatgcggagcatggacttcaagagcaactccgccgtggcctggtccaacaagtccgatttcgcctgcgccaacgccttcaacaacagcattatccccgaggacacattcttcccaagccccgagagcagctgcgacgtgaagctggtggaaaagagcttcgagacagacaccaacctgaacttccagatcctgtacgagatcctgctgggcaaggccaccctgtacgccgtgctggtgtctgccctggtgctgatggctatggtcaagcggaaggacagccggggacgcgccaagagaagcggatctggcgtgaagcagaccctgaatttcgacctgctgaagctggctggcgacgtggaatccaacccaggccctactagtatggactggatttggcgcatccttttccttgtcggcgctgctaccggcgcgcattccgggccccagctccagctgcaagagtctggacctggcctggtcaagcctagcgagacactgagcctgacctgtaccgtgtccggcgatagcatcagcagcggcgattactactggggctggatcagacagcctcctggcaaaggactggaatggatcggccacatctactacagcggcgtgacctactacaaccccagcctgaagtccagagtgaccatcagcgtggacaccagccggaaccagttctccctgaagctgtctagcgtgacagccgccgataccgccgtgtactactgcaccagagaggacagcagcaactggcggagtagaggccagggaacactggtcacagttagctctggatccggcggaggcggaagtggaggcggaggatctggcggcggaggctctttcgaagttcaactggttcagagcggagccgaagtgaagaagcctggcgagagcctgaagattagctgcaaaggcagcggctacgacttcaccacctactggatcggctgggtccgacagatgcctggcaaaggactggaatggatgggcatcatctaccccggcgacagcgacaccagatacagccctagcgttagaggccgcgtgaccatcagcgccgacaagtctatcaacaccgcctacctccagtggtccagcctggaagcctctgacaccgccatgtactactgcgccagaatgtggaccttcagccaggatggatggggccagggaacactggtcacagtgtcatctacgcgtgaggacctgaagaacgtgttcccacctgaggtggccgtgttcgagcctagcgaggccgagatcagccacacccagaaagccaccctcgtgtgcctggctaccggcttctaccccgaccatgtggaactgtcttggtgggtcaacggcaaagaggtgcacagcggcgtgtgtaccgacccccagccactgaaagaacagcccgccctgaacgacagccggtactgcctgagcagcagactgagagtgtccgccaccttctggcagaacccccggaaccacttcagatgccaggtgcagttctacggcctgagcgagaacgacgagtggacccaggacagagccaagcccgtgacccagatcgtgtctgccgaagcctggggcagagccgattgcggctttaccagcgagagctaccagcagggcgtgctgagcgccaccaacctgagcgtgatcggcttcagaatcctgctgctgaaagtggccggctttaacctgctgatgaccctgcggctgtggtccagc

SEQ ID NO: 5803 - DNA, 2697 bp, synthetic construct
  source 1..2697: mol_type = other DNA
atggccttaccagtgaccgccttgctcctgccgctggccttgctgctccacgccgccaggccggaagtgcagctggttgaatctggcggaggactggttcagcctggcggatctctgagactgtcttgtgccgccagcggcttcagcttcagcgacttttggatgagctgggtccgacaggcccctggcaaaggacttgaatgggtcgccacaatcagccaggccggcagcgagaaggactacgtggactctgtgaagggcagattcaccatcagccgggacaacgccaagaagtccctgtacctccagatgaacagcctgagagccgaggacaccgccgtgtactattgtgcctctggcgtgtacagcttcgactacagaggccagggcaccctggtcacagtctcttctggtaccggcggaggcggatctggcggcggaggtagcggtggcggaggatctgaattcgacatcgtgatgacccagagccccgatagcctggccgtgtctctgggagagagagccaccatcaactgcaagagcagccagagcatcctgtacagcagcaaccagaagaactacctggcctggtatcagcagaagcccggccagagccctaagctgctgatctactgggccagcaccagagaaagcggcgtgcccgatagattcagcggcagcggctctggcaccgacttcaccctgaccatcagttctcttcaggccgaggacgtggccgtgtactactgccaccagtacatcagctcctacaccttcggccagggcaccaagctggaaatcaagctcgagatccagaaccctgatcctgccgtgtaccagctgcgggatagcaagagcagcgacaagagcgtgtgtctgttcaccgacttcgacagccagaccaacgtgtcccagagcaaggactccgacgtgtacatcaccgataagtgcgtgctggacatgcggagcatggacttcaagagcaactccgccgtggcctggtccaacaagtccgatttcgcctgcgccaacgccttcaacaacagcattatccccgaggacacattcttcccaagccccgagagcagctgcgacgtgaagctggtggaaaagagcttcgagacagacaccaacctgaacttccagatcctgtacgagatcctgctgggcaaggccaccctgtacgccgtgctggtgtctgccctggtgctgatggctatggtcaagcggaaggacagccggggacgcgccaagagaagcggatctggcgtgaagcagaccctgaatttcgacctgctgaagctggctggcgacgtggaatccaacccaggccctactagtatggactggatttggcgcatccttttccttgtcggcgctgctaccggcgcgcattccgggccccagctccagctgcaagagtctggacctggcctggtcaagcctagcgagacactgagcctgacctgtaccgtgtccggcgatagcatcagcagcggcgattactactggggctggatcagacagcctcctggcaaaggactggaatggatcggccacatctactacagcggcgtgacctactacaaccccagcctgaagtccagagtgaccatcagcgtggacaccagccggaaccagttctccctgaagctgtctagcgtgacagccgccgataccgccgtgtactactgcaccagagaggacagcagcaactggcggagtagaggccagggaacactggtcacagttagctctggatccggcggaggcggaagtggaggcggaggatctggcggcggaggctctttcgaacaggtgcagctggtgcagtctggcgctgaagtgaagaaacctggggccagcgtgaaggtgtcctgcaaggccagcggctacacctttgccagccagtggatgcactggatgagacaggcccctggacagggcctggaatggatcggctggatcaaccccggcaacgtgaacaccaagtacaacgagaagttcaagggcagagccaccctgacagtggacaccagcaccaacaccgcctacatggaactgagcagcctgcggagcgaggacaccgccgtgtattattgcgccagaagcacctggtacagacccctggattattggggccagggaacccttgtgaccgtgtcctctacgcgtgaggacctgaagaacgtgttcccacctgaggtggccgtgttcgagcctagcgaggccgagatcagccacacccagaaagccaccctcgtgtgcctggctaccggcttctaccccgaccatgtggaactgtcttggtgggtcaacggcaaagaggtgcacagcggcgtgtgtaccgacccccagccactgaaagaacagcccgccctgaacgacagccggtactgcctgagcagcagactgagagtgtccgccaccttctggcagaacccccggaaccacttcagatgccaggtgcagttctacggcctgagcgagaacgacgagtggacccaggacagagccaagcccgtgacccagatcgtgtctgccgaagcctggggcagagccgattgcggctttaccagcgagagctaccagcagggcgtgctgagcgccaccaacctgagcgtgatcggcttcagaatcctgctgctgaaagtggccggctttaacctgctgatgaccctgcggctgtggtccagc

SEQ ID NO: 5804 - DNA, 2697 bp, synthetic construct
  source 1..2697: mol_type = other DNA
atggccttaccagtgaccgccttgctcctgccgctggccttgctgctccacgccgccaggccggaagtgcagctggttgaatctggcggaggactggttcagcctggcggatctctgagactgtcttgtgccgccagcggcttcagcttcagcgacttttggatgagctgggtccgacaggcccctggcaaaggacttgaatgggtcgccacaatcagccaggccggcagcgagaaggactacgtggactctgtgaagggcagattcaccatcagccgggacaacgccaagaagtccctgtacctccagatgaacagcctgagagccgaggacaccgccgtgtactattgtgcctctggcgtgtacagcttcgactacagaggccagggcaccctggtcacagtctcttctggtaccggcggaggcggatctggcggcggaggtagcggtggcggaggatctgaattcgaccacatcgtgctgacccagagccctagcagcctgtctgccagcctgggcgacagagtgaccatcagctgtagagccagccaggacatcagcacctacctgaactggtatcagcagaaacccgacggcaccgtgaagctgctgatcttctacaccagcagactgcacgccggggtgcccagcagattttctggcagcggctctggcacccaccacagcctgaccatctccaacctggaacaggaagatattgctacctacttctgtcagcaaggcaacagcctgcccttcaccttcggcagcggcaccaagctggaaatcaagagactcgagatccagaaccctgatcctgccgtgtaccagctgcgggatagcaagagcagcgacaagagcgtgtgtctgttcaccgacttcgacagccagaccaacgtgtcccagagcaaggactccgacgtgtacatcaccgataagtgcgtgctggacatgcggagcatggacttcaagagcaactccgccgtggcctggtccaacaagtccgatttcgcctgcgccaacgccttcaacaacagcattatccccgaggacacattcttcccaagccccgagagcagctgcgacgtgaagctggtggaaaagagcttcgagacagacaccaacctgaacttccagatcctgtacgagatcctgctgggcaaggccaccctgtacgccgtgctggtgtctgccctggtgctgatggctatggtcaagcggaaggacagccggggacgcgccaagagaagcggatctggcgtgaagcagaccctgaatttcgacctgctgaagctggctggcgacgtggaatccaacccaggccctactagtatggactggatttggcgcatccttttccttgtcggcgctgctaccggcgcgcattccgggccccagctccagctgcaagagtctggacctggcctggtcaagcctagcgagacactgagcctgacctgtaccgtgtccggcgatagcatcagcagcggcgattactactggggctggatcagacagcctcctggcaaaggactggaatggatcggccacatctactacagcggcgtgacctactacaaccccagcctgaagtccagagtgaccatcagcgtggacaccagccggaaccagttctccctgaagctgtctagcgtgacagccgccgataccgccgtgtactactgcaccagagaggacagcagcaactggcggagtagaggccagggaacactggtcacagttagctctggatccggcggaggcggaagtggaggcggaggatctggcggcggaggctctttcgaacaggtgcagctgaaagagagcggccctgagctggaaaagcctggggccagcgtgaagattagctgcaaggccagcggctacagcttcaccgcctacagcatgaactgggtcaagcagaacaacggcatgagcctggaatggatcggcagcatcgacccctactacggcgacaccaaatacgcccagaagttcaagggcaaggccaccctgaccgtggataaggccagcagcaccgcctacctccagctgaagtctctgaccagcgaggacagcgccgtgtactactgcgccagacggatgattaccaccggcgactggtacttcgacgtgtggggagccggaaccaccgtgacagtgtctagcacgcgtgaggacctgaagaacgtgttcccacctgaggtggccgtgttcgagcctagcgaggccgagatcagccacacccagaaagccaccctcgtgtgcctggctaccggcttctaccccgaccatgtggaactgtcttggtgggtcaacggcaaagaggtgcacagcggcgtgtgtaccgacccccagccactgaaagaacagcccgccctgaacgacagccggtactgcctgagcagcagactgagagtgtccgccaccttctggcagaacccccggaaccacttcagatgccaggtgcagttctacggcctgagcgagaacgacgagtggacccaggacagagccaagcccgtgacccagatcgtgtctgccgaagcctggggcagagccgattgcggctttaccagcgagagctaccagcagggcgtgctgagcgccaccaacctgagcgtgatcggcttcagaatcctgctgctgaaagtggccggctttaacctgctgatgaccctgcggctgtggtccagc

SEQ ID NO: 5805 - DNA, 2697 bp, synthetic construct; identical to SEQ ID NO: 5804
  source 1..2697: mol_type = other DNA

SEQ ID NO: 5806 - DNA, 2697 bp, synthetic construct
  source 1..2697: mol_type = other DNA
atggccttaccagtgaccgccttgctcctgccgctggccttgctgctccacgccgccaggccggaagtgcagctggttgaatctggcggaggactggttcagcctggcggatctctgagactgtcttgtgccgccagcggcttcagcttcagcgacttttggatgagctgggtccgacaggcccctggcaaaggacttgaatgggtcgccacaatcagccaggccggcagcgagaaggactacgtggactctgtgaagggcagattcaccatcagccgggacaacgccaagaagtccctgtacctccagatgaacagcctgagagccgaggacaccgccgtgtactattgtgcctctggcgtgtacagcttcgactacagaggccagggcaccctggtcacagtctcttctggtaccggcggaggcggatctggcggcggaggtagcggtggcggaggatctgaattcgacgagatcgtgctgacacagagccctgccaccctgtctctgagccctggcgaaagagccaccctgagctgtagagccagccagagcgtgtccagctacctggcctggtatcagcagaagcccggccaggctccccggctgctgatctacgatgccagcaatagagccaccggcatccccgccagattttccggctctggcagcggcaccgacttcaccctgaccatcagctccctggaacccgaggacttcgccgtgtactactgccagcagcggagcaactggcccatcacattcggccagggcacccggctggaaatcaaactcgagatccagaaccctgatcctgccgtgtaccagctgcgggatagcaagagcagcgacaagagcgtgtgtctgttcaccgacttcgacagccagaccaacgtgtcccagagcaaggactccgacgtgtacatcaccgataagtgcgtgctggacatgcggagcatggacttcaagagcaactccgccgtggcctggtccaacaagtccgatttcgcctgcgccaacgccttcaacaacagcattatccccgaggacacattcttcccaagccccgagagcagctgcgacgtgaagctggtggaaaagagcttcgagacagacaccaacctgaacttccagatcctgtacgagatcctgctgggcaaggccaccctgtacgccgtgctggtgtctgccctggtgctgatggctatggtcaagcggaaggacagccggggacgcgccaagagaagcggatctggcgtgaagcagaccctgaatttcgacctgctgaagctggctggcgacgtggaatccaacccaggccctactagtatggactggatttggcgcatccttttccttgtcggcgctgctaccggcgcgcattccgggccccagctccagctgcaagagtctggacctggcctggtcaagcctagcgagacactgagcctgacctgtaccgtgtccggcgatagcatcagcagcggcgattactactggggctggatcagacagcctcctggcaaaggactggaatggatcggccacatctactacagcggcgtgacctactacaaccccagcctgaagtccagagtgaccatcagcgtggacaccagccggaaccagttctccctgaagctgtctagcgtgacagccgccgataccgccgtgtactactgcaccagagaggacagcagcaactggcggagtagaggccagggaacactggtcacagttagctctggatccggcggaggcggaagtggaggcggaggatctggcggcggaggctctttcgaagaagtgcagctggtggaatcaggcggcggactggtgcagcctggcagaagcctgagactgagctgtgccgccagcggcttcaccttcaacgactacgccatgcactgggtgcgccaggcccctggaaaaggactggaatgggtgtccacaatcagctggaacagcggcagcatcggctacgccgatagcgtgaagggccggttcaccatcagccgggacaacgccaagaagtccctgtacctccagatgaacagcctgcgggccgaggacacagccctgtactattgcgccaaggacatccagtacggcaactactactacggcatggacgtgtggggccagggaaccaccgtgaccgtgtcatctacgcgtgaggacctgaagaacgtgttcccacctgaggtggccgtgttcgagcctagcgaggccgagatcagccacacccagaaagccaccctcgtgtgcctggctaccggcttctaccccgaccatgtggaactgtcttggtgggtcaacggcaaagaggtgcacagcggcgtgtgtaccgacccccagccactgaaagaacagcccgccctgaacgacagccggtactgcctgagcagcagactgagagtgtccgccaccttctggcagaacccccggaaccacttcagatgccaggtgcagttctacggcctgagcgagaacgacgagtggacccaggacagagccaagcccgtgacccagatcgtgtctgccgaagcctggggcagagccgattgcggctttaccagcgagagctaccagcagggcgtgctgagcgccaccaacctgagcgtgatcggcttcagaatcctgctgctgaaagtggccggctttaacctgctgatgaccctgcggctgtggtccagc

SEQ ID NO: 5807 - DNA, 2703 bp, synthetic construct
  source 1..2703: mol_type = other DNA
atggccttaccagtgaccgccttgctcctgccgctggccttgctgctccacgccgccaggccggaagtgcagctggttgaatctggcggaggactggttcagcctggcggatctctgagactgtcttgtgccgccagcggcttcagcttcagcgacttttggatgagctgggtccgacaggcccctggcaaaggacttgaatgggtcgccacaatcagccaggccggcagcgagaaggactacgtggactctgtgaagggcagattcaccatcagccgggacaacgccaagaagtccctgtacctccagatgaacagcctgagagccgaggacaccgccgtgtactattgtgcctctggcgtgtacagcttcgactacagaggccagggcaccctggtcacagtctcttctggtaccggcggaggcggatctggcggcggaggtagcggtggcggaggatctgaattcgacatcgtgatgacccagacccccctgagcctgcctgtgacacctggcgagcctgccagcatctcctgcagaagcagcaagagcctgctgcacagcaacggcatcacctacctgtactggtatctgcagaaacccggccagagcccccaactgctgatctaccagatgagcaacctggtgtccggcgtgcccgacagattttctggcagcggctccggcaccgacttcaccctgaagatcagccgggtggaagccgaggacgtgggcgtgtactactgcgcccagaacctggaactgccctacacctttggcggcggaacaaaggtggaaatcaagcggctcgagatccagaaccctgatcctgccgtgtaccagctgcgggatagcaagagcagcgacaagagcgtgtgtctgttcaccgacttcgacagccagaccaacgtgtcccagagcaaggactccgacgtgtacatcaccgataagtgcgtgctggacatgcggagcatggacttcaagagcaactccgccgtggcctggtccaacaagtccgatttcgcctgcgccaacgccttcaacaacagcattatccccgaggacacattcttcccaagccccgagagcagctgcgacgtgaagctggtggaaaagagcttcgagacagacaccaacctgaacttccagatcctgtacgagatcctgctgggcaaggccaccctgtacgccgtgctggtgtctgccctggtgctgatggctatggtcaagcggaaggacagccggggacgcgccaagagaagcggatctggcgtgaagcagaccctgaatttcgacctgctgaagctggctggcgacgtggaatccaacccaggccctactagtatggactggatttggcgcatccttttccttgtcggcgctgctaccggcgcgcattccgggccccagctccagctgcaagagtctggacctggcctggtcaagcctagcgagacactgagcctgacctgtaccgtgtccggcgatagcatcagcagcggcgattactactggggctggatcagacagcctcctggcaaaggactggaatggatcggccacatctactacagcggcgtgacctactacaaccccagcctgaagtccagagtgaccatcagcgtggacaccagccggaaccagttctccctgaagctgtctagcgtgacagccgccgataccgccgtgtactactgcaccagagaggacagcagcaactggcggagtagaggccagggaacactggtcacagttagctctggatccggcggaggcggaagtggaggcggaggatctggcggcggaggctctttcgaacaggtgcaactggtgcagagcggagccgaagtgaaaaagcccggcagcagcgtgaaggtgtcctgcaaggccagcggctacgccttcagctactcctggatcaactgggtgcgccaggcccctggacagggcctggaatggatgggcagaatcttccccggcgacggcgacaccgactacaacggcaagttcaagggcagagtgaccatcaccgccgacaagagcaccagcaccgcctacatggaactgagcagcctgcggagcgaggataccgccgtgtactattgtgccagaaacgtgttcgacggctactggctggtgtactggggccagggaacacttgtgaccgtgtccagcacgcgtgaggacctgaagaacgtgttcccacctgaggtggccgtgttcgagcctagcgaggccgagatcagccacacccagaaagccaccctcgtgtgcctggctaccggcttctaccccgaccatgtggaactgtcttggtgggtcaacggcaaagaggtgcacagcggcgtgtgtaccgacccccagccactgaaagaacagcccgccctgaacgacagccggtactgcctgagcagcagactgagagtgtccgccaccttctggcagaacccccggaaccacttcagatgccaggtgcagttctacggcctgagcgagaacgacgagtggacccaggacagagccaagcccgtgacccagatcgtgtctgccgaagcctggggcagagccgattgcggctttaccagcgagagctaccagcagggcgtgctgagcgccaccaacctgagcgtgatcggcttcagaatcctgctgctgaaagtggccggctttaacctgctgatgaccctgcggctgtggtccagc

SEQ ID NO: 5808 - DNA, 2706 bp, synthetic construct
  source 1..2706: mol_type = other DNA
atggccttaccagtgaccgccttgctcctgccgctggccttgctgctccacgccgccaggccggaagtgcagctggttgaatctggcggaggactggttcagcctggcggatctctgagactgtcttgtgccgccagcggcttcagcttcagcgacttttggatgagctgggtccgacaggcccctggcaaaggacttgaatgggtcgccacaatcagccaggccggcagcgagaaggactacgtggactctgtgaagggcagattcaccatcagccgggacaacgccaagaagtccctgtacctccagatgaacagcctgagagccgaggacaccgccgtgtactattgtgcctctggcgtgtacagcttcgactacagaggccagggcaccctggtcacagtctcttctggtaccggcggaggcggatctggcggcggaggtagcggtggcggaggatctgaattcgacatccagatgacccagagccccagcagcctgtctgccagcgtgggcgacagagtgaccatcacctgtcggagcagccagagcatcgtgcactccgtgggcaacaccttcctggaatggtatcagcagaagcccggcaaggcccccaagctgctgatctacaaggtgtccaacagattcagcggcgtgcccagcaggtttagcggctctggcagcggcaccgacttcaccctgaccatctctagcctccagcccgaggacttcgccacctactactgttttcaaggcagccagttcccctacaccttcggccagggaacaaaggtggaaatcaagcggctcgagatccagaaccctgatcctgccgtgtaccagctgcgggatagcaagagcagcgacaagagcgtgtgtctgttcaccgacttcgacagccagaccaacgtgtcccagagcaaggactccgacgtgtacatcaccgataagtgcgtgctggacatgcggagcatggacttcaagagcaactccgccgtggcctggtccaacaagtccgatttcgcctgcgccaacgccttcaacaacagcattatccccgaggacacattcttcccaagccccgagagcagctgcgacgtgaagctggtggaaaagagcttcgagacagacaccaacctgaacttccagatcctgtacgagatcctgctgggcaaggccaccctgtacgccgtgctggtgtctgccctggtgctgatggctatggtcaagcggaaggacagccggggacgcgccaagagaagcggatctggcgtgaagcagaccctgaatttcgacctgctgaagctggctggcgacgtggaatccaacccaggccctactagtatggactggatttggcgcatccttttccttgtcggcgctgctaccggcgcgcattccgggccccagctccagctgcaagagtctggacctggcctggtcaagcctagcgagacactgagcctgacctgtaccgtgtccggcgatagcatcagcagcggcgattactactggggctggatcagacagcctcctggcaaaggactggaatggatcggccacatctactacagcggcgtgacctactacaaccccagcctgaagtccagagtgaccatcagcgtggacaccagccggaaccagttctccctgaagctgtctagcgtgacagccgccgataccgccgtgtactactgcaccagagaggacagcagcaactggcggagtagaggccagggaacactggtcacagttagctctggatccggcggaggcggaagtggaggcggaggatctggcggcggaggctctttcgaagaagtgcaactggtggaaagcggaggcggcctggtgcagcctggcggatctctgagactgagctgtgccgccagcggctacgagttcagccggtcctggatgaactgggtgcgccaggcccctggcaagggactggaatgggtgggaagaatctaccccggcgacggcgacaccaactacagcggcaagttcaagggccggttcaccatcagcgccgacaccagcaagaacaccgcctacctccagatgaacagcctgcgggccgaggataccgccgtgtactactgtgccagagatggcagctcctgggactggtacttcgacgtgtggggacagggaacccttgtgaccgtgtccagcacgcgtgaggacctgaagaacgtgttcccacctgaggtggccgtgttcgagcctagcgaggccgagatcagccacacccagaaagccaccctcgtgtgcctggctaccggcttctaccccgaccatgtggaactgtcttggtgggtcaacggcaaagaggtgcacagcggcgtgtgtaccgacccccagccactgaaagaacagcccgccctgaacgacagccggtactgcctgagcagcagactgagagtgtccgccaccttctggcagaacccccggaaccacttcagatgccaggtgcagttctacggcctgagcgagaacgacgagtggacccaggacagagccaagcccgtgacccagatcgtgtctgccgaagcctggggcagagccgattgcggctttaccagcgagagctaccagcagggcgtgctgagcgccaccaacctgagcgtgatcggcttcagaatcctgctgctgaaagtggccggctttaacctgctgatgaccctgcggctgtggtccagc

SEQ ID NO: 5809 - DNA, 2700 bp, synthetic construct
  source 1..2700: mol_type = other DNA
atggccttaccagtgaccgccttgctcctgccgctggccttgctgctccacgccgccaggccggaagtgcagctggttgaatctggcggaggactggttcagcctggcggatctctgagactgtcttgtgccgccagcggcttcagcttcagcgacttttggatgagctgggtccgacaggcccctggcaaaggacttgaatgggtcgccacaatcagccaggccggcagcgagaaggactacgtggactctgtgaagggcagattcaccatcagccgggacaacgccaagaagtccctgtacctccagatgaacagcctgagagccgaggacaccgccgtgtactattgtgcctctggcgtgtacagcttcgactacagaggccagggcaccctggtcacagtctcttctggtaccggcggaggcggatctggcggcggaggtagcggtggcggaggatctgaattcgacatccagatgacccagagccccagcagcctgtctgccagcgtgggcgacagagtgaccatcacctgtagagccagccagaccatctggtcctacctgaactggtatcagcagaggcccggcaaggcccccaacctgctgatctatgccgccagctctctccagagcggcgtgcccagcagattttccggcagaggcagcggcaccgacttcaccctgaccatcagttccttgcaggccgaggacttcgccacctactactgccagcagagctacagcatcccccagattttcggccagggcaccaagctggaaatcaagctcgagatccagaaccctgatcctgccgtgtaccagctgcgggatagcaagagcagcgacaagagcgtgtgtctgttcaccgacttcgacagccagaccaacgtgtcccagagcaaggactccgacgtgtacatcaccgataagtgcgtgctggacatgcggagcatggacttcaagagcaactccgccgtggcctggtccaacaagtccgatttcgcctgcgccaacgccttcaacaacagcattatccccgaggacacattcttcccaagccccgagagcagctgcgacgtgaagctggtggaaaagagcttcgagacagacaccaacctgaacttccagatcctgtacgagatcctgctgggcaaggccaccctgtacgccgtgctggtgtctgccctggtgctgatggctatggtcaagcggaaggacagccggggacgcgccaagagaagcggatctggcgtgaagcagaccctgaatttcgacctgctgaagctggctggcgacgtggaatccaacccaggccctactagtatggactggatttggcgcatccttttccttgtcggcgctgctaccggcgcgcattccgggccccagctccagctgcaagagtctggacctggcctggtcaagcctagcgagacactgagcctgacctgtaccgtgtccggcgatagcatcagcagcggcgattactactggggctggatcagacagcctcctggcaaaggactggaatggatcggccacatctactacagcggcgtgacctactacaaccccagcctgaagtccagagtgaccatcagcgtggacaccagccggaaccagttctccctgaagctgtctagcgtgacagccgccgataccgccgtgtactactgcaccagagaggacagcagcaactggcggagtagaggccagggaacactggtcacagttagctctggatccggcggaggcggaagtggaggcggaggatctggcggcggaggctctttcgaacaggtgcagctccagcagtctggacccggcctcgtgaagcctagccagacactgagcctgacctgcgccatcagcggcgatagcgtgtccagcaatagcgccgcctggaactggatcagacagtccccctctcggggcctggaatggctgggccggacctactaccgcagcaagtggtacaacgactacgccgtgtccgtgaagtcccggatcaccatcaaccccgacaccagcaagaaccagttctccttgcaactgaacagcgtgacccccgaggacaccgccgtgtactactgcgccagagaagtgaccggcgacctggaagatgccttcgacatctggggccagggaacaatggtcacagtgtccagcacgcgtgaggacctgaagaacgtgttcccacctgaggtggccgtgttcgagcctagcgaggccgagatcagccacacccagaaagccaccctcgtgtgcctggctaccggcttctaccccgaccatgtggaactgtcttggtgggtcaacggcaaagaggtgcacagcggcgtgtgtaccgacccccagccactgaaagaacagcccgccctgaacgacagccggtactgcctgagcagcagactgagagtgtccgccaccttctggcagaacccccggaaccacttcagatgccaggtgcagttctacggcctgagcgagaacgacgagtggacccaggacagagccaagcccgtgacccagatcgtgtctgccgaagcctggggcagagccgattgcggctttaccagcgagagctaccagcagggcgtgctgagcgccaccaacctgagcgtgatcggcttcagaatcctgctgctgaaagtggccggctttaacctgctgatgaccctgcggctgtggtccagc

SEQ ID NO: 5810 - DNA, 2679 bp, synthetic construct
  source 1..2679: mol_type = other DNA
atggccttaccagtgaccgccttgctcctgccgctggccttgctgctccacgccgccaggccggaagtgcagctggttgaatctggcggaggactggttcagcctggcggatctctgagactgtcttgtgccgccagcggcttcagcttcagcgacttttggatgagctgggtccgacaggcccctggcaaaggacttgaatgggtcgccacaatcagccaggccggcagcgagaaggactacgtggactctgtgaagggcagattcaccatcagccgggacaacgccaagaagtccctgtacctccagatgaacagcctgagagccgaggacaccgccgtgtactattgtgcctctggcgtgtacagcttcgactacagaggccagggcaccctggtcacagtctcttctggtaccggcggaggcggatctggcggcggaggtagcggtggcggaggatctgaattcgacatccagatgacccagagccccgccaccatcgagaacacaagcctgtctgccagcgtgggcgacagagtgaccatcacctgtagagccagccagggcatcagctcttggctgacctggtatcagcagaagcccgagaaggcccccaagagcctgatctacgccgccagctctctgcagtctggcgtgcccagcagattttccggcagcggctctggcaccgacttcaccctgacaatcagcagcctgcagcccgaggacttcgccacctactactgccagcagtacgacagctaccccatcaccttcggccagggcacccggctggaaatcaagctcgagatccagaaccctgatcctgccgtgtaccagctgcgggatagcaagagcagcgacaagagcgtgtgtctgttcaccgacttcgacagccagaccaacgtgtcccagagcaaggactccgacgtgtacatcaccgataagtgcgtgctggacatgcggagcatggacttcaagagcaactccgccgtggcctggtccaacaagtccgatttcgcctgcgccaacgccttcaacaacagcattatccccgaggacacattcttcccaagccccgagagcagctgcgacgtgaagctggtggaaaagagcttcgagacagacaccaacctgaacttccagatcctgtacgagatcctgctgggcaaggccaccctgtacgccgtgctggtgtctgccctggtgctgatggctatggtcaagcggaaggacagccggggacgcgccaagagaagcggatctggcgtgaagcagaccctgaatttcgacctgctgaagctggctggcgacgtggaatccaacccaggccctactagtatggactggatttggcgcatccttttccttgtcggcgctgctaccggcgcgcattccgggccccagctccagctgcaagagtctggacctggcctggtcaagcctagcgagacactgagcctgacctgtaccgtgtccggcgatagcatcagcagcggcgattactactggggctggatcagacagcctcctggcaaaggactggaatggatcggccacatctactacagcggcgtgacctactacaaccccagcctgaagtccagagtgaccatcagcgtggacaccagccggaaccagttctccctgaagctgtctagcgtgacagccgccgataccgccgtgtactactgcaccagagaggacagcagcaactggcggagtagaggccagggaacactggtcacagttagctctggatccggcggaggcggaagtggaggcggaggatctggcggcggaggctctttcgaacaggtgcaactgcagcagtggggagccggactgctgaagcctagcgagacactgagcctgacctgcgccgtgtacggcggcagcttcagcgcctactattggagctggatcagacagccccctggcaagggcctggaatggatcggcgacatcaatcacggcggaggcaccaactacaaccccagcctgaagtcccgcgtgaccatctccgtggacaccagcaagaaccagttctccctgaagctgaacagcgtgacagccgccgacacagccgtgtactactgtgccagcctgaccgcctattggggccagggatctcttgtgaccgtgtccagcacgcgtgaggacctgaagaacgtgttcccacctgaggtggccgtgttcgagcctagcgaggccgagatcagccacacccagaaagccaccctcgtgtgcctggctaccggcttctaccccgaccatgtggaactgtcttggtgggtcaacggcaaagaggtgcacagcggcgtgtgtaccgacccccagccactgaaagaacagcccgccctgaacgacagccggtactgcctgagcagcagactgagagtgtccgccaccttctggcagaacccccggaaccacttcagatgccaggtgcagttctacggcctgagcgagaacgacgagtggacccaggacagagccaagcccgtgacccagatcgtgtctgccgaagcctggggcagagccgattgcggctttaccagcgagagctaccagcagggcgtgctgagcgccaccaacctgagcgtgatcggcttcagaatcctgctgctgaaagtggccggctttaacctgctgatgaccctgcggctgtggtccagc

SEQ ID NO: 5811 - DNA, 2694 bp, synthetic construct
  source 1..2694: mol_type = other DNA
atggccttaccagtgaccgccttgctcctgccgctggccttgctgctccacgccgccaggccggaagtgcagctggttgaatctggcggaggactggttcagcctggcggatctctgagactgtcttgtgccgccagcggcttcagcttcagcgacttttggatgagctgggtccgacaggcccctggcaaaggacttgaatgggtcgccacaatcagccaggccggcagcgagaaggactacgtggactctgtgaagggcagattcaccatcagccgggacaacgccaagaagtccctgtacctccagatgaacagcctgagagccgaggacaccgccgtgtactattgtgcctctggcgtgtacagcttcgactacagaggccagggcaccctggtcacagtctcttctggtaccggcggaggcggatctggcggcggaggtagcggtggcggaggatctgaattcgacgagatcgtgctgacccagagccctgatagcctggccgtgtctctgggcgagagagccaccatcaactgcaaggccagccagagcgtggacttcgacggcgacagctacctgaactggtatcagcagaagcccggccagccccccaaggtgctgatctatgccgccagcacactgcagagcggcgtgcccagcagattttctggcagcggctccggcaccgacttcaccctgaccatcaacagcctggaagccgaggacgccgccacctactactgccagcagagcaacgaggacccctggacctttggcggcggaacaaaggtggaaatcaagctcgagatccagaaccctgatcctgccgtgtaccagctgcgggatagcaagagcagcgacaagagcgtgtgtctgttcaccgacttcgacagccagaccaacgtgtcccagagcaaggactccgacgtgtacatcaccgataagtgcgtgctggacatgcggagcatggacttcaagagcaactccgccgtggcctggtccaacaagtccgatttcgcctgcgccaacgccttcaacaacagcattatccccgaggacacattcttcccaagccccgagagcagctgcgacgtgaagctggtggaaaagagcttcgagacagacaccaacctgaacttccagatcctgtacgagatcctgctgggcaaggccaccctgtacgccgtgctggtgtctgccctggtgctgatggctatggtcaagcggaaggacagccggggacgcgccaagagaagcggatctggcgtgaagcagaccctgaatttcgacctgctgaagctggctggcgacgtggaatccaacccaggccctactagtatggactggatttggcgcatccttttccttgtcggcgctgctaccggcgcgcattccgggccccagctccagctgcaagagtctggacctggcctggtcaagcctagcgagacactgagcctgacctgtaccgtgtccggcgatagcatcagcagcggcgattactactggggctggatcagacagcctcctggcaaaggactggaatggatcggccacatctactacagcggcgtgacctactacaaccccagcctgaagtccagagtgaccatcagcgtggacaccagccggaaccagttctccctgaagctgtctagcgtgacagccgccgataccgccgtgtactactgcaccagagaggacagcagcaactggcggagtagaggccagggaacactggtcacagttagctctggatccggcggaggcggaagtggaggcggaggatctggcggcggaggctctttcgaacaggtgcaactggtgcagtccggcgctgaagtgaagaaacctggggccagcgtgaaggtgtcctgcaaggtgtccggctacacctttaccgactactacattacctgggtgcgccaggcccctggacaggccctggaatggatgggctggatctaccccggcagcggcaacaccaagtacagccagaagttccagggcagattcgtgttcagcgtggacaccagcgccagcaccgcctacctgcaactgtctagcctgaaggccgaagataccgccgtgtactactgcgccaactacggcaactattggttcgcctattggggccagggaacccttgtgaccgtgtcctctacgcgtgaggacctgaagaacgtgttcccacctgaggtggccgtgttcgagcctagcgaggccgagatcagccacacccagaaagccaccctcgtgtgcctggctaccggcttctaccccgaccatgtggaactgtcttggtgggtcaacggcaaagaggtgcacagcggcgtgtgtaccgacccccagccactgaaagaacagcccgccctgaacgacagccggtactgcctgagcagcagactgagagtgtccgccaccttctggcagaacccccggaaccacttcagatgccaggtgcagttctacggcctgagcgagaacgacgagtggacccaggacagagccaagcccgtgacccagatcgtgtctgccgaagcctggggcagagccgattgcggctttaccagcgagagctaccagcagggcgtgctgagcgccaccaacctgagcgtgatcggcttcagaatcctgctgctgaaagtggccggctttaacctgctgatgaccctgcggctgtggtccagc

SEQ ID NO: 5812 - DNA, 2685 bp, synthetic construct
  source 1..2685: mol_type = other DNA
atggccttaccagtgaccgccttgctcctgccgctggccttgctgctccacgccgccaggccggaagtgcagctggttgaatctggcggaggactggttcagcctggcggatctctgagactgtcttgtgccgccagcggcttcagcttcagcgacttttggatgagctgggtccgacaggcccctggcaaaggacttgaatgggtcgccacaatcagccaggccggcagcgagaaggactacgtggactctgtgaagggcagattcaccatcagccgggacaacgccaagaagtccctgtacctccagatgaacagcctgagagccgaggacaccgccgtgtactattgtgcctctggcgtgtacagcttcgactacagaggccagggcaccctggtcacagtctcttctggtaccggcggaggcggatctggcggcggaggtagcggtggcggaggatctgaattcgacatccagatgacccagagccccagcagcctgtctgccagcgtgggcgacagagtgaccatcacctgtagagccagccagggcatcagctcttggctggcctggtatcagcagaagcccgagaaggcccccaagagcctgatctacgccgcctctagtctccagagcggcgtgcccagcagattttctggcagcggctccggcaccgacttcaccctgacaatcagctccctccagcccgaggacttcgccacctactactgccagcagtacaacagctaccctcccacctttggcggaggcaccaaggtggaaatcaagctcgagatccagaaccctgatcctgccgtgtaccagctgcgggatagcaagagcagcgacaagagcgtgtgtctgttcaccgacttcgacagccagaccaacgtgtcccagagcaaggactccgacgtgtacatcaccgataagtgcgtgctggacatgcggagcatggacttcaagagcaactccgccgtggcctggtccaacaagtccgatttcgcctgcgccaacgccttcaacaacagcattatccccgaggacacattcttcccaagccccgagagcagctgcgacgtgaagctggtggaaaagagcttcgagacagacaccaacctgaacttccagatcctgtacgagatcctgctgggcaaggccaccctgtacgccgtgctggtgtctgccctggtgctgatggctatggtcaagcggaaggacagccggggacgcgccaagagaagcggatctggcgtgaagcagaccctgaatttcgacctgctgaagctggctggcgacgtggaatccaacccaggccctactagtatggactggatttggcgcatccttttccttgtcggcgctgctaccggcgcgcattccgggccccagctccagctgcaagagtctggacctggcctggtcaagcctagcgagacactgagcctgacctgtaccgtgtccggcgatagcatcagcagcggcgattactactggggctggatcagacagcctcctggcaaaggactggaatggatcggccacatctactacagcggcgtgacctactacaaccccagcctgaagtccagagtgaccatcagcgtggacaccagccggaaccagttctccctgaagctgtctagcgtgacagccgccgataccgccgtgtactactgcaccagagaggacagcagcaactggcggagtagaggccagggaacactggtcacagttagctctggatccggcggaggcggaagtggaggcggaggatctggcggcggaggctctttcgaagaagtgcaactggtgcagtctggcggagggctggtgcatcctgggggaagcctgagactgagctgtgccggctctggcttcgccttcagcagcagcaccatgcactggatcagacaggcccctggcaagggcctggaatggatcagcctgatcggaagcggagggggcatctactacggcgacagcgtgaagggccggttcaccatcagccgggacaacgccaagaacagcctgtacctccagatgaactccctgcgggccgaggacatggccgtgtactattgtgtgcggggctacttcgactgggtggactacttcgattactggggccagggcaccctcgtgaccgtgtcatctacgcgtgaggacctgaagaacgtgttcccacctgaggtggccgtgttcgagcctagcgaggccgagatcagccacacccagaaagccaccctcgtgtgcctggctaccggcttctaccccgaccatgtggaactgtcttggtgggtcaacggcaaagaggtgcacagcggcgtgtgtaccgacccccagccactgaaagaacagcccgccctgaacgacagccggtactgcctgagcagcagactgagagtgtccgccaccttctggcagaacccccggaaccacttcagatgccaggtgcagttctacggcctgagcgagaacgacgagtggacccaggacagagccaagcccgtgacccagatcgtgtctgccgaagcctggggcagagccgattgcggctttaccagcgagagctaccagcagggcgtgctgagcgccaccaacctgagcgtgatcggcttcagaatcctgctgctgaaagtggccggctttaacctgctgatgaccctgcggctgtggtccagc

SEQ ID NO: 5813 - DNA, 2715 bp, synthetic construct
  source 1..2715: mol_type = other DNA
atggccttaccagtgaccgccttgctcctgccgctggccttgctgctccacgccgccaggccggaagtgcagctggttgaatctggcggaggactggttcagcctggcggatctctgagactgtcttgtgccgccagcggcttcagcttcagcgacttttggatgagctgggtccgacaggcccctggcaaaggacttgaatgggtcgccacaatcagccaggccggcagcgagaaggactacgtggactctgtgaagggcagattcaccatcagccgggacaacgccaagaagtccctgtacctccagatgaacagcctgagagccgaggacaccgccgtgtactattgtgcctctggcgtgtacagcttcgactacagaggccagggcaccctggtcacagtctcttctggtaccggcggaggcggatctggcggcggaggtagcggtggcggaggatctgaattcgacgacatcgtgatgacacagtcaccagatagcctcaccgtctccctgggggagcggaccaccattaattgtaaatccagccaaagcgtgctggactcaagcaagaacaagaatagcctcgcctggtatcagcagaagcccggtcagcctccaaagctgctgctttcttgggcctccaccagagagtccgggattcctgataggtttagtggttcaggctccggcacagattttactctgaccattgattctctccagccagaggattctgcaacttattactgccagcaaagcgcccactttcctataacttttggccagggaacccgacttgaaatcaagctcgagatccagaaccctgatcctgccgtgtaccagctgcgggatagcaagagcagcgacaagagcgtgtgtctgttcaccgacttcgacagccagaccaacgtgtcccagagcaaggactccgacgtgtacatcaccgataagtgcgtgctggacatgcggagcatggacttcaagagcaactccgccgtggcctggtccaacaagtccgatttcgcctgcgccaacgccttcaacaacagcattatccccgaggacacattcttcccaagccccgagagcagctgcgacgtgaagctggtggaaaagagcttcgagacagacaccaacctgaacttccagatcctgtacgagatcctgctgggcaaggccaccctgtacgccgtgctggtgtctgccctggtgctgatggctatggtcaagcggaaggacagccggggacgcgccaagagaagcggatctggcgtgaagcagaccctgaatttcgacctgctgaagctggctggcgacgtggaatccaacccaggccctactagtatggactggatttggcgcatccttttccttgtcggcgctgctaccggcgcgcattccgggccccagctccagctgcaagagtctggacctggcctggtcaagcctagcgagacactgagcctgacctgtaccgtgtccggcgatagcatcagcagcggcgattactactggggctggatcagacagcctcctggcaaaggactggaatggatcggccacatctactacagcggcgtgacctactacaaccccagcctgaagtccagagtgaccatcagcgtggacaccagccggaaccagttctccctgaagctgtctagcgtgacagccgccgataccgccgtgtactactgcaccagagaggacagcagcaactggcggagtagaggccagggaacactggtcacagttagctctggatccggcggaggcggaagtggaggcggaggatctggcggcggaggctctttcgaacaggtgcagctggtgcagagcggtgccgaagtgaagaaaccaggtgcatccgttaaagtttcatgtaaggctagtggatataccttcaccaattacggaatgaactgggtgaaacaggcccctggccagggactgaagtggatggggtggattaacacctacaccggggagccgacttatgcagacgactttaaggggcgggtcacgatgacctccgacacctccaccagtaccgcctacctggagctgcacaaccttaggtcagacgataccgccgtgtattactgtgcccgatggtcttggtccgacggatactatgtctacttcgactattggggccaggggaccacagttaccgtgtcctctacgcgtgaggacctgaagaacgtgttcccacctgaggtggccgtgttcgagcctagcgaggccgagatcagccacacccagaaagccaccctcgtgtgcctggctaccggcttctaccccgaccatgtggaactgtcttggtgggtcaacggcaaagaggtgcacagcggcgtgtgtaccgacccccagccactgaaagaacagcccgccctgaacgacagccggtactgcctgagcagcagactgagagtgtccgccaccttctggcagaacccccggaaccacttcagatgccaggtgcagttctacggcctgagcgagaacgacgagtggacccaggacagagccaagcccgtgacccagatcgtgtctgccgaagcctggggcagagccgattgcggctttaccagcgagagctaccagcagggcgtgctgagcgccaccaacctgagcgtgatcggcttcagaatcctgctgctgaaagtggccggctttaacctgctgatgaccctgcggctgtggtccagc

SEQ ID NO: 5814 - DNA, 2703 bp, synthetic construct
  source 1..2703: mol_type = other DNA
atggccttaccagtgaccgccttgctcctgccgctggccttgctgctccacgccgccaggccggaagtgcagctggttgaatctggcggaggactggttcagcctggcggatctctgagactgtcttgtgccgccagcggcttcagcttcagcgacttttggatgagctgggtccgacaggcccctggcaaaggacttgaatgggtcgccacaatcagccaggccggcagcgagaaggactacgtggactctgtgaagggcagattcaccatcagccgggacaacgccaagaagtccctgtacctccagatgaacagcctgagagccgaggacaccgccgtgtactattgtgcctctggcgtgtacagcttcgactacagaggccagggcaccctggtcacagtctcttctggtaccggcggaggcggatctggcggcggaggtagcggtggcggaggatctgaattcgacgagatcgtgctgacacagagccctggaagcctggccgtgtctcctggcgagcgcgtgacaatgagctgcaagagcagccagagcgtgttcttcagcagctcccagaagaactacctggcctggtatcagcagatccccggccagagccccagactgctgatctactgggccagcaccagagaaagcggcgtgcccgatagattcaccggcagcggctctggcaccgacttcaccctgacaatcagcagcgtgcagcccgaggacctggctatctactactgccaccagtacctgagcagccggaccttcggccagggcaccaagctggaaatcaagagactcgagatccagaaccctgatcctgccgtgtaccagctgcgggatagcaagagcagcgacaagagcgtgtgtctgttcaccgacttcgacagccagaccaacgtgtcccagagcaaggactccgacgtgtacatcaccgataagtgcgtgctggacatgcggagcatggacttcaagagcaactccgccgtggcctggtccaacaagtccgatttcgcctgcgccaacgccttcaacaacagcattatccccgaggacacattcttcccaagccccgagagcagctgcgacgtgaagctggtggaaaagagcttcgagacagacaccaacctgaacttccagatcctgtacgagatcctgctgggcaaggccaccctgtacgccgtgctggtgtctgccctggtgctgatggctatggtcaagcggaaggacagccggggacgcgccaagagaagcggatctggcgtgaagcagaccctgaatttcgacctgctgaagctggctggcgacgtggaatccaacccaggccctactagtatggactggatttggcgcatccttttccttgtcggcgctgctaccggcgcgcattccgggccccagctccagctgcaagagtctggacctggcctggtcaagcctagcgagacactgagcctgacctgtaccgtgtccggcgatagcatcagcagcggcgattactactggggctggatcagacagcctcctggcaaaggactggaatggatcggccacatctactacagcggcgtgacctactacaaccccagcctgaagtccagagtgaccatcagcgtggacaccagccggaaccagttctccctgaagctgtctagcgtgacagccgccgataccgccgtgtactactgcaccagagaggacagcagcaactggcggagtagaggccagggaacactggtcacagttagctctggatccggcggaggcggaagtggaggcggaggatctggcggcggaggctctttcgaacaggtgcaactgcagcagcctggcgctgaggtcgtgaagccaggcgcttccgtgaagatgtcctgcaaggccagcggctacaccttcaccagctactacatccactggatcaagcagacccctggacagggcctggaatgggtgggagtgatctaccccggcaacgacgacatcagctacaaccagaagttccagggcaaggccaccctgaccgccgacaagtctagcaccaccgcctacatgcaactgtccagcctgaccagcgaggacagcgccgtgtactactgcgccagagaagtgcggctgcggtacttcgatgtgtggggccagggaaccaccgtgaccgtgtcatctacgcgtgaggacctgaagaacgtgttcccacctgaggtggccgtgttcgagcctagcgaggccgagatcagccacacccagaaagccaccctcgtgtgcctggctaccggcttctaccccgaccatgtggaactgtcttggtgggtcaacggcaaagaggtgcacagcggcgtgtgtaccgacccccagccactgaaagaacagcccgccctgaacgacagccggtactgcctgagcagcagactgagagtgtccgccaccttctggcagaacccccggaaccacttcagatgccaggtgcagttctacggcctgagcgagaacgacgagtggacccaggacagagccaagcccgtgacccagatcgtgtctgccgaagcctggggcagagccgattgcggctttaccagcgagagctaccagcagggcgtgctgagcgccaccaacctgagcgtgatcggcttcagaatcctgctgctgaaagtggccggctttaacctgctgatgaccctgcggctgtggtccagc

SEQ ID NO: 5815 - DNA, 2715 bp, synthetic construct
  source 1..2715: mol_type = other DNA
atggccttaccagtgaccgccttgctcctgccgctggccttgctgctccacgccgccaggccggaagtgcagctggttgaatctggcggaggactggttcagcctggcggatctctgagactgtcttgtgccgccagcggcttcagcttcagcgacttttggatgagctgggtccgacaggcccctggcaaaggacttgaatgggtcgccacaatcagccaggccggcagcgagaaggactacgtggactctgtgaagggcagattcaccatcagccgggacaacgccaagaagtccctgtacctccagatgaacagcctgagagccgaggacaccgccgtgtactattgtgcctctggcgtgtacagcttcgactacagaggccagggcaccctggtcacagtctcttctggtaccggcggaggcggatctggcggcggaggtagcggtggcggaggatctgaattcgatgtgctgctgacccagagccctctgagcctgcctgtgacactgggacagcctgccagcatctcctgtcggagcagccagaccatcgtgcacagcaacggcaacacctacctggaatggttccagcagcggccaggccagagccccagactgctgatctaccaggtgtccaacagattcagcggcgtgcccgacagattctccggcagcggctctggcaccgacttcaccctgaagatcagccgggtggaagccgaggacgtgggcgtgtactactgttttcaaggcagccacgtgccccggacctttggcggaggaacaaaggtggaaatcaagagagccctcgagatccagaaccctgatcctgccgtgtaccagctgcgggatagcaagagcagcgacaagagcgtgtgtctgttcaccgacttcgacagccagaccaacgtgtcccagagcaaggactccgacgtgtacatcaccgataagtgcgtgctggacatgcggagcatggacttcaagagcaactccgccgtggcctggtccaacaagtccgatttcgcctgcgccaacgccttcaacaacagcattatccccgaggacacattcttcccaagccccgagagcagctgcgacgtgaagctggtggaaaagagcttcgagacagacaccaacctgaacttccagatcctgtacgagatcctgctgggcaaggccaccctgtacgccgtgctggtgtctgccctggtgctgatggctatggtcaagcggaaggacagccggggacgcgccaagagaagcggatctggcgtgaagcagaccctgaatttcgacctgctgaagctggctggcgacgtggaatccaacccaggccctactagtatggactggatttggcgcatccttttccttgtcggcgctgctaccggcgcgcattccgggccccagctccagctgcaagagtctggacctggcctggtcaagcctagcgagacactgagcctgacctgtaccgtgtccggcgatagcatcagcagcggcgattactactggggctggatcagacagcctcctggcaaaggactggaatggatcggccacatctactacagcggcgtgacctactacaaccccagcctgaagtccagagtgaccatcagcgtggacaccagccggaaccagttctccctgaagctgtctagcgtgacagccgccgataccgccgtgtactactgcaccagagaggacagcagcaactggcggagtagaggccagggaacactggtcacagttagctctggatccggcggaggcggaagtggaggcggaggatctggcggcggaggctctttcgaacagatccaactggtgcagagcggcagcgagctgaagaaacctggggccagcgtgaaggtgtcctgcaaggccagcggctacacctttaccaactacggcatgaactgggtgcgccaggcccctggacagggcctgaaatggatgggctggatcaacaccaacaccggcgagcctaagtacgccgaagagttcaagggcagattcgccctgagcctggacaccagcgtgtccacagcctacctccagatcaacagcctgaaggccgaggataccgccgtgtacttctgcgccagaggctacggcaactacgccagaggggcttggctggcctattggggccagggaacactcgtgaccgtgtcctctacgcgtgaggacctgaagaacgtgttcccacctgaggtggccgtgttcgagcctagcgaggccgagatcagccacacccagaaagccaccctcgtgtgcctggctaccggcttctaccccgaccatgtggaactgtcttggtgggtcaacggcaaagaggtgcacagcggcgtgtgtaccgacccccagccactgaaagaacagcccgccctgaacgacagccggtactgcctgagcagcagactgagagtgtccgccaccttctggcagaacccccggaaccacttcagatgccaggtgcagttctacggcctgagcgagaacgacgagtggacccaggacagagccaagcccgtgacccagatcgtgtctgccgaagcctggggcagagccgattgcggctttaccagcgagagctaccagcagggcgtgctgagcgccaccaacctgagcgtgatcggcttcagaatcctgctgctgaaagtggccggctttaacctgctgatgaccctgcggctgtggtccagc

SEQ ID NO: 5816 - DNA, 2670 bp, synthetic construct
  source 1..2670: mol_type = other DNA
atggccttaccagtgaccgccttgctcctgccgctggccttgctgctccacgccgccaggccggaagtgcagctggttgaatctggcggaggactggttcagcctggcggatctctgagactgtcttgtgccgccagcggcttcagcttcagcgacttttggatgagctgggtccgacaggcccctggcaaaggacttgaatgggtcgccacaatcagccaggccggcagcgagaaggactacgtggactctgtgaagggcagattcaccatcagccgggacaacgccaagaagtccctgtacctccagatgaacagcctgagagccgaggacaccgccgtgtactattgtgcctctggcgtgtacagcttcgactacagaggccagggcaccctggtcacagtctcttctggtaccggcggaggcggatctggcggcggaggtagcggtggcggaggatctgaattcgacgagatcgtgctgacacagagccctgccacactctctctgagccctggcgaaagagccaccctgagctgtagcgccagcagcagcatcaactacatctactggctccagcagaagcccggccaggcccccagaatcctgatctacctgaccagcaacctggcctccggcgtgccagccagattttctggcagcggctccggcaccgacttcaccctgacaatcagcagcctggaacccgaggacttcgccgtgtactactgcctccagtggtccagcaaccccctgacctttggcggaggcaccaaggtggaaatcaagctcgagatccagaaccctgatcctgccgtgtaccagctgcgggatagcaagagcagcgacaagagcgtgtgtctgttcaccgacttcgacagccagaccaacgtgtcccagagcaaggactccgacgtgtacatcaccgataagtgcgtgctggacatgcggagcatggacttcaagagcaactccgccgtggcctggtccaacaagtccgatttcgcctgcgccaacgccttcaacaacagcattatccccgaggacacattcttcccaagccccgagagcagctgcgacgtgaagctggtggaaaagagcttcgagacagacaccaacctgaacttccagatcctgtacgagatcctgctgggcaaggccaccctgtacgccgtgctggtgtctgccctggtgctgatggctatggtcaagcggaaggacagccggggacgcgccaagagaagcggatctggcgtgaagcagaccctgaatttcgacctgctgaagctggctggcgacgtggaatccaacccaggccctactagtatggactggatttggcgcatccttttccttgtcggcgctgctaccggcgcgcattccgggccccagctccagctgcaagagtctggacctggcctggtcaagcctagcgagacactgagcctgacctgtaccgtgtccggcgatagcatcagcagcggcgattactactggggctggatcagacagcctcctggcaaaggactggaatggatcggccacatctactacagcggcgtgacctactacaaccccagcctgaagtccagagtgaccatcagcgtggacaccagccggaaccagttctccctgaagctgtctagcgtgacagccgccgataccgccgtgtactactgcaccagagaggacagcagcaactggcggagtagaggccagggaacactggtcacagttagctctggatccggcggaggcggaagtggaggcggaggatctggcggcggaggctctttcgaagaagtgcaactggtggaaagcgggggaggacttgtgaagcctggcggctctctgagactgagctgtgccgcctctggcttcaccttcagcagctacgacatgagctgggtgcgccaggctcctggcaagggactggaatgggtgtccaccatcagcagcggcggcagctacacctactacctggacagcatcaagggccggttcaccatctccagagacaacgccaagaacagcctgtacctccagatgaactccctgcgggccgaggacacagccgtgtattattgcgccagacagggcctggattactggggcagaggcacccttgtgaccgtgtcctctacgcgtgaggacctgaagaacgtgttcccacctgaggtggccgtgttcgagcctagcgaggccgagatcagccacacccagaaagccaccctcgtgtgcctggctaccggcttctaccccgaccatgtggaactgtcttggtgggtcaacggcaaagaggtgcacagcggcgtgtgtaccgacccccagccactgaaagaacagcccgccctgaacgacagccggtactgcctgagcagcagactgagagtgtccgccaccttctggcagaacccccggaaccacttcagatgccaggtgcagttctacggcctgagcgagaacgacgagtggacccaggacagagccaagcccgtgacccagatcgtgtctgccgaagcctggggcagagccgattgcggctttaccagcgagagctaccagcagggcgtgctgagcgccaccaacctgagcgtgatcggcttcagaatcctgctgctgaaagtggccggctttaacctgctgatgaccctgcggctgtggtccagc

SEQ ID NO: 5817 - DNA, 2697 bp, synthetic construct
  source 1..2697: mol_type = other DNA
atggccttaccagtgaccgccttgctcctgccgctggccttgctgctccacgccgccaggccggaagtgcagctggttgaatctggcggaggactggttcagcctggcggatctctgagactgtcttgtgccgccagcggcttcagcttcagcgacttttggatgagctgggtccgacaggcccctggcaaaggacttgaatgggtcgccacaatcagccaggccggcagcgagaaggactacgtggactctgtgaagggcagattcaccatcagccgggacaacgccaagaagtccctgtacctccagatgaacagcctgagagccgaggacaccgccgtgtactattgtgcctctggcgtgtacagcttcgactacagaggccagggcaccctggtcacagtctcttctggtaccggcggaggcggatctggcggcggaggtagcggtggcggaggatctgaattcgacatcgtgatgacccagagccccgatagcctggccgtgtctctgggagagagagccaccatcaactgccgggccagcaagagcgtgtccaccagcggctacagcttcatgcactggtatcagcagaagcccggccagccccccaagctgctgatctacctggcctccaacctggaaagcggcgtgcccgatagattcagcggcagcggctctggcaccgacttcaccctgaccatcagttctcttcaggccgaggacgtggccgtgtactactgccagcacagcagagaggtgccctggacattcggccagggcacaaaggtggaaatcaagcggctcgagatccagaaccctgatcctgccgtgtaccagctgcgggatagcaagagcagcgacaagagcgtgtgtctgttcaccgacttcgacagccagaccaacgtgtcccagagcaaggactccgacgtgtacatcaccgataagtgcgtgctggacatgcggagcatggacttcaagagcaactccgccgtggcctggtccaacaagtccgatttcgcctgcgccaacgccttcaacaacagcattatccccgaggacacattcttcccaagccccgagagcagctgcgacgtgaagctggtggaaaagagcttcgagacagacaccaacctgaacttccagatcctgtacgagatcctgctgggcaaggccaccctgtacgccgtgctggtgtctgccctggtgctgatggctatggtcaagcggaaggacagccggggacgcgccaagagaagcggatctggcgtgaagcagaccctgaatttcgacctgctgaagctggctggcgacgtggaatccaacccaggccctactagtatggactggatttggcgcatccttttccttgtcggcgctgctaccggcgcgcattccgggccccagctccagctgcaagagtctggacctggcctggtcaagcctagcgagacactgagcctgacctgtaccgtgtccggcgatagcatcagcagcggcgattactactggggctggatcagacagcctcctggcaaaggactggaatggatcggccacatctactacagcggcgtgacctactacaaccccagcctgaagtccagagtgaccatcagcgtggacaccagccggaaccagttctccctgaagctgtctagcgtgacagccgccgataccgccgtgtactactgcaccagagaggacagcagcaactggcggagtagaggccagggaacactggtcacagttagctctggatccggcggaggcggaagtggaggcggaggatctggcggcggaggctctttcgaacaggtgcagctggtgcagtctggggccgaagtgaagaaacctggggccagcgtgaaggtgtcctgcaaggccagcggatacacctttaccaactacggcatgaactgggtgcgccaggcccctggacagggcctggaatggatgggctggatcaacacctacaccggcgagcccacatacgccgacgccttcaagggcagattcgccttcagcctggacaccagcacctccaccgcctacctccagatcaacagcctgcggagcgacgacaccgccgtgtattattgcgccagagattacggcgactacgggatggactattggggccagggaaccaccgtgaccgtgtcctctacgcgtgaggacctgaagaacgtgttcccacctgaggtggccgtgttcgagcctagcgaggccgagatcagccacacccagaaagccaccctcgtgtgcctggctaccggcttctaccccgaccatgtggaactgtcttggtgggtcaacggcaaagaggtgcacagcggcgtgtgtaccgacccccagccactgaaagaacagcccgccctgaacgacagccggtactgcctgagcagcagactgagagtgtccgccaccttctggcagaacccccggaaccacttcagatgccaggtgcagttctacggcctgagcgagaacgacgagtggacccaggacagagccaagcccgtgacccagatcgtgtctgccgaagcctggggcagagccgattgcggctttaccagcgagagctaccagcagggcgtgctgagcgccaccaacctgagcgtgatcggcttcagaatcctgctgctgaaagtggccggctttaacctgctgatgaccctgcggctgtggtccagc

SEQ ID NO: 5818 - DNA, 2685 bp, synthetic construct
  source 1..2685: mol_type = other DNA
atggccttaccagtgaccgccttgctcctgccgctggccttgctgctccacgccgccaggccggaagtgcagctggttgaatctggcggaggactggttcagcctggcggatctctgagactgtcttgtgccgccagcggcttcagcttcagcgacttttggatgagctgggtccgacaggcccctggcaaaggacttgaatgggtcgccacaatcagccaggccggcagcgagaaggactacgtggactctgtgaagggcagattcaccatcagccgggacaacgccaagaagtccctgtacctccagatgaacagcctgagagccgaggacaccgccgtgtactattgtgcctctggcgtgtacagcttcgactacagaggccagggcaccctggtcacagtctcttctggtaccggcggaggcggatctggcggcggaggtagcggtggcggaggatctgaattcgacatcgtgatgacccagacccccctgaccctgagcgtgacaatcggacagcctgccagcatctcctgcaagagcagccagagcctgctggacagcgacggcaagacctacctgaactggctgctgcagaggccaggccagagccccgagagactgatctacctggtgtccaagctggactccggcgtgcccgatagattcacaggcagcggctccggcaccgacttcaccctgaagatcagccgggtggaagccgaggacctgggcgtgtactgttgttggcagggcacccacttcccttacaccttcggcggagggaccaaggtggaaatcaagggcctcgagatccagaaccctgatcctgccgtgtaccagctgcgggatagcaagagcagcgacaagagcgtgtgtctgttcaccgacttcgacagccagaccaacgtgtcccagagcaaggactccgacgtgtacatcaccgataagtgcgtgctggacatgcggagcatggacttcaagagcaactccgccgtggcctggtccaacaagtccgatttcgcctgcgccaacgccttcaacaacagcattatccccgaggacacattcttcccaagccccgagagcagctgcgacgtgaagctggtggaaaagagcttcgagacagacaccaacctgaacttccagatcctgtacgagatcctgctgggcaaggccaccctgtacgccgtgctggtgtctgccctggtgctgatggctatggtcaagcggaaggacagccggggacgcgccaagagaagcggatctggcgtgaagcagaccctgaatttcgacctgctgaagctggctggcgacgtggaatccaacccaggccctactagtatggactggatttggcgcatccttttccttgtcggcgctgctaccggcgcgcattccgggccccagctccagctgcaagagtctggacctggcctggtcaagcctagcgagacactgagcctgacctgtaccgtgtccggcgatagcatcagcagcggcgattactactggggctggatcagacagcctcctggcaaaggactggaatggatcggccacatctactacagcggcgtgacctactacaaccccagcctgaagtccagagtgaccatcagcgtggacaccagccggaaccagttctccctgaagctgtctagcgtgacagccgccgataccgccgtgtactactgcaccagagaggacagcagcaactggcggagtagaggccagggaacactggtcacagttagctctggatccggcggaggcggaagtggaggcggaggatctggcggcggaggctctttcgaacaggtgcaactgcagcagcctggcgctgaacttgtgcggccaggcgcctctgtgaagctgagctgtaaagccagcggctacaccttcaccagctactggatgaactgggtcaagcagcgcccaggccagggcctggaatggatcggaatgatcgaccccagcgacagcgagacacactacaaccacatcttcaaggacaaggccaccctgaccgtggacaagtccagcagcacagcctacctgcaactgtccagcctgaccagcgaggacagcgccgtgtactactgcgcccggaacctgtatctgtggggccagggaacaagcgtgaccgtgtctagcacgcgtgaggacctgaagaacgtgttcccacctgaggtggccgtgttcgagcctagcgaggccgagatcagccacacccagaaagccaccctcgtgtgcctggctaccggcttctaccccgaccatgtggaactgtcttggtgggtcaacggcaaagaggtgcacagcggcgtgtgtaccgacccccagccactgaaagaacagcccgccctgaacgacagccggtactgcctgagcagcagactgagagtgtccgccaccttctggcagaacccccggaaccacttcagatgccaggtgcagttctacggcctgagcgagaacgacgagtggacccaggacagagccaagcccgtgacccagatcgtgtctgccgaagcctggggcagagccgattgcggctttaccagcgagagctaccagcagggcgtgctgagcgccaccaacctgagcgtgatcggcttcagaatcctgctgctgaaagtggccggctttaacctgctgatgaccctgcggctgtggtccagc

SEQ ID NO: 5819 - DNA, 2709 bp, synthetic construct
  source 1..2709: mol_type = other DNA
atggccttaccagtgaccgccttgctcctgccgctggccttgctgctccacgccgccaggccggaagtgcagctggttgaatctggcggaggactggttcagcctggcggatctctgagactgtcttgtgccgccagcggcttcagcttcagcgacttttggatgagctgggtccgacaggcccctggcaaaggacttgaatgggtcgccacaatcagccaggccggcagcgagaaggactacgtggactctgtgaagggcagattcaccatcagccgggacaacgccaagaagtccctgtacctccagatgaacagcctgagagccgaggacaccgccgtgtactattgtgcctctggcgtgtacagcttcgactacagaggccagggcaccctggtcacagtctcttctggtaccggcggaggcggatctggcggcggaggtagcggtggcggaggatctgaattcgacatcgtgatgacccagagccccgatagcctggccgtgtctctgggagagagagccaccatcaactgcgagagcagccagagcctgctgaacagcggcaaccagaagaactacctgacctggtatcagcagaagcccggccagccccccaagcccctgatctattgggccagcaccagagaaagcggcgtgcccgatagattcagcggcagcggaagcggcaccgacttcaccctgaccatcagttctcttcaggccgaggacgtggccgtgtactactgccagaacgactacagctacccctacaccttcggccagggcaccaagctggaaatcaagagactcgagatccagaaccctgatcctgccgtgtaccagctgcgggatagcaagagcagcgacaagagcgtgtgtctgttcaccgacttcgacagccagaccaacgtgtcccagagcaaggactccgacgtgtacatcaccgataagtgcgtgctggacatgcggagcatggacttcaagagcaactccgccgtggcctggtccaacaagtccgatttcgcctgcgccaacgccttcaacaacagcattatccccgaggacacattcttcccaagccccgagagcagctgcgacgtgaagctggtggaaaagagcttcgagacagacaccaacctgaacttccagatcctgtacgagatcctgctgggcaaggccaccctgtacgccgtgctggtgtctgccctggtgctgatggctatggtcaagcggaaggacagccggggacgcgccaagagaagcggatctggcgtgaagcagaccctgaatttcgacctgctgaagctggctggcgacgtggaatccaacccaggccctactagtatggactggatttggcgcatccttttccttgtcggcgctgctaccggcgcgcattccgggccccagctccagctgcaagagtctggacctggcctggtcaagcctagcgagacactgagcctgacctgtaccgtgtccggcgatagcatcagcagcggcgattactactggggctggatcagacagcctcctggcaaaggactggaatggatcggccacatctactacagcggcgtgacctactacaaccccagcctgaagtccagagtgaccatcagcgtggacaccagccggaaccagttctccctgaagctgtctagcgtgacagccgccgataccgccgtgtactactgcaccagagaggacagcagcaactggcggagtagaggccagggaacactggtcacagttagctctggatccggcggaggcggaagtggaggcggaggatctggcggcggaggctctttcgaagaagtgcagctggtgcagtctggggccgaagtgaagaagcctggcgagagcctgaagatcagctgcaagggcagcggctacagcttcaccgactactacatgaagtgggccagacagatgcccggcaagggcctggaatggatgggcgacatcatccccagcaacggggccaccttctacaaccagaaattcaagggccaagtgaccatctccgccgacaagagcatcagcaccacctacctccagtggtccagcctgaaggccagcgacaccgccatgtactattgcgccagaagccatctgctgcgggccagttggttcgcctattggggccagggaacaatggtcacagtgtccagcacgcgtgaggacctgaagaacgtgttcccacctgaggtggccgtgttcgagcctagcgaggccgagatcagccacacccagaaagccaccctcgtgtgcctggctaccggcttctaccccgaccatgtggaactgtcttggtgggtcaacggcaaagaggtgcacagcggcgtgtgtaccgacccccagccactgaaagaacagcccgccctgaacgacagccggtactgcctgagcagcagactgagagtgtccgccaccttctggcagaacccccggaaccacttcagatgccaggtgcagttctacggcctgagcgagaacgacgagtggacccaggacagagccaagcccgtgacccagatcgtgtctgccgaagcctggggcagagccgattgcggctttaccagcgagagctaccagcagggcgtgctgagcgccaccaacctgagcgtgatcggcttcagaatcctgctgctgaaagtggccggctttaacctgctgatgaccctgcggctgtggtccagc

SEQ ID NO: 5820 - DNA, 2694 bp, synthetic construct
  source 1..2694: mol_type = other DNA
atggccttaccagtgaccgccttgctcctgccgctggccttgctgctccacgccgccaggccggaagtgcagctggttgaatctggcggaggactggttcagcctggcggatctctgagactgtcttgtgccgccagcggcttcagcttcagcgacttttggatgagctgggtccgacaggcccctggcaaaggacttgaatgggtcgccacaatcagccaggccggcagcgagaaggactacgtggactctgtgaagggcagattcaccatcagccgggacaacgccaagaagtccctgtacctccagatgaacagcctgagagccgaggacaccgccgtgtactattgtgcctctggcgtgtacagcttcgactacagaggccagggcaccctggtcacagtctcttctggtaccggcggaggcggatctggcggcggaggtagcggtggcggaggatctgaattcgacatccagatgacccagtctaccagttccctgagtgcatccctcggagacagggtgacgatcagttgcagcgcaagccaagggatcaataactatctgaactggtatcagcagaaaccggacggaacagtcgaactcctgatttattacaccagcacccttcagagtggcgtcccttcccggttcagtggctccggaagcgggaccgattactccctgaccatttctaatctggagccagaggacataggaacgtattattgccagcagtatagtaaactgccacgaacttttggaggggggacgaaactggagatcaaactcgagatccagaaccctgatcctgccgtgtaccagctgcgggatagcaagagcagcgacaagagcgtgtgtctgttcaccgacttcgacagccagaccaacgtgtcccagagcaaggactccgacgtgtacatcaccgataagtgcgtgctggacatgcggagcatggacttcaagagcaactccgccgtggcctggtccaacaagtccgatttcgcctgcgccaacgccttcaacaacagcattatccccgaggacacattcttcccaagccccgagagcagctgcgacgtgaagctggtggaaaagagcttcgagacagacaccaacctgaacttccagatcctgtacgagatcctgctgggcaaggccaccctgtacgccgtgctggtgtctgccctggtgctgatggctatggtcaagcggaaggacagccggggacgcgccaagagaagcggatctggcgtgaagcagaccctgaatttcgacctgctgaagctggctggcgacgtggaatccaacccaggccctactagtatggactggatttggcgcatccttttccttgtcggcgctgctaccggcgcgcattccgggccccagctccagctgcaagagtctggacctggcctggtcaagcctagcgagacactgagcctgacctgtaccgtgtccggcgatagcatcagcagcggcgattactactggggctggatcagacagcctcctggcaaaggactggaatggatcggccacatctactacagcggcgtgacctactacaaccccagcctgaagtccagagtgaccatcagcgtggacaccagccggaaccagttctccctgaagctgtctagcgtgacagccgccgataccgccgtgtactactgcaccagagaggacagcagcaactggcggagtagaggccagggaacactggtcacagttagctctggatccggcggaggcggaagtggaggcggaggatctggcggcggaggctctttcgaacaggtgcaactccagcagtccggaagcgagcttatgatgccaggggcatcagtgaagatcagctgcaaggctactggctacaccttctctaattactggatagagtgggttaaacaaaggccagggcacggcctggaatggatcggcgagatcctgcctgggacaggccgaaccatttataacgagaagttcaaaggcaaggctactttcaccgcagatataagctctaatacagtgcaaatgcagctctcttccctgacaagtgaggatagtgccgtgtattattgcgcacgaagagattactatggaaatttttattacgctatggattattggggtcaaggaacaagtgtgaccgttagcagcacgcgtgaggacctgaagaacgtgttcccacctgaggtggccgtgttcgagcctagcgaggccgagatcagccacacccagaaagccaccctcgtgtgcctggctaccggcttctaccccgaccatgtggaactgtcttggtgggtcaacggcaaagaggtgcacagcggcgtgtgtaccgacccccagccactgaaagaacagcccgccctgaacgacagccggtactgcctgagcagcagactgagagtgtccgccaccttctggcagaacccccggaaccacttcagatgccaggtgcagttctacggcctgagcgagaacgacgagtggacccaggacagagccaagcccgtgacccagatcgtgtctgccgaagcctggggcagagccgattgcggctttaccagcgagagctaccagcagggcgtgctgagcgccaccaacctgagcgtgatcggcttcagaatcctgctgctgaaagtggccggctttaacctgctgatgaccctgcggctgtggtccagc

SEQ ID NO: 5821 - DNA, 2679 bp, synthetic construct
  source 1..2679: mol_type = other DNA
atggccttaccagtgaccgccttgctcctgccgctggccttgctgctccacgccgccaggccggaagtgcagctggttgaatctggcggaggactggttcagcctggcggatctctgagactgtcttgtgccgccagcggcttcagcttcagcgacttttggatgagctgggtccgacaggcccctggcaaaggacttgaatgggtcgccacaatcagccaggccggcagcgagaaggactacgtggactctgtgaagggcagattcaccatcagccgggacaacgccaagaagtccctgtacctccagatgaacagcctgagagccgaggacaccgccgtgtactattgtgcctctggcgtgtacagcttcgactacagaggccagggcaccctggtcacagtctcttctggtaccggcggaggcggatctggcggcggaggtagcggtggcggaggatctgaattcgacatccagatgacccagagccctgccagcctgtccgtgtctgtgggcgagacagtgaccatcacctgtcgggccagcgagaacatctacagcaacctggcctggtatcagcagaagcagggcaagagcccccaactgctggtgtacgccgccaccaatctggccgatggcgtgcccagcagattttccggctctggcagcggcacccagtacagcctgaagatcaacagcctccagagcgaggacttcggcagctactactgccagcacttctggggcacctggacctttggaggaggcaccaccctggaaatcaagctcgagatccagaaccctgatcctgccgtgtaccagctgcgggatagcaagagcagcgacaagagcgtgtgtctgttcaccgacttcgacagccagaccaacgtgtcccagagcaaggactccgacgtgtacatcaccgataagtgcgtgctggacatgcggagcatggacttcaagagcaactccgccgtggcctggtccaacaagtccgatttcgcctgcgccaacgccttcaacaacagcattatccccgaggacacattcttcccaagccccgagagcagctgcgacgtgaagctggtggaaaagagcttcgagacagacaccaacctgaacttccagatcctgtacgagatcctgctgggcaaggccaccctgtacgccgtgctggtgtctgccctggtgctgatggctatggtcaagcggaaggacagccggggacgcgccaagagaagcggatctggcgtgaagcagaccctgaatttcgacctgctgaagctggctggcgacgtggaatccaacccaggccctactagtatggactggatttggcgcatccttttccttgtcggcgctgctaccggcgcgcattccgggccccagctccagctgcaagagtctggacctggcctggtcaagcctagcgagacactgagcctgacctgtaccgtgtccggcgatagcatcagcagcggcgattactactggggctggatcagacagcctcctggcaaaggactggaatggatcggccacatctactacagcggcgtgacctactacaaccccagcctgaagtccagagtgaccatcagcgtggacaccagccggaaccagttctccctgaagctgtctagcgtgacagccgccgataccgccgtgtactactgcaccagagaggacagcagcaactggcggagtagaggccagggaacactggtcacagttagctctggatccggcggaggcggaagtggaggcggaggatctggcggcggaggctctttcgaagaagtgcaactccagcagagcggccctgagcttgtgaagcctggcgcttccgtgaagatgagctgcaaggccagcggctacaccttcaccgactactacatgaagtggatgaagcagagccacggcaagtccctggaatggatcggcgacatcaaccccaacaacggcggcaccacctacaaccagaagttcaagggcaaggccaccctgaccgtggacaagagcagcagcaccgcctacatgcaactgaacagcctgaccagcgaggacagcgccgtgtactactgcgccagagactacggctacggctatttcgactactggggccagggcacaaccctgacagtgtcctctacgcgtgaggacctgaagaacgtgttcccacctgaggtggccgtgttcgagcctagcgaggccgagatcagccacacccagaaagccaccctcgtgtgcctggctaccggcttctaccccgaccatgtggaactgtcttggtgggtcaacggcaaagaggtgcacagcggcgtgtgtaccgacccccagccactgaaagaacagcccgccctgaacgacagccggtactgcctgagcagcagactgagagtgtccgccaccttctggcagaacccccggaaccacttcagatgccaggtgcagttctacggcctgagcgagaacgacgagtggacccaggacagagccaagcccgtgacccagatcgtgtctgccgaagcctggggcagagccgattgcggctttaccagcgagagctaccagcagggcgtgctgagcgccaccaacctgagcgtgatcggcttcagaatcctgctgctgaaagtggccggctttaacctgctgatgaccctgcggctgtggtccagc

SEQ ID NO: 5822 - DNA, 2688 bp, synthetic construct
  source 1..2688: mol_type = other DNA
atggccttaccagtgaccgccttgctcctgccgctggccttgctgctccacgccgccaggccggaagtgcagctggttgaatctggcggaggactggttcagcctggcggatctctgagactgtcttgtgccgccagcggcttcagcttcagcgacttttggatgagctgggtccgacaggcccctggcaaaggacttgaatgggtcgccacaatcagccaggccggcagcgagaaggactacgtggactctgtgaagggcagattcaccatcagccgggacaacgccaagaagtccctgtacctccagatgaacagcctgagagccgaggacaccgccgtgtactattgtgcctctggcgtgtacagcttcgactacagaggccagggcaccctggtcacagtctcttctggtaccggcggaggcggatctggcggcggaggtagcggtggcggaggatctgaattcgagatcgtgctgacacagagccctggcaccctgagcctgtctccaggcgaaagagccacactgagctgtcgggcctctcagagcgtgggaggctacctggcttggtatcagcagaagccaggccaggcccccagactgctgatctacgacgccagcaatcgggccacaggcatccccgccagattttctggcagcggctccggcaccgacttcaccctgacaatcagcagcctggaacccgaggacttcgccgtgtactactgccagcagcggaacaactggccccccatgtacacattcggccagggcaccaagctggaaatcaagagactcgagatccagaaccctgatcctgccgtgtaccagctgcgggatagcaagagcagcgacaagagcgtgtgtctgttcaccgacttcgacagccagaccaacgtgtcccagagcaaggactccgacgtgtacatcaccgataagtgcgtgctggacatgcggagcatggacttcaagagcaactccgccgtggcctggtccaacaagtccgatttcgcctgcgccaacgccttcaacaacagcattatccccgaggacacattcttcccaagccccgagagcagctgcgacgtgaagctggtggaaaagagcttcgagacagacaccaacctgaacttccagatcctgtacgagatcctgctgggcaaggccaccctgtacgccgtgctggtgtctgccctggtgctgatggctatggtcaagcggaaggacagccggggacgcgccaagagaagcggatctggcgtgaagcagaccctgaatttcgacctgctgaagctggctggcgacgtggaatccaacccaggccctactagtatggactggatttggcgcatccttttccttgtcggcgctgctaccggcgcgcattccgggccccagctccagctgcaagagtctggacctggcctggtcaagcctagcgagacactgagcctgacctgtaccgtgtccggcgatagcatcagcagcggcgattactactggggctggatcagacagcctcctggcaaaggactggaatggatcggccacatctactacagcggcgtgacctactacaaccccagcctgaagtccagagtgaccatcagcgtggacaccagccggaaccagttctccctgaagctgtctagcgtgacagccgccgataccgccgtgtactactgcaccagagaggacagcagcaactggcggagtagaggccagggaacactggtcacagttagctctggatccggcggaggcggaagtggaggcggaggatctggcggcggaggctctttcgaacaggtgcaactggtgcagagcggagccgaagtgaagaaacccggcagcagcgtgaaggtgtcctgcaaggcttccggcggcaccttcagcagctacgccatttcttgggtgcgccaggctcctggacagggcctggaatggatgggcggcatcatccctatcctgggcaccgccaactacgcccagaaattccagggcagagtgaccatcaccgccgacgagagcaccagcaccgcctacatggaactgagcagcctgcggagcgaggacacagccgtgtattattgcgccagatggggcggaggggccttcgacatttggggccagggaacaatggtcaccgtgtccagcacgcgtgaggacctgaagaacgtgttcccacctgaggtggccgtgttcgagcctagcgaggccgagatcagccacacccagaaagccaccctcgtgtgcctggctaccggcttctaccccgaccatgtggaactgtcttggtgggtcaacggcaaagaggtgcacagcggcgtgtgtaccgacccccagccactgaaagaacagcccgccctgaacgacagccggtactgcctgagcagcagactgagagtgtccgccaccttctggcagaacccccggaaccacttcagatgccaggtgcagttctacggcctgagcgagaacgacgagtggacccaggacagagccaagcccgtgacccagatcgtgtctgccgaagcctggggcagagccgattgcggctttaccagcgagagctaccagcagggcgtgctgagcgccaccaacctgagcgtgatcggcttcagaatcctgctgctgaaagtggccggctttaacctgctgatgaccctgcggctgtggtccagc

SEQ ID NO: 5823 - DNA, 2673 bp, synthetic construct
  source 1..2673: mol_type = other DNA
atggccttaccagtgaccgccttgctcctgccgctggccttgctgctccacgccgccaggccggaagtgcagctggttgaatctggcggaggactggttcagcctggcggatctctgagactgtcttgtgccgccagcggcttcagcttcagcgacttttggatgagctgggtccgacaggcccctggcaaaggacttgaatgggtcgccacaatcagccaggccggcagcgagaaggactacgtggactctgtgaagggcagattcaccatcagccgggacaacgccaagaagtccctgtacctccagatgaacagcctgagagccgaggacaccgccgtgtactattgtgcctctggcgtgtacagcttcgactacagaggccagggcaccctggtcacagtctcttctggtaccggcggaggcggatctggcggcggaggtagcggtggcggaggatctgaattccagatcgtgctgacacagagccctgccctgatgagcgccagccctggcgagaaagtgaccatgacctgtagcgccagcagcagcgtgcgctacatgtactggtatcagcagaagcccagaagcagccccaagccctggattcacctgaccagcaatctggcctctggcgtgcccgctagattttccggctctggcagcggcaccagctacagcctgaccatcagcagcatggaagccgaggacgccgccacctactactgccagcagtggtccagccaccccttcacatttggctccggcaccaagctggaaatcaagctcgagatccagaaccctgatcctgccgtgtaccagctgcgggatagcaagagcagcgacaagagcgtgtgtctgttcaccgacttcgacagccagaccaacgtgtcccagagcaaggactccgacgtgtacatcaccgataagtgcgtgctggacatgcggagcatggacttcaagagcaactccgccgtggcctggtccaacaagtccgatttcgcctgcgccaacgccttcaacaacagcattatccccgaggacacattcttcccaagccccgagagcagctgcgacgtgaagctggtggaaaagagcttcgagacagacaccaacctgaacttccagatcctgtacgagatcctgctgggcaaggccaccctgtacgccgtgctggtgtctgccctggtgctgatggctatggtcaagcggaaggacagccggggacgcgccaagagaagcggatctggcgtgaagcagaccctgaatttcgacctgctgaagctggctggcgacgtggaatccaacccaggccctactagtatggactggatttggcgcatccttttccttgtcggcgctgctaccggcgcgcattccgggccccagctccagctgcaagagtctggacctggcctggtcaagcctagcgagacactgagcctgacctgtaccgtgtccggcgatagcatcagcagcggcgattactactggggctggatcagacagcctcctggcaaaggactggaatggatcggccacatctactacagcggcgtgacctactacaaccccagcctgaagtccagagtgaccatcagcgtggacaccagccggaaccagttctccctgaagctgtctagcgtgacagccgccgataccgccgtgtactactgcaccagagaggacagcagcaactggcggagtagaggccagggaacactggtcacagttagctctggatccggcggaggcggaagtggaggcggaggatctggcggcggaggctctttcgaagatgtgcaactccaggaaagcggccctggccttgtgaagcctagccagagcctgtccctgacctgtaccgtgaccggcttcagcatcaccagcgactactcttggaactggatcagacagttccctggcaacaaactggaatggatgggctacatcagctactccggccacacctcctacaaccccagcctggaaagccggatctccatcaccagagacaccagcaagaaccagttcttcttgcaactgaacagcgtgaccaccgaggataccgccacatattactgtaccagaggcaactgggacgtggtgtactggggccagggcacacttgtgaccgtgtctgctacgcgtgaggacctgaagaacgtgttcccacctgaggtggccgtgttcgagcctagcgaggccgagatcagccacacccagaaagccaccctcgtgtgcctggctaccggcttctaccccgaccatgtggaactgtcttggtgggtcaacggcaaagaggtgcacagcggcgtgtgtaccgacccccagccactgaaagaacagcccgccctgaacgacagccggtactgcctgagcagcagactgagagtgtccgccaccttctggcagaacccccggaaccacttcagatgccaggtgcagttctacggcctgagcgagaacgacgagtggacccaggacagagccaagcccgtgacccagatcgtgtctgccgaagcctggggcagagccgattgcggctttaccagcgagagctaccagcagggcgtgctgagcgccaccaacctgagcgtgatcggcttcagaatcctgctgctgaaagtggccggctttaacctgctgatgaccctgcggctgtggtccagc

SEQ ID NO: 5824 - DNA, 2703 bp, synthetic construct
  source 1..2703: mol_type = other DNA
atggccttaccagtgaccgccttgctcctgccgctggccttgctgctccacgccgccaggccggaagtgcagctggttgaatctggcggaggactggttcagcctggcggatctctgagactgtcttgtgccgccagcggcttcagcttcagcgacttttggatgagctgggtccgacaggcccctggcaaaggacttgaatgggtcgccacaatcagccaggccggcagcgagaaggactacgtggactctgtgaagggcagattcaccatcagccgggacaacgccaagaagtccctgtacctccagatgaacagcctgagagccgaggacaccgccgtgtactattgtgcctctggcgtgtacagcttcgactacagaggccagggcaccctggtcacagtctcttctggtaccggcggaggcggatctggcggcggaggtagcggtggcggaggatctgaattcgacgtcgtgatgacccagagccctctgagcctgcctgtgacactgggacagcctgccagcatctcctgtcggagcagccagagcatcgtgcacagcgacggcaacacctacctggaatggtatcagcagcggccaggccagagccccagacggctgatctacaaggtgtccaacagattcagcggcgtgcccgacagattctccggcagcggctctggcaccgacttcaccctgaagatcagcagagtggaagccgaggacgtgggcgtgtactactgttttcaaggcagccacgccccctggacctttggcggaggaacaaaggtggaaatcaagctcgagatccagaaccctgatcctgccgtgtaccagctgcgggatagcaagagcagcgacaagagcgtgtgtctgttcaccgacttcgacagccagaccaacgtgtcccagagcaaggactccgacgtgtacatcaccgataagtgcgtgctggacatgcggagcatggacttcaagagcaactccgccgtggcctggtccaacaagtccgatttcgcctgcgccaacgccttcaacaacagcattatccccgaggacacattcttcccaagccccgagagcagctgcgacgtgaagctggtggaaaagagcttcgagacagacaccaacctgaacttccagatcctgtacgagatcctgctgggcaaggccaccctgtacgccgtgctggtgtctgccctggtgctgatggctatggtcaagcggaaggacagccggggacgcgccaagagaagcggatctggcgtgaagcagaccctgaatttcgacctgctgaagctggctggcgacgtggaatccaacccaggccctactagtatggactggatttggcgcatccttttccttgtcggcgctgctaccggcgcgcattccgggccccagctccagctgcaagagtctggacctggcctggtcaagcctagcgagacactgagcctgacctgtaccgtgtccggcgatagcatcagcagcggcgattactactggggctggatcagacagcctcctggcaaaggactggaatggatcggccacatctactacagcggcgtgacctactacaaccccagcctgaagtccagagtgaccatcagcgtggacaccagccggaaccagttctccctgaagctgtctagcgtgacagccgccgataccgccgtgtactactgcaccagagaggacagcagcaactggcggagtagaggccagggaacactggtcacagttagctctggatccggcggaggcggaagtggaggcggaggatctggcggcggaggctctttcgaagaagtgcaactggtggaatcaggcggcggactggtgcagcctggcggatctctgagactgagctgtgccgccagcggcttcaccttcagcagctacggaatgcactgggtgcgccaggcccctggcaaaggactggaatgggtggcctacatcaccaccagaagcagcaccatctactacgccgacagcgtgaagggccggttcaccatctccagagacaacgccaagaacagcctgtacctccagatgaactccctgcgggccgaggacaccgccgtgtactattgcaccagagagcccctgaccggctactacgctatggactattggggccagggcaccagcgtgaccgtgtctagtacgcgtgaggacctgaagaacgtgttcccacctgaggtggccgtgttcgagcctagcgaggccgagatcagccacacccagaaagccaccctcgtgtgcctggctaccggcttctaccccgaccatgtggaactgtcttggtgggtcaacggcaaagaggtgcacagcggcgtgtgtaccgacccccagccactgaaagaacagcccgccctgaacgacagccggtactgcctgagcagcagactgagagtgtccgccaccttctggcagaacccccggaaccacttcagatgccaggtgcagttctacggcctgagcgagaacgacgagtggacccaggacagagccaagcccgtgacccagatcgtgtctgccgaagcctggggcagagccgattgcggctttaccagcgagagctaccagcagggcgtgctgagcgccaccaacctgagcgtgatcggcttcagaatcctgctgctgaaagtggccggctttaacctgctgatgaccctgcggctgtggtccagc

SEQ ID NO: 5825 - DNA, 2679 bp, synthetic construct
  source 1..2679: mol_type = other DNA
atggccttaccagtgaccgccttgctcctgccgctggccttgctgctccacgccgccaggccggaagtgcagctggttgaatctggcggaggactggttcagcctggcggatctctgagactgtcttgtgccgccagcggcttcagcttcagcgacttttggatgagctgggtccgacaggcccctggcaaaggacttgaatgggtcgccacaatcagccaggccggcagcgagaaggactacgtggactctgtgaagggcagattcaccatcagccgggacaacgccaagaagtccctgtacctccagatgaacagcctgagagccgaggacaccgccgtgtactattgtgcctctggcgtgtacagcttcgactacagaggccagggcaccctggtcacagtctcttctggtaccggcggaggcggatctggcggcggaggtagcggtggcggaggatctgaattcgacatccagatgacccagagccccagcagcctgtctgccagcgtgggcgacagagtgaccatcacctgtagagccagccagagcatcagcctgtggctgaactggtatcagcagaagcccggcaaggcccccaagctgctgatctacgccgccagcacactccagagcggcgtgccaagcagattttccggcagcggctccggcaccgacttcaccctgacaatcagctccctccagcccgaggacttcgccacctactactgccagcagtactacaccagcccctacaccttcggccagggcaccaaggtggaaatcaagagactcgagatccagaaccctgatcctgccgtgtaccagctgcgggatagcaagagcagcgacaagagcgtgtgtctgttcaccgacttcgacagccagaccaacgtgtcccagagcaaggactccgacgtgtacatcaccgataagtgcgtgctggacatgcggagcatggacttcaagagcaactccgccgtggcctggtccaacaagtccgatttcgcctgcgccaacgccttcaacaacagcattatccccgaggacacattcttcccaagccccgagagcagctgcgacgtgaagctggtggaaaagagcttcgagacagacaccaacctgaacttccagatcctgtacgagatcctgctgggcaaggccaccctgtacgccgtgctggtgtctgccctggtgctgatggctatggtcaagcggaaggacagccggggacgcgccaagagaagcggatctggcgtgaagcagaccctgaatttcgacctgctgaagctggctggcgacgtggaatccaacccaggccctactagtatggactggatttggcgcatccttttccttgtcggcgctgctaccggcgcgcattccgggccccagctccagctgcaagagtctggacctggcctggtcaagcctagcgagacactgagcctgacctgtaccgtgtccggcgatagcatcagcagcggcgattactactggggctggatcagacagcctcctggcaaaggactggaatggatcggccacatctactacagcggcgtgacctactacaaccccagcctgaagtccagagtgaccatcagcgtggacaccagccggaaccagttctccctgaagctgtctagcgtgacagccgccgataccgccgtgtactactgcaccagagaggacagcagcaactggcggagtagaggccagggaacactggtcacagttagctctggatccggcggaggcggaagtggaggcggaggatctggcggcggaggctctttcgaacaggtgcaactgctggaatctggcggcggactggtgcagcctggcggatctctgagactgagctgtgccgccagcggcttcaccttcagcagctacgccatgagctgggtgcgccaggcccctggaaaaggactggaatgggtgtccgtgatccggtccagcggcagcagcacctattacgccgatagcgtgaagggccggttcaccatcagccgggacaacagcaagaacaccctgtacctccagatgaacagcctgcgggccgaggacaccgccgtgtactattgtgctaggggaggcggctacttcgactactggggccagggaacactcgtgaccgtgtcctctacgcgtgaggacctgaagaacgtgttcccacctgaggtggccgtgttcgagcctagcgaggccgagatcagccacacccagaaagccaccctcgtgtgcctggctaccggcttctaccccgaccatgtggaactgtcttggtgggtcaacggcaaagaggtgcacagcggcgtgtgtaccgacccccagccactgaaagaacagcccgccctgaacgacagccggtactgcctgagcagcagactgagagtgtccgccaccttctggcagaacccccggaaccacttcagatgccaggtgcagttctacggcctgagcgagaacgacgagtggacccaggacagagccaagcccgtgacccagatcgtgtctgccgaagcctggggcagagccgattgcggctttaccagcgagagctaccagcagggcgtgctgagcgccaccaacctgagcgtgatcggcttcagaatcctgctgctgaaagtggccggctttaacctgctgatgaccctgcggctgtggtccagc

SEQ ID NO: 5826 - DNA, 2688 bp, synthetic construct
  source 1..2688: mol_type = other DNA
atggccttaccagtgaccgccttgctcctgccgctggccttgctgctccacgccgccaggccggaagtgcagctggttgaatctggcggaggactggttcagcctggcggatctctgagactgtcttgtgccgccagcggcttcagcttcagcgacttttggatgagctgggtccgacaggcccctggcaaaggacttgaatgggtcgccacaatcagccaggccggcagcgagaaggactacgtggactctgtgaagggcagattcaccatcagccgggacaacgccaagaagtccctgtacctccagatgaacagcctgagagccgaggacaccgccgtgtactattgtgcctctggcgtgtacagcttcgactacagaggccagggcaccctggtcacagtctcttctggtaccggcggaggcggatctggcggcggaggtagcggtggcggaggatctgaattcgacatccagatgacccagagccccagcagcctgtctgccagcgtgggcgacagagtgaccatcacctgtagagccagccagagcatcagcagctacctgaactggtatcagcagaagcccggcaaggcccccaaactgctgatctacgccgtgtccacactccagagcggcgtgcccagcagattttctggcagcggctccggcaccgacttcaccctgacaatcagctccctccagcccgaggacttcgccacctactactgtcagcagagcggcaccttccctcccaccacatttggacagggcaccaaggtggaaatcaagagactcgagatccagaaccctgatcctgccgtgtaccagctgcgggatagcaagagcagcgacaagagcgtgtgtctgttcaccgacttcgacagccagaccaacgtgtcccagagcaaggactccgacgtgtacatcaccgataagtgcgtgctggacatgcggagcatggacttcaagagcaactccgccgtggcctggtccaacaagtccgatttcgcctgcgccaacgccttcaacaacagcattatccccgaggacacattcttcccaagccccgagagcagctgcgacgtgaagctggtggaaaagagcttcgagacagacaccaacctgaacttccagatcctgtacgagatcctgctgggcaaggccaccctgtacgccgtgctggtgtctgccctggtgctgatggctatggtcaagcggaaggacagccggggacgcgccaagagaagcggatctggcgtgaagcagaccctgaatttcgacctgctgaagctggctggcgacgtggaatccaacccaggccctactagtatggactggatttggcgcatccttttccttgtcggcgctgctaccggcgcgcattccgggccccagctccagctgcaagagtctggacctggcctggtcaagcctagcgagacactgagcctgacctgtaccgtgtccggcgatagcatcagcagcggcgattactactggggctggatcagacagcctcctggcaaaggactggaatggatcggccacatctactacagcggcgtgacctactacaaccccagcctgaagtccagagtgaccatcagcgtggacaccagccggaaccagttctccctgaagctgtctagcgtgacagccgccgataccgccgtgtactactgcaccagagaggacagcagcaactggcggagtagaggccagggaacactggtcacagttagctctggatccggcggaggcggaagtggaggcggaggatctggcggcggaggctctttcgaacaggtgcaactgctggaatctggcggcggactggtgcagcctggcggatctctgagactgagctgtgccgccagcggcttcaccttcagcagccacggaatgcactgggtgcgccaggcccctggaaagggactggaatgggtgtccgtgatctccggcagcggcagcaataccggctacgccgatagcgtgaagggccggttcaccatcagccgggacaacagcaagaacaccctgtacctccagatgaacagcctgcgggccgaggacaccgccgtgtactattgtgccagacagtggggcagctacgccttcgattcttggggccagggcaccctcgtgaccgtgtcatctacgcgtgaggacctgaagaacgtgttcccacctgaggtggccgtgttcgagcctagcgaggccgagatcagccacacccagaaagccaccctcgtgtgcctggctaccggcttctaccccgaccatgtggaactgtcttggtgggtcaacggcaaagaggtgcacagcggcgtgtgtaccgacccccagccactgaaagaacagcccgccctgaacgacagccggtactgcctgagcagcagactgagagtgtccgccaccttctggcagaacccccggaaccacttcagatgccaggtgcagttctacggcctgagcgagaacgacgagtggacccaggacagagccaagcccgtgacccagatcgtgtctgccgaagcctggggcagagccgattgcggctttaccagcgagagctaccagcagggcgtgctgagcgccaccaacctgagcgtgatcggcttcagaatcctgctgctgaaagtggccggctttaacctgctgatgaccctgcggctgtggtccagc

SEQ ID NO: 5827 - DNA, 2718 bp, synthetic construct
  source 1..2718: mol_type = other DNA
atggccttaccagtgaccgccttgctcctgccgctggccttgctgctccacgccgccaggccggaagtgcagctggttgaatctggcggaggactggttcagcctggcggatctctgagactgtcttgtgccgccagcggcttcagcttcagcgacttttggatgagctgggtccgacaggcccctggcaaaggacttgaatgggtcgccacaatcagccaggccggcagcgagaaggactacgtggactctgtgaagggcagattcaccatcagccgggacaacgccaagaagtccctgtacctccagatgaacagcctgagagccgaggacaccgccgtgtactattgtgcctctggcgtgtacagcttcgactacagaggccagggcaccctggtcacagtctcttctggtaccggcggaggcggatctggcggcggaggtagcggtggcggaggatctgaattcgacatcgtgatgagccagagccctagcagcctggccgtgtccgtgggcgagaaagtgaccatgagctgcaagagcagccagtccctgctgcacagcagcaaccagaagaactacctggcctggtatcagcagaagcccggccagtcccccaaggtgctgatctactgggccagcaccagagaaagcggcgtgcccgatagattcaccggcagcggctctggcaccgacttcaccctgaccatcaccagcgtgaagtccgaggacctggctgtgtactactgccagcagtattacagctacccctggaccttcggcggaggcacccggctggaaatcaaaagactcgagatccagaaccctgatcctgccgtgtaccagctgcgggatagcaagagcagcgacaagagcgtgtgtctgttcaccgacttcgacagccagaccaacgtgtcccagagcaaggactccgacgtgtacatcaccgataagtgcgtgctggacatgcggagcatggacttcaagagcaactccgccgtggcctggtccaacaagtccgatttcgcctgcgccaacgccttcaacaacagcattatccccgaggacacattcttcccaagccccgagagcagctgcgacgtgaagctggtggaaaagagcttcgagacagacaccaacctgaacttccagatcctgtacgagatcctgctgggcaaggccaccctgtacgccgtgctggtgtctgccctggtgctgatggctatggtcaagcggaaggacagccggggacgcgccaagagaagcggatctggcgtgaagcagaccctgaatttcgacctgctgaagctggctggcgacgtggaatccaacccaggccctactagtatggactggatttggcgcatccttttccttgtcggcgctgctaccggcgcgcattccgggccccagctccagctgcaagagtctggacctggcctggtcaagcctagcgagacactgagcctgacctgtaccgtgtccggcgatagcatcagcagcggcgattactactggggctggatcagacagcctcctggcaaaggactggaatggatcggccacatctactacagcggcgtgacctactacaaccccagcctgaagtccagagtgaccatcagcgtggacaccagccggaaccagttctccctgaagctgtctagcgtgacagccgccgataccgccgtgtactactgcaccagagaggacagcagcaactggcggagtagaggccagggaacactggtcacagttagctctggatccggcggaggcggaagtggaggcggaggatctggcggcggaggctctttcgaagaagtgcaactccagcagagcgtggccgagcttgtgaagcctggcgcttccgtgaagatgtcctgcaaggtgtccggctacaccctgacagaccacaccatccactggatgaagcagcggcctgagcagggcctggaatggatcggctacatctaccccagggacggcatcaccggctacaacgagaagttcaagggcaaggccacactgaccgccgacaccagcagcagcacagcctacatgcaactgaacagcctgaccagcgaggacagcgccgtgtacttctgtgccagatggggctacagctacagaaactacgcctactactacgactactggggccagggcacaaccctgaccgtgtctagtacgcgtgaggacctgaagaacgtgttcccacctgaggtggccgtgttcgagcctagcgaggccgagatcagccacacccagaaagccaccctcgtgtgcctggctaccggcttctaccccgaccatgtggaactgtcttggtgggtcaacggcaaagaggtgcacagcggcgtgtgtaccgacccccagccactgaaagaacagcccgccctgaacgacagccggtactgcctgagcagcagactgagagtgtccgccaccttctggcagaacccccggaaccacttcagatgccaggtgcagttctacggcctgagcgagaacgacgagtggacccaggacagagccaagcccgtgacccagatcgtgtctgccgaagcctggggcagagccgattgcggctttaccagcgagagctaccagcagggcgtgctgagcgccaccaacctgagcgtgatcggcttcagaatcctgctgctgaaagtggccggctttaacctgctgatgaccctgcggctgtggtccagc

SEQ ID NO: 5828 - DNA, 2709 bp, synthetic construct
  source 1..2709: mol_type = other DNA
atggccttaccagtgaccgccttgctcctgccgctggccttgctgctccacgccgccaggccggaagtgcagctggttgaatctggcggaggactggttcagcctggcggatctctgagactgtcttgtgccgccagcggcttcagcttcagcgacttttggatgagctgggtccgacaggcccctggcaaaggacttgaatgggtcgccacaatcagccaggccggcagcgagaaggactacgtggactctgtgaagggcagattcaccatcagccgggacaacgccaagaagtccctgtacctccagatgaacagcctgagagccgaggacaccgccgtgtactattgtgcctctggcgtgtacagcttcgactacagaggccagggcaccctggtcacagtctcttctggtaccggcggaggcggatctggcggcggaggtagcggtggcggaggatctgaattcgagatcgtgctgacacagagccctggcaccctgagcctgtctccaggcgaaagagccacactgagctgtcgggccagccagagcgtgtccagctcttacctggcctggtatcagcagaagcccggccaggctccccggctgctgatctacggaacaagcagcagagccaccggcatccccgacagattttctggcagcggctccggcaccgacttcaccctgacaatcagcagactggaacccgaggacttcgccgtgtactactgccagcagtacggcagcagccccttcacctttggcggaggcaccaaggtggaaatcaagagactcgagatccagaaccctgatcctgccgtgtaccagctgcgggatagcaagagcagcgacaagagcgtgtgtctgttcaccgacttcgacagccagaccaacgtgtcccagagcaaggactccgacgtgtacatcaccgataagtgcgtgctggacatgcggagcatggacttcaagagcaactccgccgtggcctggtccaacaagtccgatttcgcctgcgccaacgccttcaacaacagcattatccccgaggacacattcttcccaagccccgagagcagctgcgacgtgaagctggtggaaaagagcttcgagacagacaccaacctgaacttccagatcctgtacgagatcctgctgggcaaggccaccctgtacgccgtgctggtgtctgccctggtgctgatggctatggtcaagcggaaggacagccggggacgcgccaagagaagcggatctggcgtgaagcagaccctgaatttcgacctgctgaagctggctggcgacgtggaatccaacccaggccctactagtatggactggatttggcgcatccttttccttgtcggcgctgctaccggcgcgcattccgggccccagctccagctgcaagagtctggacctggcctggtcaagcctagcgagacactgagcctgacctgtaccgtgtccggcgatagcatcagcagcggcgattactactggggctggatcagacagcctcctggcaaaggactggaatggatcggccacatctactacagcggcgtgacctactacaaccccagcctgaagtccagagtgaccatcagcgtggacaccagccggaaccagttctccctgaagctgtctagcgtgacagccgccgataccgccgtgtactactgcaccagagaggacagcagcaactggcggagtagaggccagggaacactggtcacagttagctctggatccggcggaggcggaagtggaggcggaggatctggcggcggaggctctttcgaacaggtgcaactccaggaatctggccccggactggctaagcccagcgagacactgagcctgacctgtaccgtgtccggcgacagcatcaccagctactactggtcctggatcagacagccccctggcaagggcctggaatggatcggctacatctactacagcggcagcaccaactacaaccccagcctgaagtccagagtgaccatcagcgtggacaccagcaagaaccagttctccctgaagctgagcagcgtgacagccgccgacaccgccgtgtattattgcgccagagatcagcggagaatcgccgctgccggcacccacttttacggcatggatgtgtggggccagggcaccaccgtgaccgtgtcatctacgcgtgaggacctgaagaacgtgttcccacctgaggtggccgtgttcgagcctagcgaggccgagatcagccacacccagaaagccaccctcgtgtgcctggctaccggcttctaccccgaccatgtggaactgtcttggtgggtcaacggcaaagaggtgcacagcggcgtgtgtaccgacccccagccactgaaagaacagcccgccctgaacgacagccggtactgcctgagcagcagactgagagtgtccgccaccttctggcagaacccccggaaccacttcagatgccaggtgcagttctacggcctgagcgagaacgacgagtggacccaggacagagccaagcccgtgacccagatcgtgtctgccgaagcctggggcagagccgattgcggctttaccagcgagagctaccagcagggcgtgctgagcgccaccaacctgagcgtgatcggcttcagaatcctgctgctgaaagtggccggctttaacctgctgatgaccctgcggctgtggtccagc

SEQ ID NO: 5829 - DNA, 2685 bp, synthetic construct
  source 1..2685: mol_type = other DNA
atggccttaccagtgaccgccttgctcctgccgctggccttgctgctccacgccgccaggccggaagtgcagctggttgaatctggcggaggactggttcagcctggcggatctctgagactgtcttgtgccgccagcggcttcagcttcagcgacttttggatgagctgggtccgacaggcccctggcaaaggacttgaatgggtcgccacaatcagccaggccggcagcgagaaggactacgtggactctgtgaagggcagattcaccatcagccgggacaacgccaagaagtccctgtacctccagatgaacagcctgagagccgaggacaccgccgtgtactattgtgcctctggcgtgtacagcttcgactacagaggccagggcaccctggtcacagtctcttctggtaccggcggaggcggatctggcggcggaggtagcggtggcggaggatctgaattcgacatcctgctgacccagagccccgtgatcctgtccgtgtctcctggcgagagagtgtccttcagctgtcgggccagccagagcatcggcaccaacatccactggtatcagcagcggaccaacggcagccccagactgctgattaagtacgccagcgagtccatcagcggcatccccagcagattttccggcagcggctccggcaccgacttcaccctgagcatcaacagcgtggaaagcgaggacattgccgactactactgccagcagaacaacaactggcccaccaccttcggagccggcaccaagctggaactgaagctcgagatccagaaccctgatcctgccgtgtaccagctgcgggatagcaagagcagcgacaagagcgtgtgtctgttcaccgacttcgacagccagaccaacgtgtcccagagcaaggactccgacgtgtacatcaccgataagtgcgtgctggacatgcggagcatggacttcaagagcaactccgccgtggcctggtccaacaagtccgatttcgcctgcgccaacgccttcaacaacagcattatccccgaggacacattcttcccaagccccgagagcagctgcgacgtgaagctggtggaaaagagcttcgagacagacaccaacctgaacttccagatcctgtacgagatcctgctgggcaaggccaccctgtacgccgtgctggtgtctgccctggtgctgatggctatggtcaagcggaaggacagccggggacgcgccaagagaagcggatctggcgtgaagcagaccctgaatttcgacctgctgaagctggctggcgacgtggaatccaacccaggccctactagtatggactggatttggcgcatccttttccttgtcggcgctgctaccggcgcgcattccgggccccagctccagctgcaagagtctggacctggcctggtcaagcctagcgagacactgagcctgacctgtaccgtgtccggcgatagcatcagcagcggcgattactactggggctggatcagacagcctcctggcaaaggactggaatggatcggccacatctactacagcggcgtgacctactacaaccccagcctgaagtccagagtgaccatcagcgtggacaccagccggaaccagttctccctgaagctgtctagcgtgacagccgccgataccgccgtgtactactgcaccagagaggacagcagcaactggcggagtagaggccagggaacactggtcacagttagctctggatccggcggaggcggaagtggaggcggaggatctggcggcggaggctctttcgaacaggtgcagctgaagcagagcggacctggcctggtgcagcctagccagagcctgtccatcacctgtaccgtgtccggcttcagcctgaccaactacggcgtgcactgggtgcgccagagccctggaaaaggactggaatggctgggagtgatttggagcggcggcaacaccgactacaacacccccttcaccagcagactgtctatcaacaaggacaacagcaagagccaggtgttcttcaagatgaacagcctccagagcaacgacaccgccatctactactgtgctagagccctgacctactatgactacgagttcgcctactggggccagggcacactcgtgacagtgtctgctacgcgtgaggacctgaagaacgtgttcccacctgaggtggccgtgttcgagcctagcgaggccgagatcagccacacccagaaagccaccctcgtgtgcctggctaccggcttctaccccgaccatgtggaactgtcttggtgggtcaacggcaaagaggtgcacagcggcgtgtgtaccgacccccagccactgaaagaacagcccgccctgaacgacagccggtactgcctgagcagcagactgagagtgtccgccaccttctggcagaacccccggaaccacttcagatgccaggtgcagttctacggcctgagcgagaacgacgagtggacccaggacagagccaagcccgtgacccagatcgtgtctgccgaagcctggggcagagccgattgcggctttaccagcgagagctaccagcagggcgtgctgagcgccaccaacctgagcgtgatcggcttcagaatcctgctgctgaaagtggccggctttaacctgctgatgaccctgcggctgtggtccagc

SEQ ID NO: 5830 - DNA, 2664 bp, synthetic construct
  source 1..2664: mol_type = other DNA
atggccttaccagtgaccgccttgctcctgccgctggccttgctgctccacgccgccaggccggaagtgcagctggttgaatctggcggaggactggttcagcctggcggatctctgagactgtcttgtgccgccagcggcttcagcttcagcgacttttggatgagctgggtccgacaggcccctggcaaaggacttgaatgggtcgccacaatcagccaggccggcagcgagaaggactacgtggactctgtgaagggcagattcaccatcagccgggacaacgccaagaagtccctgtacctccagatgaacagcctgagagccgaggacaccgccgtgtactattgtgcctctggcgtgtacagcttcgactacagaggccagggcaccctggtcacagtctcttctggtaccggcggaggcggatctggcggcggaggtagcggtggcggaggatctgaattcatgacccagagccccaagttcctgctggtgtctgccggcgacagagtgaccctgacatgcaaggccagccagagcgtgaacaacgacgtgtactggtatcagcaggaacccggccagtcccccaagctgctgatctactgggccagcaccagagaaagcggcgtgcccgatagattcaccggcagcggctctggcaccgacttcaccctgacaatcagcagcgtgcaggccgaggacctggccgtgtactactgcaagcagagctacaacctgtacaccttcggcggaggcaccaagctggaaatcaagagactcgagatccagaaccctgatcctgccgtgtaccagctgcgggatagcaagagcagcgacaagagcgtgtgtctgttcaccgacttcgacagccagaccaacgtgtcccagagcaaggactccgacgtgtacatcaccgataagtgcgtgctggacatgcggagcatggacttcaagagcaactccgccgtggcctggtccaacaagtccgatttcgcctgcgccaacgccttcaacaacagcattatccccgaggacacattcttcccaagccccgagagcagctgcgacgtgaagctggtggaaaagagcttcgagacagacaccaacctgaacttccagatcctgtacgagatcctgctgggcaaggccaccctgtacgccgtgctggtgtctgccctggtgctgatggctatggtcaagcggaaggacagccggggacgcgccaagagaagcggatctggcgtgaagcagaccctgaatttcgacctgctgaagctggctggcgacgtggaatccaacccaggccctactagtatggactggatttggcgcatccttttccttgtcggcgctgctaccggcgcgcattccgggccccagctccagctgcaagagtctggacctggcctggtcaagcctagcgagacactgagcctgacctgtaccgtgtccggcgatagcatcagcagcggcgattactactggggctggatcagacagcctcctggcaaaggactggaatggatcggccacatctactacagcggcgtgacctactacaaccccagcctgaagtccagagtgaccatcagcgtggacaccagccggaaccagttctccctgaagctgtctagcgtgacagccgccgataccgccgtgtactactgcaccagagaggacagcagcaactggcggagtagaggccagggaacactggtcacagttagctctggatccggcggaggcggaagtggaggcggaggatctggcggcggaggctctttcgaagaatctggaagaggactggtgcagcctggcggcagcagaaagctgtcttgtgccgccagcggcttcaccttcagcaccagcggaatgcactgggtgcgccaggcccctgagaagggactggaatgggtggcctacatcagctccggcagcaccaccatctaccacgccgataccgtgaagggccggttcaccatcagccgggacaaccccaagaataccctgttcctccagatgaccagcctgcggagcgaggacaccgccatgtactattgctgcgccagaagcggccagttcggcaactacttcgactactggggccagggcaccaccctgaccgtgtcatctacgcgtgaggacctgaagaacgtgttcccacctgaggtggccgtgttcgagcctagcgaggccgagatcagccacacccagaaagccaccctcgtgtgcctggctaccggcttctaccccgaccatgtggaactgtcttggtgggtcaacggcaaagaggtgcacagcggcgtgtgtaccgacccccagccactgaaagaacagcccgccctgaacgacagccggtactgcctgagcagcagactgagagtgtccgccaccttctggcagaacccccggaaccacttcagatgccaggtgcagttctacggcctgagcgagaacgacgagtggacccaggacagagccaagcccgtgacccagatcgtgtctgccgaagcctggggcagagccgattgcggctttaccagcgagagctaccagcagggcgtgctgagcgccaccaacctgagcgtgatcggcttcagaatcctgctgctgaaagtggccggctttaacctgctgatgaccctgcggctgtggtccagc

SEQ ID NO: 5831 - DNA, 2679 bp, synthetic construct
  source 1..2679: mol_type = other DNA
atggccttaccagtgaccgccttgctcctgccgctggccttgctgctccacgccgccaggccggaagtgcagctggttgaatctggcggaggactggttcagcctggcggatctctgagactgtcttgtgccgccagcggcttcagcttcagcgacttttggatgagctgggtccgacaggcccctggcaaaggacttgaatgggtcgccacaatcagccaggccggcagcgagaaggactacgtggactctgtgaagggcagattcaccatcagccgggacaacgccaagaagtccctgtacctccagatgaacagcctgagagccgaggacaccgccgtgtactattgtgcctctggcgtgtacagcttcgactacagaggccagggcaccctggtcacagtctcttctggtaccggcggaggcggatctggcggcggaggtagcggtggcggaggatctgaattccagagcccatctagcctggctgtgtctgccggcgagaaagtgaccatgagctgcaagagcagccagagcctgctgaacagccggacccggaagaactacctggcctggtatcagcagaagcccggccagagccccaagctgctgatctactgggccagcaccagagaaagcggcgtgcccgatagattcaccggctctggcagcggcaccgacttcaccctgacaatcagcagcgtgcaggccgaggacctggccgtgtactactgcaagcagagcaacctgtacaccttcggcggaggcaccaagctggaaatcaagctcgagatccagaaccctgatcctgccgtgtaccagctgcgggatagcaagagcagcgacaagagcgtgtgtctgttcaccgacttcgacagccagaccaacgtgtcccagagcaaggactccgacgtgtacatcaccgataagtgcgtgctggacatgcggagcatggacttcaagagcaactccgccgtggcctggtccaacaagtccgatttcgcctgcgccaacgccttcaacaacagcattatccccgaggacacattcttcccaagccccgagagcagctgcgacgtgaagctggtggaaaagagcttcgagacagacaccaacctgaacttccagatcctgtacgagatcctgctgggcaaggccaccctgtacgccgtgctggtgtctgccctggtgctgatggctatggtcaagcggaaggacagccggggacgcgccaagagaagcggatctggcgtgaagcagaccctgaatttcgacctgctgaagctggctggcgacgtggaatccaacccaggccctactagtatggactggatttggcgcatccttttccttgtcggcgctgctaccggcgcgcattccgggccccagctccagctgcaagagtctggacctggcctggtcaagcctagcgagacactgagcctgacctgtaccgtgtccggcgatagcatcagcagcggcgattactactggggctggatcagacagcctcctggcaaaggactggaatggatcggccacatctactacagcggcgtgacctactacaaccccagcctgaagtccagagtgaccatcagcgtggacaccagccggaaccagttctccctgaagctgtctagcgtgacagccgccgataccgccgtgtactactgcaccagagaggacagcagcaactggcggagtagaggccagggaacactggtcacagttagctctggatccggcggaggcggaagtggaggcggaggatctggcggcggaggctctttcgaacaggtgcagctggaagagtctggacccgagcttgtgaagcctggggccagcgtgaagctgtcctgtaaagccagcggctacaccttcaccgagtacatcatccactgggtcaagcagcggagcggccagggcctggaatggatcggctggttttaccctggctccggcagcatcaagtacaacgagaagttcaaggacaaggccaccctgaccgccgacaagtccagcagcaccgtgtacatggaactgagcggcctgaccagcgaggacagcgccgtgtatttctgcgccagacacgacggctacagctacttcgactattggggccagggcaccacactgaccgtgtcctctacgcgtgaggacctgaagaacgtgttcccacctgaggtggccgtgttcgagcctagcgaggccgagatcagccacacccagaaagccaccctcgtgtgcctggctaccggcttctaccccgaccatgtggaactgtcttggtgggtcaacggcaaagaggtgcacagcggcgtgtgtaccgacccccagccactgaaagaacagcccgccctgaacgacagccggtactgcctgagcagcagactgagagtgtccgccaccttctggcagaacccccggaaccacttcagatgccaggtgcagttctacggcctgagcgagaacgacgagtggacccaggacagagccaagcccgtgacccagatcgtgtctgccgaagcctggggcagagccgattgcggctttaccagcgagagctaccagcagggcgtgctgagcgccaccaacctgagcgtgatcggcttcagaatcctgctgctgaaagtggccggctttaacctgctgatgaccctgcggctgtggtccagc

SEQ ID NO: 5832 - DNA, 2688 bp, synthetic construct
  source 1..2688: mol_type = other DNA
atggccttaccagtgaccgccttgctcctgccgctggccttgctgctccacgccgccaggccggaagtgcagctggttgaatctggcggaggactggttcagcctggcggatctctgagactgtcttgtgccgccagcggcttcagcttcagcgacttttggatgagctgggtccgacaggcccctggcaaaggacttgaatgggtcgccacaatcagccaggccggcagcgagaaggactacgtggactctgtgaagggcagattcaccatcagccgggacaacgccaagaagtccctgtacctccagatgaacagcctgagagccgaggacaccgccgtgtactattgtgcctctggcgtgtacagcttcgactacagaggccagggcaccctggtcacagtctcttctggtaccggcggaggcggatctggcggcggaggtagcggtggcggaggatctgaattcgacatccagatgacccagagccccagcagcctgtctgcctctctgggcgagagagtgtccctgacctgtcgggccacacaggaactgagcggctacctgtcttggctgcagcagaagcccgacggcaccatcaagcggctgatctacgccgccagcaccctggatagcggcgtgcccaagagattcagcggcaacagaagcggcagcgactacagcctgaccatcagctccctggaaagcgaggacttcgccgactactactgcctgcagtacgccatctacccctacaccttcggcggaggcaccaagctggaaatcaagctcgagatccagaaccctgatcctgccgtgtaccagctgcgggatagcaagagcagcgacaagagcgtgtgtctgttcaccgacttcgacagccagaccaacgtgtcccagagcaaggactccgacgtgtacatcaccgataagtgcgtgctggacatgcggagcatggacttcaagagcaactccgccgtggcctggtccaacaagtccgatttcgcctgcgccaacgccttcaacaacagcattatccccgaggacacattcttcccaagccccgagagcagctgcgacgtgaagctggtggaaaagagcttcgagacagacaccaacctgaacttccagatcctgtacgagatcctgctgggcaaggccaccctgtacgccgtgctggtgtctgccctggtgctgatggctatggtcaagcggaaggacagccggggacgcgccaagagaagcggatctggcgtgaagcagaccctgaatttcgacctgctgaagctggctggcgacgtggaatccaacccaggccctactagtatggactggatttggcgcatccttttccttgtcggcgctgctaccggcgcgcattccgggccccagctccagctgcaagagtctggacctggcctggtcaagcctagcgagacactgagcctgacctgtaccgtgtccggcgatagcatcagcagcggcgattactactggggctggatcagacagcctcctggcaaaggactggaatggatcggccacatctactacagcggcgtgacctactacaaccccagcctgaagtccagagtgaccatcagcgtggacaccagccggaaccagttctccctgaagctgtctagcgtgacagccgccgataccgccgtgtactactgcaccagagaggacagcagcaactggcggagtagaggccagggaacactggtcacagttagctctggatccggcggaggcggaagtggaggcggaggatctggcggcggaggctctttcgaagaggtgcaactgcagcagtctggccccgagcttgtgaagcctggcgcctccgtgaagatgagctgcaaggccagcggctacacctttaccagctacttcatccactgggtcaagcagaaacccggccagggcctggaatggatcggcttcatcaacccttacaacgacggcagcaagtacaacgagaagttcaagggcaaggccaccctgaccagcgacaagagcagcagcaccgcctacatggaactgtccagcctgacatccgaggacagcgccgtgtactactgcaccagggacgacggctactacggctacgccatggactactggggccagggaacaagcgtcaccgtgtcctctacgcgtgaggacctgaagaacgtgttcccacctgaggtggccgtgttcgagcctagcgaggccgagatcagccacacccagaaagccaccctcgtgtgcctggctaccggcttctaccccgaccatgtggaactgtcttggtgggtcaacggcaaagaggtgcacagcggcgtgtgtaccgacccccagccactgaaagaacagcccgccctgaacgacagccggtactgcctgagcagcagactgagagtgtccgccaccttctggcagaacccccggaaccacttcagatgccaggtgcagttctacggcctgagcgagaacgacgagtggacccaggacagagccaagcccgtgacccagatcgtgtctgccgaagcctggggcagagccgattgcggctttaccagcgagagctaccagcagggcgtgctgagcgccaccaacctgagcgtgatcggcttcagaatcctgctgctgaaagtggccggctttaacctgctgatgaccctgcggctgtggtccagc

SEQ ID NO: 5833 - DNA, 2703 bp, synthetic construct
  source 1..2703: mol_type = other DNA
atggccttaccagtgaccgccttgctcctgccgctggccttgctgctccacgccgccaggccggaagtgcagctggttgaatctggcggaggactggttcagcctggcggatctctgagactgtcttgtgccgccagcggcttcagcttcagcgacttttggatgagctgggtccgacaggcccctggcaaaggacttgaatgggtcgccacaatcagccaggccggcagcgagaaggactacgtggactctgtgaagggcagattcaccatcagccgggacaacgccaagaagtccctgtacctccagatgaacagcctgagagccgaggacaccgccgtgtactattgtgcctctggcgtgtacagcttcgactacagaggccagggcaccctggtcacagtctcttctggtaccggcggaggcggatctggcggcggaggtagcggtggcggaggatctgaattcgacaccatcgtgctgacacagagccctgcttccctggccgtgtccctgggacagagagccaccatctcttgcagagccagcgagagcgtggacagctacggcaacagcttcatgcactggtatcagcagaagcccggccagccccccaagctgctgatctacctggcctccaacctggaaagcggcgtgcccgccagattttctggcagcggcagcagaaccgacttcaccctgaccatcgaccccgtggaagccgatgatgccgccacctactactgccagcagaacaactacgacccctggaccttcggcggaggcaccaagctggaaatcaagctcgagatccagaaccctgatcctgccgtgtaccagctgcgggatagcaagagcagcgacaagagcgtgtgtctgttcaccgacttcgacagccagaccaacgtgtcccagagcaaggactccgacgtgtacatcaccgataagtgcgtgctggacatgcggagcatggacttcaagagcaactccgccgtggcctggtccaacaagtccgatttcgcctgcgccaacgccttcaacaacagcattatccccgaggacacattcttcccaagccccgagagcagctgcgacgtgaagctggtggaaaagagcttcgagacagacaccaacctgaacttccagatcctgtacgagatcctgctgggcaaggccaccctgtacgccgtgctggtgtctgccctggtgctgatggctatggtcaagcggaaggacagccggggacgcgccaagagaagcggatctggcgtgaagcagaccctgaatttcgacctgctgaagctggctggcgacgtggaatccaacccaggccctactagtatggactggatttggcgcatccttttccttgtcggcgctgctaccggcgcgcattccgggccccagctccagctgcaagagtctggacctggcctggtcaagcctagcgagacactgagcctgacctgtaccgtgtccggcgatagcatcagcagcggcgattactactggggctggatcagacagcctcctggcaaaggactggaatggatcggccacatctactacagcggcgtgacctactacaaccccagcctgaagtccagagtgaccatcagcgtggacaccagccggaaccagttctccctgaagctgtctagcgtgacagccgccgataccgccgtgtactactgcaccagagaggacagcagcaactggcggagtagaggccagggaacactggtcacagttagctctggatccggcggaggcggaagtggaggcggaggatctggcggcggaggctctttcgaagaagtgcaactccagcagagcggccctgagcttgtgaagcctggcgcttccgtgaagatgagctgcaaggccagcggctacaccttcaccagctacgtgatgcactgggtcaagcagaaacctggacagggcctggaatggatcggctacatcaacccctacaacgacggcaccaagtacaacgagaagttcaagggcaaggccaccctgacaagcgacaccagcagcagcaccgcctacatggaactgaacagcctgaccagcgaggacagcgccgtgtacttctgcgccagacccatctacttcgacaacgactacttcgattactggggccagggcaccaccctgaaggtgtcctctacgcgtgaggacctgaagaacgtgttcccacctgaggtggccgtgttcgagcctagcgaggccgagatcagccacacccagaaagccaccctcgtgtgcctggctaccggcttctaccccgaccatgtggaactgtcttggtgggtcaacggcaaagaggtgcacagcggcgtgtgtaccgacccccagccactgaaagaacagcccgccctgaacgacagccggtactgcctgagcagcagactgagagtgtccgccaccttctggcagaacccccggaaccacttcagatgccaggtgcagttctacggcctgagcgagaacgacgagtggacccaggacagagccaagcccgtgacccagatcgtgtctgccgaagcctggggcagagccgattgcggctttaccagcgagagctaccagcagggcgtgctgagcgccaccaacctgagcgtgatcggcttcagaatcctgctgctgaaagtggccggctttaacctgctgatgaccctgcggctgtggtccagc

SEQ ID NO: 5834 - DNA, 2688 bp, synthetic construct
  source 1..2688: mol_type = other DNA
atggccttaccagtgaccgccttgctcctgccgctggccttgctgctccacgccgccaggccggaagtgcagctggttgaatctggcggaggactggttcagcctggcggatctctgagactgtcttgtgccgccagcggcttcagcttcagcgacttttggatgagctgggtccgacaggcccctggcaaaggacttgaatgggtcgccacaatcagccaggccggcagcgagaaggactacgtggactctgtgaagggcagattcaccatcagccgggacaacgccaagaagtccctgtacctccagatgaacagcctgagagccgaggacaccgccgtgtactattgtgcctctggcgtgtacagcttcgactacagaggccagggcaccctggtcacagtctcttctggtaccggcggaggcggatctggcggcggaggtagcggtggcggaggatctgaattcgacatccagatgacccagagccccagcagcctgtctgccagcgtgggcgacagagtgaccatcacatgcaaggccagccaggacgtgggaatcgccgtggcctggtatcagcagaaacccggcaaggtgcccaagctgctgatctactgggccagcaccagacacaccggcgtgcccgatagattttccggcagcggctccggcaccgacttcaccctgacaatcagctccctccagcccgaggacgtggcaacctactactgccagcagtacagcagctacccctacaccttcggccagggcaccaaggtggaaatcaagagactcgagatccagaaccctgatcctgccgtgtaccagctgcgggatagcaagagcagcgacaagagcgtgtgtctgttcaccgacttcgacagccagaccaacgtgtcccagagcaaggactccgacgtgtacatcaccgataagtgcgtgctggacatgcggagcatggacttcaagagcaactccgccgtggcctggtccaacaagtccgatttcgcctgcgccaacgccttcaacaacagcattatccccgaggacacattcttcccaagccccgagagcagctgcgacgtgaagctggtggaaaagagcttcgagacagacaccaacctgaacttccagatcctgtacgagatcctgctgggcaaggccaccctgtacgccgtgctggtgtctgccctggtgctgatggctatggtcaagcggaaggacagccggggacgcgccaagagaagcggatctggcgtgaagcagaccctgaatttcgacctgctgaagctggctggcgacgtggaatccaacccaggccctactagtatggactggatttggcgcatccttttccttgtcggcgctgctaccggcgcgcattccgggccccagctccagctgcaagagtctggacctggcctggtcaagcctagcgagacactgagcctgacctgtaccgtgtccggcgatagcatcagcagcggcgattactactggggctggatcagacagcctcctggcaaaggactggaatggatcggccacatctactacagcggcgtgacctactacaaccccagcctgaagtccagagtgaccatcagcgtggacaccagccggaaccagttctccctgaagctgtctagcgtgacagccgccgataccgccgtgtactactgcaccagagaggacagcagcaactggcggagtagaggccagggaacactggtcacagttagctctggatccggcggaggcggaagtggaggcggaggatctggcggcggaggctctttcgaagaagtgcaactggtggaatcaggcggcggactggtgcagcctggcggatctctgagactgagctgtgccgccagcggcttcgacttcagccggtactggatgagctgggtgcgccaggcccctggcaaaggactggaatggatcggcgagatcaaccccgacagcagcaccatcaactacgcccccagcctgaaggacaagttcatcatcagccgggacaacgccaagaacagcctgtacctccagatgaactccctgcgggccgaggacaccgccgtgtactattgcgccagacccgacggcaactactggtacttcgacgtgtggggccagggaaccctcgtgaccgtgtcatctacgcgtgaggacctgaagaacgtgttcccacctgaggtggccgtgttcgagcctagcgaggccgagatcagccacacccagaaagccaccctcgtgtgcctggctaccggcttctaccccgaccatgtggaactgtcttggtgggtcaacggcaaagaggtgcacagcggcgtgtgtaccgacccccagccactgaaagaacagcccgccctgaacgacagccggtactgcctgagcagcagactgagagtgtccgccaccttctggcagaacccccggaaccacttcagatgccaggtgcagttctacggcctgagcgagaacgacgagtggacccaggacagagccaagcccgtgacccagatcgtgtctgccgaagcctggggcagagccgattgcggctttaccagcgagagctaccagcagggcgtgctgagcgccaccaacctgagcgtgatcggcttcagaatcctgctgctgaaagtggccggctttaacctgctgatgaccctgcggctgtggtccagc

SEQ ID NO: 5835 - DNA, 2688 bp, synthetic construct
  source 1..2688: mol_type = other DNA
atggccttaccagtgaccgccttgctcctgccgctggccttgctgctccacgccgccaggccggaagtgcagctggttgaatctggcggaggactggttcagcctggcggatctctgagactgtcttgtgccgccagcggcttcagcttcagcgacttttggatgagctgggtccgacaggcccctggcaaaggacttgaatgggtcgccacaatcagccaggccggcagcgagaaggactacgtggactctgtgaagggcagattcaccatcagccgggacaacgccaagaagtccctgtacctccagatgaacagcctgagagccgaggacaccgccgtgtactattgtgcctctggcgtgtacagcttcgactacagaggccagggcaccctggtcacagtctcttctggtaccggcggaggcggatctggcggcggaggtagcggtggcggaggatctgaattcgacatcgtgatgacccagagccagaagagcatgagcaccagcgtgggcgacagagtgagcatcacctgcaaggccagccaggacgtgatcaccggcgtggcctggtaccagcagaagcccggccagagccccaagctgctgatctacagcgccagctacagatacaccggcgtgcccgacagattcaccggcagcggcagcggcaccgacttcaccttcaccatcagcaacgtgcaggccgaggacctggccgtgtactactgccagcagcactacagcacccccctgaccttcggcgccggcaccaagctggagctgaagctcgagatccagaaccctgatcctgccgtgtaccagctgcgggatagcaagagcagcgacaagagcgtgtgtctgttcaccgacttcgacagccagaccaacgtgtcccagagcaaggactccgacgtgtacatcaccgataagtgcgtgctggacatgcggagcatggacttcaagagcaactccgccgtggcctggtccaacaagtccgatttcgcctgcgccaacgccttcaacaacagcattatccccgaggacacattcttcccaagccccgagagcagctgcgacgtgaagctggtggaaaagagcttcgagacagacaccaacctgaacttccagatcctgtacgagatcctgctgggcaaggccaccctgtacgccgtgctggtgtctgccctggtgctgatggctatggtcaagcggaaggacagccggggacgcgccaagagaagcggatctggcgtgaagcagaccctgaatttcgacctgctgaagctggctggcgacgtggaatccaacccaggccctactagtatggactggatttggcgcatccttttccttgtcggcgctgctaccggcgcgcattccgggccccagctccagctgcaagagtctggacctggcctggtcaagcctagcgagacactgagcctgacctgtaccgtgtccggcgatagcatcagcagcggcgattactactggggctggatcagacagcctcctggcaaaggactggaatggatcggccacatctactacagcggcgtgacctactacaaccccagcctgaagtccagagtgaccatcagcgtggacaccagccggaaccagttctccctgaagctgtctagcgtgacagccgccgataccgccgtgtactactgcaccagagaggacagcagcaactggcggagtagaggccagggaacactggtcacagttagctctggatccggcggaggcggaagtggaggcggaggatctggcggcggaggctctttcgaacaggtgcagctgcagcagcccggcgccgagctggtgagacccggcgccagcgtgaagctgagctgcaaggccagcggctacagcttcaccacctactggatgaactgggtgaagcagagacccggccagggcctggagtggatcggcatgatccaccccagcgacagcgagaccagactgaaccagaagttcaaggacaaggccaccctgaccgtggacaagagcagcagcaccgcctacatgcagctgagcagccccaccagcgaggacagcgccgtgtactactgcgccagaagcaccatgatcgccaccagagccatggactactggggccagggcaccagcgtgaccgtgagcagcacgcgtgaggacctgaagaacgtgttcccacctgaggtggccgtgttcgagcctagcgaggccgagatcagccacacccagaaagccaccctcgtgtgcctggctaccggcttctaccccgaccatgtggaactgtcttggtgggtcaacggcaaagaggtgcacagcggcgtgtgtaccgacccccagccactgaaagaacagcccgccctgaacgacagccggtactgcctgagcagcagactgagagtgtccgccaccttctggcagaacccccggaaccacttcagatgccaggtgcagttctacggcctgagcgagaacgacgagtggacccaggacagagccaagcccgtgacccagatcgtgtctgccgaagcctggggcagagccgattgcggctttaccagcgagagctaccagcagggcgtgctgagcgccaccaacctgagcgtgatcggcttcagaatcctgctgctgaaagtggccggctttaacctgctgatgaccctgcggctgtggtccagc

SEQ ID NO: 5836 - DNA, 2706 bp, synthetic construct
  source 1..2706: mol_type = other DNA
atggccttaccagtgaccgccttgctcctgccgctggccttgctgctccacgccgccaggccggaagtgcagctggttgaatctggcggaggactggttcagcctggcggatctctgagactgtcttgtgccgccagcggcttcagcttcagcgacttttggatgagctgggtccgacaggcccctggcaaaggacttgaatgggtcgccacaatcagccaggccggcagcgagaaggactacgtggactctgtgaagggcagattcaccatcagccgggacaacgccaagaagtccctgtacctccagatgaacagcctgagagccgaggacaccgccgtgtactattgtgcctctggcgtgtacagcttcgactacagaggccagggcaccctggtcacagtctcttctggtaccggcggaggcggatctggcggcggaggtagcggtggcggaggatctgaattccagagcgtgctgacacagcctccatccgtgtctggcgctccaggccagagagtgaccatctcctgtaccggcagcggcagcaacatcggagccccctacgacgtgtcctggtatcagcaactgcctggcaccgcccccaagctgctgatctaccacaacaacaagcggcccagcggcgtgcccgatagattcagcggctctaagagcggcaccagcgccagcctggctatcactggactccaggccgaggacgaggccgactactactgtgccacagtggaagccggcctgagcggctctgtgtttggcggcggaacaaagctgaccgtgctgggagctctcgagatccagaaccctgatcctgccgtgtaccagctgcgggatagcaagagcagcgacaagagcgtgtgtctgttcaccgacttcgacagccagaccaacgtgtcccagagcaaggactccgacgtgtacatcaccgataagtgcgtgctggacatgcggagcatggacttcaagagcaactccgccgtggcctggtccaacaagtccgatttcgcctgcgccaacgccttcaacaacagcattatccccgaggacacattcttcccaagccccgagagcagctgcgacgtgaagctggtggaaaagagcttcgagacagacaccaacctgaacttccagatcctgtacgagatcctgctgggcaaggccaccctgtacgccgtgctggtgtctgccctggtgctgatggctatggtcaagcggaaggacagccggggacgcgccaagagaagcggatctggcgtgaagcagaccctgaatttcgacctgctgaagctggctggcgacgtggaatccaacccaggccctactagtatggactggatttggcgcatccttttccttgtcggcgctgctaccggcgcgcattccgggccccagctccagctgcaagagtctggacctggcctggtcaagcctagcgagacactgagcctgacctgtaccgtgtccggcgatagcatcagcagcggcgattactactggggctggatcagacagcctcctggcaaaggactggaatggatcggccacatctactacagcggcgtgacctactacaaccccagcctgaagtccagagtgaccatcagcgtggacaccagccggaaccagttctccctgaagctgtctagcgtgacagccgccgataccgccgtgtactactgcaccagagaggacagcagcaactggcggagtagaggccagggaacactggtcacagttagctctggatccggcggaggcggaagtggaggcggaggatctggcggcggaggctctttcgaacaggtgcaactggtgcagagcggagccgaagtgaagaaacctggggccagcgtgaaggtgtcctgcaaggtgtccggctacaccctgaccgagctgagcattcactgggtgcgccaggcccctggcaagggactggaatggatgggcggcttcgaccccgaagagaacgagatcgtgtacgcccagcggttccagggcagagtgacaatgaccgaggacaccagcaccgacaccgcctacatggaactgagcagcctgcggagcgaggataccgccgtgtactactgcgccatcgtgggcagcttcagccctctgacactgggcctgtggggccagggaactatggtcaccgtgtccagcacgcgtgaggacctgaagaacgtgttcccacctgaggtggccgtgttcgagcctagcgaggccgagatcagccacacccagaaagccaccctcgtgtgcctggctaccggcttctaccccgaccatgtggaactgtcttggtgggtcaacggcaaagaggtgcacagcggcgtgtgtaccgacccccagccactgaaagaacagcccgccctgaacgacagccggtactgcctgagcagcagactgagagtgtccgccaccttctggcagaacccccggaaccacttcagatgccaggtgcagttctacggcctgagcgagaacgacgagtggacccaggacagagccaagcccgtgacccagatcgtgtctgccgaagcctggggcagagccgattgcggctttaccagcgagagctaccagcagggcgtgctgagcgccaccaacctgagcgtgatcggcttcagaatcctgctgctgaaagtggccggctttaacctgctgatgaccctgcggctgtggtccagc

SEQ ID NO: 5837 - DNA, 2706 bp, synthetic construct
  source 1..2706: mol_type = other DNA
atggccttaccagtgaccgccttgctcctgccgctggccttgctgctccacgccgccaggccggaagtgcagctggttgaatctggcggaggactggttcagcctggcggatctctgagactgtcttgtgccgccagcggcttcagcttcagcgacttttggatgagctgggtccgacaggcccctggcaaaggacttgaatgggtcgccacaatcagccaggccggcagcgagaaggactacgtggactctgtgaagggcagattcaccatcagccgggacaacgccaagaagtccctgtacctccagatgaacagcctgagagccgaggacaccgccgtgtactattgtgcctctggcgtgtacagcttcgactacagaggccagggcaccctggtcacagtctcttctggtaccggcggaggcggatctggcggcggaggtagcggtggcggaggatctgaattccagagcgtgctgacacagcctccatccgtgtctggcgctccaggccagagagtgaccatctcctgtaccggcagcggcagcaacatcggagccccctacgacgtgtcctggtatcagcaactgcctggcaccgcccccaagctgctgatctaccacaacaacaagcggcccagcggcgtgcccgatagattcagcggctctaagagcggcaccagcgccagcctggctatcactggactccaggccgaggacgaggccgactactactgccagagctacgacagcagcagcatcagcaccatcttcggcggaggcaccaagctgacagtgctgggagctctcgagatccagaaccctgatcctgccgtgtaccagctgcgggatagcaagagcagcgacaagagcgtgtgtctgttcaccgacttcgacagccagaccaacgtgtcccagagcaaggactccgacgtgtacatcaccgataagtgcgtgctggacatgcggagcatggacttcaagagcaactccgccgtggcctggtccaacaagtccgatttcgcctgcgccaacgccttcaacaacagcattatccccgaggacacattcttcccaagccccgagagcagctgcgacgtgaagctggtggaaaagagcttcgagacagacaccaacctgaacttccagatcctgtacgagatcctgctgggcaaggccaccctgtacgccgtgctggtgtctgccctggtgctgatggctatggtcaagcggaaggacagccggggacgcgccaagagaagcggatctggcgtgaagcagaccctgaatttcgacctgctgaagctggctggcgacgtggaatccaacccaggccctactagtatggactggatttggcgcatccttttccttgtcggcgctgctaccggcgcgcattccgggccccagctccagctgcaagagtctggacctggcctggtcaagcctagcgagacactgagcctgacctgtaccgtgtccggcgatagcatcagcagcggcgattactactggggctggatcagacagcctcctggcaaaggactggaatggatcggccacatctactacagcggcgtgacctactacaaccccagcctgaagtccagagtgaccatcagcgtggacaccagccggaaccagttctccctgaagctgtctagcgtgacagccgccgataccgccgtgtactactgcaccagagaggacagcagcaactggcggagtagaggccagggaacactggtcacagttagctctggatccggcggaggcggaagtggaggcggaggatctggcggcggaggctctttcgaacaggtgcaactggtgcagagcggagccgaagtgaagaaacctggggccagcgtgaaggtgtcctgcaaggtgtccggctacaccctgaccgagctgagcattcactgggtgcgccaggcccctggcaagggactggaatggatgggcggcttcgaccccgaagagaacgagatcgtgtacgcccagcggttccagggcagagtgacaatgaccgaggacaccagcaccgacaccgcctacatggaactgagcagcctgcggagcgaggataccgccgtgtactactgtgccatcgtgggcagcttcagcggaatcgcctacagaccttggggccagggcacaatggtcaccgtgtctagcacgcgtgaggacctgaagaacgtgttcccacctgaggtggccgtgttcgagcctagcgaggccgagatcagccacacccagaaagccaccctcgtgtgcctggctaccggcttctaccccgaccatgtggaactgtcttggtgggtcaacggcaaagaggtgcacagcggcgtgtgtaccgacccccagccactgaaagaacagcccgccctgaacgacagccggtactgcctgagcagcagactgagagtgtccgccaccttctggcagaacccccggaaccacttcagatgccaggtgcagttctacggcctgagcgagaacgacgagtggacccaggacagagccaagcccgtgacccagatcgtgtctgccgaagcctggggcagagccgattgcggctttaccagcgagagctaccagcagggcgtgctgagcgccaccaacctgagcgtgatcggcttcagaatcctgctgctgaaagtggccggctttaacctgctgatgaccctgcggctgtggtccagc

SEQ ID NO: 5838 - DNA, 2670 bp, synthetic construct
  source 1..2670: mol_type = other DNA
atggccttaccagtgaccgccttgctcctgccgctggccttgctgctccacgccgccaggccggaagtgcagctggttgaatctggcggaggactggttcagcctggcggatctctgagactgtcttgtgccgccagcggcttcagcttcagcgacttttggatgagctgggtccgacaggcccctggcaaaggacttgaatgggtcgccacaatcagccaggccggcagcgagaaggactacgtggactctgtgaagggcagattcaccatcagccgggacaacgccaagaagtccctgtacctccagatgaacagcctgagagccgaggacaccgccgtgtactattgtgcctctggcgtgtacagcttcgactacagaggccagggcaccctggtcacagtctcttctggtaccggcggaggcggatctggcggcggaggtagcggtggcggaggatctgaattcgacatccagatgacccagagccccagcagcctgtctgccagcgtgggcgacagagtgaccatcacctgtagagccagccagggcatcagaaacaacctggcctggtatcagcagaagcccggcaaggcccccaagcggctgatctacgccgccagcaatctccagagcggcgtgcccagcagattcacaggctctggcagcggcaccgagttcaccctgatcgtgtctagcctccagcccgaggacttcgccacctactactgcctccagcaccacagctaccccctgacatctggcggaggcaccaaggtggaactcgagatccagaaccctgatcctgccgtgtaccagctgcgggatagcaagagcagcgacaagagcgtgtgtctgttcaccgacttcgacagccagaccaacgtgtcccagagcaaggactccgacgtgtacatcaccgataagtgcgtgctggacatgcggagcatggacttcaagagcaactccgccgtggcctggtccaacaagtccgatttcgcctgcgccaacgccttcaacaacagcattatccccgaggacacattcttcccaagccccgagagcagctgcgacgtgaagctggtggaaaagagcttcgagacagacaccaacctgaacttccagatcctgtacgagatcctgctgggcaaggccaccctgtacgccgtgctggtgtctgccctggtgctgatggctatggtcaagcggaaggacagccggggacgcgccaagagaagcggatctggcgtgaagcagaccctgaatttcgacctgctgaagctggctggcgacgtggaatccaacccaggccctactagtatggactggatttggcgcatccttttccttgtcggcgctgctaccggcgcgcattccgggccccagctccagctgcaagagtctggacctggcctggtcaagcctagcgagacactgagcctgacctgtaccgtgtccggcgatagcatcagcagcggcgattactactggggctggatcagacagcctcctggcaaaggactggaatggatcggccacatctactacagcggcgtgacctactacaaccccagcctgaagtccagagtgaccatcagcgtggacaccagccggaaccagttctccctgaagctgtctagcgtgacagccgccgataccgccgtgtactactgcaccagagaggacagcagcaactggcggagtagaggccagggaacactggtcacagttagctctggatccggcggaggcggaagtggaggcggaggatctggcggcggaggctctttcgaagaggtgcaggtgctggaaagtggcggaggactggtgcagcctggcggctctctgagactgtcttgtgccgccagcggcttcaccttcagcagctacgccatgagctgggtgcgccaggcccctggaaaaggactggaatgggtgtccgccatcagcggctctggcgggtctaccaactacgccgatagcgtgaagggccggttcaccatcagccgggacaacagcaagaacaccctgtacctccagatgaacagcctgcgggccgaggacaccgccgtgtattattgtgccggcagcagcgggtggagcgagtattggggacagggcaccctcgtgaccgtgtcctctacgcgtgaggacctgaagaacgtgttcccacctgaggtggccgtgttcgagcctagcgaggccgagatcagccacacccagaaagccaccctcgtgtgcctggctaccggcttctaccccgaccatgtggaactgtcttggtgggtcaacggcaaagaggtgcacagcggcgtgtgtaccgacccccagccactgaaagaacagcccgccctgaacgacagccggtactgcctgagcagcagactgagagtgtccgccaccttctggcagaacccccggaaccacttcagatgccaggtgcagttctacggcctgagcgagaacgacgagtggacccaggacagagccaagcccgtgacccagatcgtgtctgccgaagcctggggcagagccgattgcggctttaccagcgagagctaccagcagggcgtgctgagcgccaccaacctgagcgtgatcggcttcagaatcctgctgctgaaagtggccggctttaacctgctgatgaccctgcggctgtggtccagc

SEQ ID NO: 5839 - DNA, 2688 bp, synthetic construct
  source 1..2688: mol_type = other DNA
atggccttaccagtgaccgccttgctcctgccgctggccttgctgctccacgccgccaggccggaagtgcagctggttgaatctggcggaggactggttcagcctggcggatctctgagactgtcttgtgccgccagcggcttcagcttcagcgacttttggatgagctgggtccgacaggcccctggcaaaggacttgaatgggtcgccacaatcagccaggccggcagcgagaaggactacgtggactctgtgaagggcagattcaccatcagccgggacaacgccaagaagtccctgtacctccagatgaacagcctgagagccgaggacaccgccgtgtactattgtgcctctggcgtgtacagcttcgactacagaggccagggcaccctggtcacagtctcttctggtaccggcggaggcggatctggcggcggaggtagcggtggcggaggatctgaattcgacgagatccagctggtgcagagcggagccgaagtgaagaagcctggcgagagcctgcggatcagctgcaagggcagcggcttcaacatcgaggactactacatccactgggtgcgccagatgcccggcaagggcctggaatggatgggcagaatcgaccccgagaacgacgagactaagtacggccccatcttccagggccacgtgaccatcagcgccgacaccagcatcaacaccgtgtacctccagtggtccagcctgaaggccagcgacaccgccatgtactactgcgcctttagaggcggcgtgtactggggccagggcaccacagtgacagtgtctagcctcgagatccagaaccctgatcctgccgtgtaccagctgcgggatagcaagagcagcgacaagagcgtgtgtctgttcaccgacttcgacagccagaccaacgtgtcccagagcaaggactccgacgtgtacatcaccgataagtgcgtgctggacatgcggagcatggacttcaagagcaactccgccgtggcctggtccaacaagtccgatttcgcctgcgccaacgccttcaacaacagcattatccccgaggacacattcttcccaagccccgagagcagctgcgacgtgaagctggtggaaaagagcttcgagacagacaccaacctgaacttccagatcctgtacgagatcctgctgggcaaggccaccctgtacgccgtgctggtgtctgccctggtgctgatggctatggtcaagcggaaggacagccggggacgcgccaagagaagcggatctggcgtgaagcagaccctgaatttcgacctgctgaagctggctggcgacgtggaatccaacccaggccctactagtatggactggatttggcgcatccttttccttgtcggcgctgctaccggcgcgcattccgggccccagctccagctgcaagagtctggacctggcctggtcaagcctagcgagacactgagcctgacctgtaccgtgtccggcgatagcatcagcagcggcgattactactggggctggatcagacagcctcctggcaaaggactggaatggatcggccacatctactacagcggcgtgacctactacaaccccagcctgaagtccagagtgaccatcagcgtggacaccagccggaaccagttctccctgaagctgtctagcgtgacagccgccgataccgccgtgtactactgcaccagagaggacagcagcaactggcggagtagaggccagggaacactggtcacagttagctctggatccggcggaggcggaagtggaggcggaggatctggcggcggaggctctttcgaagatgtcgtgatgacccagagccccgacagcctggctgtgtctctgggagagagagccaccatcaactgcaagtccagccagtccctgctggacagcgacggcaagacctacctgaactggctccagcagaagcccggccagccccccaagagactgatctccctggtgtccaagctggactccggcgtgcccgatagattttccggctctggcagcggcaccgacttcaccctgacaatcagctcccttcaggccgaggacgtggccgtgtactattgctggcagggcacacacttccccggcacctttggcggaggcaccaaggtggaaatcaagacgcgtgaggacctgaagaacgtgttcccacctgaggtggccgtgttcgagcctagcgaggccgagatcagccacacccagaaagccaccctcgtgtgcctggctaccggcttctaccccgaccatgtggaactgtcttggtgggtcaacggcaaagaggtgcacagcggcgtgtgtaccgacccccagccactgaaagaacagcccgccctgaacgacagccggtactgcctgagcagcagactgagagtgtccgccaccttctggcagaacccccggaaccacttcagatgccaggtgcagttctacggcctgagcgagaacgacgagtggacccaggacagagccaagcccgtgacccagatcgtgtctgccgaagcctggggcagagccgattgcggctttaccagcgagagctaccagcagggcgtgctgagcgccaccaacctgagcgtgatcggcttcagaatcctgctgctgaaagtggccggctttaacctgctgatgaccctgcggctgtggtccagc

SEQ ID NO: 5840 - DNA, 2709 bp, synthetic construct
  source 1..2709: mol_type = other DNA
atggccttaccagtgaccgccttgctcctgccgctggccttgctgctccacgccgccaggccggaagtgcagctggttgaatctggcggaggactggttcagcctggcggatctctgagactgtcttgtgccgccagcggcttcagcttcagcgacttttggatgagctgggtccgacaggcccctggcaaaggacttgaatgggtcgccacaatcagccaggccggcagcgagaaggactacgtggactctgtgaagggcagattcaccatcagccgggacaacgccaagaagtccctgtacctccagatgaacagcctgagagccgaggacaccgccgtgtactattgtgcctctggcgtgtacagcttcgactacagaggccagggcaccctggtcacagtctcttctggtaccggcggaggcggatctggcggcggaggtagcggtggcggaggatctgaattcgacgagcttgtgatgacccagagccccagcagcctgacagtgacagccggcgagaaagtgaccatgagctgcaagagcagccagagcctgctgaacagcggcaaccagaagaactacctgacctggtatcagcagaagcccggccagccccccaagctgctgatctactgggccagcaccagagaaagcggcgtgcccgatagattcaccggctctggcagcggcaccgacttcaccctgacaatcagcagcgtgcaggccgaggacctggccgtgtactactgccagaacgactacagctaccccctgaccttcggagccggcaccaagctggaaatcaagctcgagatccagaaccctgatcctgccgtgtaccagctgcgggatagcaagagcagcgacaagagcgtgtgtctgttcaccgacttcgacagccagaccaacgtgtcccagagcaaggactccgacgtgtacatcaccgataagtgcgtgctggacatgcggagcatggacttcaagagcaactccgccgtggcctggtccaacaagtccgatttcgcctgcgccaacgccttcaacaacagcattatccccgaggacacattcttcccaagccccgagagcagctgcgacgtgaagctggtggaaaagagcttcgagacagacaccaacctgaacttccagatcctgtacgagatcctgctgggcaaggccaccctgtacgccgtgctggtgtctgccctggtgctgatggctatggtcaagcggaaggacagccggggacgcgccaagagaagcggatctggcgtgaagcagaccctgaatttcgacctgctgaagctggctggcgacgtggaatccaacccaggccctactagtatggactggatttggcgcatccttttccttgtcggcgctgctaccggcgcgcattccgggccccagctccagctgcaagagtctggacctggcctggtcaagcctagcgagacactgagcctgacctgtaccgtgtccggcgatagcatcagcagcggcgattactactggggctggatcagacagcctcctggcaaaggactggaatggatcggccacatctactacagcggcgtgacctactacaaccccagcctgaagtccagagtgaccatcagcgtggacaccagccggaaccagttctccctgaagctgtctagcgtgacagccgccgataccgccgtgtactactgcaccagagaggacagcagcaactggcggagtagaggccagggaacactggtcacagttagctctggatccggcggaggcggaagtggaggcggaggatctggcggcggaggctctttcgaagaagtgcagctgctggaacagtctggcgccgaacttgtgcggcctggcaccagcgtgaagatcagctgtaaagccagcggctacgccttcaccaactactggctgggctgggtcaagcagaggcctggacacggcctggaatggatcggcgacatctttcccggctccggcaacatccactacaacgagaagttcaagggcaaggccaccctgaccgccgacaagtctagcagcaccgcctacatgcagctgtccagcctgacctttgaggacagcgccgtgtatttctgtgcccggctgcggaactgggacgagcccatggattattggggccagggcaccaccgtgaccgtgtctagtacgcgtgaggacctgaagaacgtgttcccacctgaggtggccgtgttcgagcctagcgaggccgagatcagccacacccagaaagccaccctcgtgtgcctggctaccggcttctaccccgaccatgtggaactgtcttggtgggtcaacggcaaagaggtgcacagcggcgtgtgtaccgacccccagccactgaaagaacagcccgccctgaacgacagccggtactgcctgagcagcagactgagagtgtccgccaccttctggcagaacccccggaaccacttcagatgccaggtgcagttctacggcctgagcgagaacgacgagtggacccaggacagagccaagcccgtgacccagatcgtgtctgccgaagcctggggcagagccgattgcggctttaccagcgagagctaccagcagggcgtgctgagcgccaccaacctgagcgtgatcggcttcagaatcctgctgctgaaagtggccggctttaacctgctgatgaccctgcggctgtggtccagc

SEQ ID NO: 5841 - DNA, 2712 bp, synthetic construct
  source 1..2712: mol_type = other DNA
atggccttaccagtgaccgccttgctcctgccgctggccttgctgctccacgccgccaggccggaagtgcagctggttgaatctggcggaggactggttcagcctggcggatctctgagactgtcttgtgccgccagcggcttcagcttcagcgacttttggatgagctgggtccgacaggcccctggcaaaggacttgaatgggtcgccacaatcagccaggccggcagcgagaaggactacgtggactctgtgaagggcagattcaccatcagccgggacaacgccaagaagtccctgtacctccagatgaacagcctgagagccgaggacaccgccgtgtactattgtgcctctggcgtgtacagcttcgactacagaggccagggcaccctggtcacagtctcttctggtaccggcggaggcggatctggcggcggaggtagcggtggcggaggatctgaattcgacgagctgcagatgacccagagccctagcagcctgtctgccagcgtgggcgacagagtgaccatcacctgtagagccagccagagcatcagcagctacctgaactggtatcagcagaagcccggccagccccccaaactgctgatctactgggccagcaccagagaaagcggcgtgcccgatagattcagcggcagcgagagcggcaccaactacaccctgaccatcagctccctgcagcccgaggacttcgccacctacttttgccagcagagcgacagcctgcccatcacctttggacagggcacccggctggacattcagctcgagatccagaaccctgatcctgccgtgtaccagctgcgggatagcaagagcagcgacaagagcgtgtgtctgttcaccgacttcgacagccagaccaacgtgtcccagagcaaggactccgacgtgtacatcaccgataagtgcgtgctggacatgcggagcatggacttcaagagcaactccgccgtggcctggtccaacaagtccgatttcgcctgcgccaacgccttcaacaacagcattatccccgaggacacattcttcccaagccccgagagcagctgcgacgtgaagctggtggaaaagagcttcgagacagacaccaacctgaacttccagatcctgtacgagatcctgctgggcaaggccaccctgtacgccgtgctggtgtctgccctggtgctgatggctatggtcaagcggaaggacagccggggacgcgccaagagaagcggatctggcgtgaagcagaccctgaatttcgacctgctgaagctggctggcgacgtggaatccaacccaggccctactagtatggactggatttggcgcatccttttccttgtcggcgctgctaccggcgcgcattccgggccccagctccagctgcaagagtctggacctggcctggtcaagcctagcgagacactgagcctgacctgtaccgtgtccggcgatagcatcagcagcggcgattactactggggctggatcagacagcctcctggcaaaggactggaatggatcggccacatctactacagcggcgtgacctactacaaccccagcctgaagtccagagtgaccatcagcgtggacaccagccggaaccagttctccctgaagctgtctagcgtgacagccgccgataccgccgtgtactactgcaccagagaggacagcagcaactggcggagtagaggccagggaacactggtcacagttagctctggatccggcggaggcggaagtggaggcggaggatctggcggcggaggctctttcgaagaggtgcaactgctggaatctgggggcggagtggtgcagcctggcagaagcctgagactgagctgtgccgccagcggcttcaccttcagctcctacggaatgcactgggtgcgccaggcccctggcaaaggactggaatgggtggccgtgatctcctacgacggcagcaacaagtactacgccgacagcgtgaagggccggttcaccatcagccgggacaacagcaagaacaccctgtacctgcagatgaacagcctgcgggccgaggacaccgccgtgtactactgcgccaaggatatgggctggggcagcggctggcggccttactactactacggcatggacgtgtggggccagggcaccaccgtgacagtgtcatctacgcgtgaggacctgaagaacgtgttcccacctgaggtggccgtgttcgagcctagcgaggccgagatcagccacacccagaaagccaccctcgtgtgcctggctaccggcttctaccccgaccatgtggaactgtcttggtgggtcaacggcaaagaggtgcacagcggcgtgtgtaccgacccccagccactgaaagaacagcccgccctgaacgacagccggtactgcctgagcagcagactgagagtgtccgccaccttctggcagaacccccggaaccacttcagatgccaggtgcagttctacggcctgagcgagaacgacgagtggacccaggacagagccaagcccgtgacccagatcgtgtctgccgaagcctggggcagagccgattgcggctttaccagcgagagctaccagcagggcgtgctgagcgccaccaacctgagcgtgatcggcttcagaatcctgctgctgaaagtggccggctttaacctgctgatgaccctgcggctgtggtccagc

SEQ ID NO: 5842 - DNA, 2703 bp, synthetic construct
  source 1..2703: mol_type = other DNA
atggccttaccagtgaccgccttgctcctgccgctggccttgctgctccacgccgccaggccggaagtgcagctggttgaatctggcggaggactggttcagcctggcggatctctgagactgtcttgtgccgccagcggcttcagcttcagcgacttttggatgagctgggtccgacaggcccctggcaaaggacttgaatgggtcgccacaatcagccaggccggcagcgagaaggactacgtggactctgtgaagggcagattcaccatcagccgggacaacgccaagaagtccctgtacctccagatgaacagcctgagagccgaggacaccgccgtgtactattgtgcctctggcgtgtacagcttcgactacagaggccagggcaccctggtcacagtctcttctggtaccggcggaggcggatctggcggcggaggtagcggtggcggaggatctgaattcgacgacatccaaatgacacagagtccttctagtttgagtgcgagcgtgggggacagggtgaccattacctgcagggccagccagagcataagctcataccttaattggtaccagcaaaaaccaggtaaggcccctaagctcctgatctacgcggcctcttcacttcaatctggggtcccttcccgcttcagtggctccggcagcggcaccgacttcacgctcactatatcaagtctgcagcctgaggatctcgccacctattactgtcaacaaagttattccacccctttcacctttggaccgggcacgaaagtggatattaagctcgagatccagaaccctgatcctgccgtgtaccagctgcgggatagcaagagcagcgacaagagcgtgtgtctgttcaccgacttcgacagccagaccaacgtgtcccagagcaaggactccgacgtgtacatcaccgataagtgcgtgctggacatgcggagcatggacttcaagagcaactccgccgtggcctggtccaacaagtccgatttcgcctgcgccaacgccttcaacaacagcattatccccgaggacacattcttcccaagccccgagagcagctgcgacgtgaagctggtggaaaagagcttcgagacagacaccaacctgaacttccagatcctgtacgagatcctgctgggcaaggccaccctgtacgccgtgctggtgtctgccctggtgctgatggctatggtcaagcggaaggacagccggggacgcgccaagagaagcggatctggcgtgaagcagaccctgaatttcgacctgctgaagctggctggcgacgtggaatccaacccaggccctactagtatggactggatttggcgcatccttttccttgtcggcgctgctaccggcgcgcattccgggccccagctccagctgcaagagtctggacctggcctggtcaagcctagcgagacactgagcctgacctgtaccgtgtccggcgatagcatcagcagcggcgattactactggggctggatcagacagcctcctggcaaaggactggaatggatcggccacatctactacagcggcgtgacctactacaaccccagcctgaagtccagagtgaccatcagcgtggacaccagccggaaccagttctccctgaagctgtctagcgtgacagccgccgataccgccgtgtactactgcaccagagaggacagcagcaactggcggagtagaggccagggaacactggtcacagttagctctggatccggcggaggcggaagtggaggcggaggatctggcggcggaggctctttcgaagtgcacgaggtccagcttgtgcagtccggggcagaggtcaagaagcctggttctagcgtaaaagtgagttgcaaagcctcaggtgggacattttcatcctacgcgatcagttgggttagacaggctcctggtcaagggctggaatggatgggcggaattattccaatcttcggaacagcgaattacgcgcagaagttccagggtagagtaaccatcactgctgacaagtccacctccaccgcatacatggaattgtctagtctccggagcgaggatacggcggtgtattattgtgctacgttcgccctgtttggcttccgcgaacaggctttcgacatctgggggcagggcacgacagtcacggttagtagtacgcgtgaggacctgaagaacgtgttcccacctgaggtggccgtgttcgagcctagcgaggccgagatcagccacacccagaaagccaccctcgtgtgcctggctaccggcttctaccccgaccatgtggaactgtcttggtgggtcaacggcaaagaggtgcacagcggcgtgtgtaccgacccccagccactgaaagaacagcccgccctgaacgacagccggtactgcctgagcagcagactgagagtgtccgccaccttctggcagaacccccggaaccacttcagatgccaggtgcagttctacggcctgagcgagaacgacgagtggacccaggacagagccaagcccgtgacccagatcgtgtctgccgaagcctggggcagagccgattgcggctttaccagcgagagctaccagcagggcgtgctgagcgccaccaacctgagcgtgatcggcttcagaatcctgctgctgaaagtggccggctttaacctgctgatgaccctgcggctgtggtccagc

SEQ ID NO: 5843 - DNA, 2697 bp, synthetic construct
  source 1..2697: mol_type = other DNA
atggccttaccagtgaccgccttgctcctgccgctggccttgctgctccacgccgccaggccggaagtgcagctggttgaatctggcggaggactggttcagcctggcggatctctgagactgtcttgtgccgccagcggcttcagcttcagcgacttttggatgagctgggtccgacaggcccctggcaaaggacttgaatgggtcgccacaatcagccaggccggcagcgagaaggactacgtggactctgtgaagggcagattcaccatcagccgggacaacgccaagaagtccctgtacctccagatgaacagcctgagagccgaggacaccgccgtgtactattgtgcctctggcgtgtacagcttcgactacagaggccagggcaccctggtcacagtctcttctggtaccggcggaggcggatctggcggcggaggtagcggtggcggaggatctgaattcgacatcgtgctgacccagagccctctgagcctggccgtgtctctgggacagcctgccatcatcagctgcaaggccagccagagcgtgtcctttgccggcacctctctgatgcactggtatcaccagaagcccggccagcagcccagactgctgatctacagagccagcaacctggaagccggcgtgcccgatagattttccggcagcggcagcaagaccgacttcaccctgaccatcagccccgtggaagccgaagatgccgccacctactactgccagcagagcagagagtacccctacaccttcggcggaggcaccaagctggaaatcaagaggctcgagatccagaaccctgatcctgccgtgtaccagctgcgggatagcaagagcagcgacaagagcgtgtgtctgttcaccgacttcgacagccagaccaacgtgtcccagagcaaggactccgacgtgtacatcaccgataagtgcgtgctggacatgcggagcatggacttcaagagcaactccgccgtggcctggtccaacaagtccgatttcgcctgcgccaacgccttcaacaacagcattatccccgaggacacattcttcccaagccccgagagcagctgcgacgtgaagctggtggaaaagagcttcgagacagacaccaacctgaacttccagatcctgtacgagatcctgctgggcaaggccaccctgtacgccgtgctggtgtctgccctggtgctgatggctatggtcaagcggaaggacagccggggacgcgccaagagaagcggatctggcgtgaagcagaccctgaatttcgacctgctgaagctggctggcgacgtggaatccaacccaggccctactagtatggactggatttggcgcatccttttccttgtcggcgctgctaccggcgcgcattccgggccccagctccagctgcaagagtctggacctggcctggtcaagcctagcgagacactgagcctgacctgtaccgtgtccggcgatagcatcagcagcggcgattactactggggctggatcagacagcctcctggcaaaggactggaatggatcggccacatctactacagcggcgtgacctactacaaccccagcctgaagtccagagtgaccatcagcgtggacaccagccggaaccagttctccctgaagctgtctagcgtgacagccgccgataccgccgtgtactactgcaccagagaggacagcagcaactggcggagtagaggccagggaacactggtcacagttagctctggatccggcggaggcggaagtggaggcggaggatctggcggcggaggctctttcgaacaggtccaactggtgcagagcggagccgaggtcgtgaagcctggcgcttccgtgaagattagctgcaaagccagcggctacacctttaccggctactttatgaactgggtcaagcagagccctggccagagcctggaatggatcggcagaatccacccctacgacggcgacaccttctacaaccagaagttccagggcaaggccaccctgacagtggacaagagcagcaacaccgcccacatggaactgctgagcctgaccagcgaggacttcgccgtgtactactgcaccagatacgacggcagccgggctatggactattggggccagggcaccaccgtgaccgtgtctagtacgcgtgaggacctgaagaacgtgttcccacctgaggtggccgtgttcgagcctagcgaggccgagatcagccacacccagaaagccaccctcgtgtgcctggctaccggcttctaccccgaccatgtggaactgtcttggtgggtcaacggcaaagaggtgcacagcggcgtgtgtaccgacccccagccactgaaagaacagcccgccctgaacgacagccggtactgcctgagcagcagactgagagtgtccgccaccttctggcagaacccccggaaccacttcagatgccaggtgcagttctacggcctgagcgagaacgacgagtggacccaggacagagccaagcccgtgacccagatcgtgtctgccgaagcctggggcagagccgattgcggctttaccagcgagagctaccagcagggcgtgctgagcgccaccaacctgagcgtgatcggcttcagaatcctgctgctgaaagtggccggctttaacctgctgatgaccctgcggctgtggtccagc

SEQ ID NO: 5844 - DNA, 2688 bp, synthetic construct
  source 1..2688: mol_type = other DNA
atggccttaccagtgaccgccttgctcctgccgctggccttgctgctccacgccgccaggccggaagtgcagctggttgaatctggcggaggactggttcagcctggcggatctctgagactgtcttgtgccgccagcggcttcagcttcagcgacttttggatgagctgggtccgacaggcccctggcaaaggacttgaatgggtcgccacaatcagccaggccggcagcgagaaggactacgtggactctgtgaagggcagattcaccatcagccgggacaacgccaagaagtccctgtacctccagatgaacagcctgagagccgaggacaccgccgtgtactattgtgcctctggcgtgtacagcttcgactacagaggccagggcaccctggtcacagtctcttctggtaccggcggaggcggatctggcggcggaggtagcggtggcggaggatctgaattcgacgacgttgtgatgacccagacccccctgagcctgcctgtgacacctggcgaacctgccagcatcagctgtcggagcagccagagcctggtgcacagaaacggcaacacctacctgcactggtatctccagaagcccggccagagccccaagctgctgatccacaaggtgtccaacagattcagcggcgtgcccgacagattctccggcagcggctctggcaccgacttcaccctgaagatcagccgggtggaagccgaggacctgggcgtgtacttctgtagccagagcacccatgtgccccccctgacatttggagccggcaccaagctggaactgaagctcgagatccagaaccctgatcctgccgtgtaccagctgcgggatagcaagagcagcgacaagagcgtgtgtctgttcaccgacttcgacagccagaccaacgtgtcccagagcaaggactccgacgtgtacatcaccgataagtgcgtgctggacatgcggagcatggacttcaagagcaactccgccgtggcctggtccaacaagtccgatttcgcctgcgccaacgccttcaacaacagcattatccccgaggacacattcttcccaagccccgagagcagctgcgacgtgaagctggtggaaaagagcttcgagacagacaccaacctgaacttccagatcctgtacgagatcctgctgggcaaggccaccctgtacgccgtgctggtgtctgccctggtgctgatggctatggtcaagcggaaggacagccggggacgcgccaagagaagcggatctggcgtgaagcagaccctgaatttcgacctgctgaagctggctggcgacgtggaatccaacccaggccctactagtatggactggatttggcgcatccttttccttgtcggcgctgctaccggcgcgcattccgggccccagctccagctgcaagagtctggacctggcctggtcaagcctagcgagacactgagcctgacctgtaccgtgtccggcgatagcatcagcagcggcgattactactggggctggatcagacagcctcctggcaaaggactggaatggatcggccacatctactacagcggcgtgacctactacaaccccagcctgaagtccagagtgaccatcagcgtggacaccagccggaaccagttctccctgaagctgtctagcgtgacagccgccgataccgccgtgtactactgcaccagagaggacagcagcaactggcggagtagaggccagggaacactggtcacagttagctctggatccggcggaggcggaagtggaggcggaggatctggcggcggaggctctttcgaagaagtgcagctggtgcagtctggcgctgaggtggaaaagcctggggccagcgtgaagattagctgcaaggccagcggcagcagcttcaccggctacaacatgaactgggtgcgccagaacatcggcaagagcctggaatggatcggagccatcgacccctactacggcggcaccagctacaaccagaagttcaagggcagagccaccctgaccgtggacaagagcaccagcaccgcctacatgcacctgaagtccctgcggagcgaggacaccgccgtgtactactgtgtgtccggcatggaatattggggccagggcaccagcgtgaccgtgtctagtacgcgtgaggacctgaagaacgtgttcccacctgaggtggccgtgttcgagcctagcgaggccgagatcagccacacccagaaagccaccctcgtgtgcctggctaccggcttctaccccgaccatgtggaactgtcttggtgggtcaacggcaaagaggtgcacagcggcgtgtgtaccgacccccagccactgaaagaacagcccgccctgaacgacagccggtactgcctgagcagcagactgagagtgtccgccaccttctggcagaacccccggaaccacttcagatgccaggtgcagttctacggcctgagcgagaacgacgagtggacccaggacagagccaagcccgtgacccagatcgtgtctgccgaagcctggggcagagccgattgcggctttaccagcgagagctaccagcagggcgtgctgagcgccaccaacctgagcgtgatcggcttcagaatcctgctgctgaaagtggccggctttaacctgctgatgaccctgcggctgtggtccagc

SEQ ID NO: 5845 - DNA, 2682 bp, synthetic construct
  source 1..2682: mol_type = other DNA
atggccttaccagtgaccgccttgctcctgccgctggccttgctgctccacgccgccaggccggaagtgcagctggttgaatctggcggaggactggttcagcctggcggatctctgagactgtcttgtgccgccagcggcttcagcttcagcgacttttggatgagctgggtccgacaggcccctggcaaaggacttgaatgggtcgccacaatcagccaggccggcagcgagaaggactacgtggactctgtgaagggcagattcaccatcagccgggacaacgccaagaagtccctgtacctccagatgaacagcctgagagccgaggacaccgccgtgtactattgtgcctctggcgtgtacagcttcgactacagaggccagggcaccctggtcacagtctcttctggtaccggcggaggcggatctggcggcggaggtagcggtggcggaggatctgaattcgacgagatcgtgatgacccagacccctgccaccctgtctgtgtctgccggcgagagagtgaccattacctgcaaggccagccagagcgtgtccaacgacgtgacctggtatcagcagaagcccggccaggcccccagactgctgatctacagcgccagcaacagatacagcggcgtgcccgccagattttccggcagcggctacggcaccgagttcaccttcaccatcagcagcgtgcagagcgaggacttcgccgtgtacttctgtcagcaagactacagcagcttcggccagggcaccaagctggaaatcaagaggctcgagatccagaaccctgatcctgccgtgtaccagctgcgggatagcaagagcagcgacaagagcgtgtgtctgttcaccgacttcgacagccagaccaacgtgtcccagagcaaggactccgacgtgtacatcaccgataagtgcgtgctggacatgcggagcatggacttcaagagcaactccgccgtggcctggtccaacaagtccgatttcgcctgcgccaacgccttcaacaacagcattatccccgaggacacattcttcccaagccccgagagcagctgcgacgtgaagctggtggaaaagagcttcgagacagacaccaacctgaacttccagatcctgtacgagatcctgctgggcaaggccaccctgtacgccgtgctggtgtctgccctggtgctgatggctatggtcaagcggaaggacagccggggacgcgccaagagaagcggatctggcgtgaagcagaccctgaatttcgacctgctgaagctggctggcgacgtggaatccaacccaggccctactagtatggactggatttggcgcatccttttccttgtcggcgctgctaccggcgcgcattccgggccccagctccagctgcaagagtctggacctggcctggtcaagcctagcgagacactgagcctgacctgtaccgtgtccggcgatagcatcagcagcggcgattactactggggctggatcagacagcctcctggcaaaggactggaatggatcggccacatctactacagcggcgtgacctactacaaccccagcctgaagtccagagtgaccatcagcgtggacaccagccggaaccagttctccctgaagctgtctagcgtgacagccgccgataccgccgtgtactactgcaccagagaggacagcagcaactggcggagtagaggccagggaacactggtcacagttagctctggatccggcggaggcggaagtggaggcggaggatctggcggcggaggctctttcgaacaggtgcagctggtggaatctggacctggcgtggtgcagcctggcagaagcctgagaatcagctgtgccgtgtccggcttcagcgtgaccaactacggcgtgcactgggtgcgccagccacctggaaaaggactggaatggctgggcgtgatctgggctggcggcatcaccaactacaacagcgccttcatgtcccggctgaccatctccaaggacaacagcaagaacaccgtgtacctccagatgaacagcctgcgggccgaggacaccgccatgtactactgtgcttccagaggcggccactacggctacgccctggattattggggccagggaaccctcgtgaccgtgtcctctacgcgtgaggacctgaagaacgtgttcccacctgaggtggccgtgttcgagcctagcgaggccgagatcagccacacccagaaagccaccctcgtgtgcctggctaccggcttctaccccgaccatgtggaactgtcttggtgggtcaacggcaaagaggtgcacagcggcgtgtgtaccgacccccagccactgaaagaacagcccgccctgaacgacagccggtactgcctgagcagcagactgagagtgtccgccaccttctggcagaacccccggaaccacttcagatgccaggtgcagttctacggcctgagcgagaacgacgagtggacccaggacagagccaagcccgtgacccagatcgtgtctgccgaagcctggggcagagccgattgcggctttaccagcgagagctaccagcagggcgtgctgagcgccaccaacctgagcgtgatcggcttcagaatcctgctgctgaaagtggccggctttaacctgctgatgaccctgcggctgtggtccagc

SEQ ID NO: 5846 - DNA, 2688 bp, synthetic construct
  source 1..2688: mol_type = other DNA
atggccttaccagtgaccgccttgctcctgccgctggccttgctgctccacgccgccaggccggaagtgcagctggttgaatctggcggaggactggttcagcctggcggatctctgagactgtcttgtgccgccagcggcttcagcttcagcgacttttggatgagctgggtccgacaggcccctggcaaaggacttgaatgggtcgccacaatcagccaggccggcagcgagaaggactacgtggactctgtgaagggcagattcaccatcagccgggacaacgccaagaagtccctgtacctccagatgaacagcctgagagccgaggacaccgccgtgtactattgtgcctctggcgtgtacagcttcgactacagaggccagggcaccctggtcacagtctcttctggtaccggcggaggcggatctggcggcggaggtagcggtggcggaggatctgaattcgacatccagatgacccagaccgccagcagcctgcctgcctctctgggcgacagagtgaccatctcctgtagcgccagccaggacatcagcaactacctgaactggtatcagcagaaacccgacggcaccgtgaagctgctgatcttctacagcagcaacctgcacagcggcgtgcccagcagattttctggcggcggaagcggcaccgactacagcctgaccatcagcaatctggaacccgaggacattgccacctacttttgccaccagtacagcaagctgccctggacctttggcggaggcaccaagctggaaatcaagagactcgagatccagaaccctgatcctgccgtgtaccagctgcgggatagcaagagcagcgacaagagcgtgtgtctgttcaccgacttcgacagccagaccaacgtgtcccagagcaaggactccgacgtgtacatcaccgataagtgcgtgctggacatgcggagcatggacttcaagagcaactccgccgtggcctggtccaacaagtccgatttcgcctgcgccaacgccttcaacaacagcattatccccgaggacacattcttcccaagccccgagagcagctgcgacgtgaagctggtggaaaagagcttcgagacagacaccaacctgaacttccagatcctgtacgagatcctgctgggcaaggccaccctgtacgccgtgctggtgtctgccctggtgctgatggctatggtcaagcggaaggacagccggggacgcgccaagagaagcggatctggcgtgaagcagaccctgaatttcgacctgctgaagctggctggcgacgtggaatccaacccaggccctactagtatggactggatttggcgcatccttttccttgtcggcgctgctaccggcgcgcattccgggccccagctccagctgcaagagtctggacctggcctggtcaagcctagcgagacactgagcctgacctgtaccgtgtccggcgatagcatcagcagcggcgattactactggggctggatcagacagcctcctggcaaaggactggaatggatcggccacatctactacagcggcgtgacctactacaaccccagcctgaagtccagagtgaccatcagcgtggacaccagccggaaccagttctccctgaagctgtctagcgtgacagccgccgataccgccgtgtactactgcaccagagaggacagcagcaactggcggagtagaggccagggaacactggtcacagttagctctggatccggcggaggcggaagtggaggcggaggatctggcggcggaggctctttcgaagaagtgaccctggtggaaagcggcggagacttcgtgaagcctggcggctctctgaaggtgtcctgtgccgccagcggcttcgcctttagccactacgccatgagctgggtgcgccagacccctgccaagagactggaatgggtggcctacatcagcagcggcggctccggcacctactactccgatagcgtgaagggccggttcaccatcagccgggacaacgccaagaacaccctgtacctccagatgcggagcctgcggagcgaggacagcgccatgtatttctgcaccagagtgaagctgggcacctattacttcgactcttggggccagggcaccaccctgaccgtgtcatctacgcgtgaggacctgaagaacgtgttcccacctgaggtggccgtgttcgagcctagcgaggccgagatcagccacacccagaaagccaccctcgtgtgcctggctaccggcttctaccccgaccatgtggaactgtcttggtgggtcaacggcaaagaggtgcacagcggcgtgtgtaccgacccccagccactgaaagaacagcccgccctgaacgacagccggtactgcctgagcagcagactgagagtgtccgccaccttctggcagaacccccggaaccacttcagatgccaggtgcagttctacggcctgagcgagaacgacgagtggacccaggacagagccaagcccgtgacccagatcgtgtctgccgaagcctggggcagagccgattgcggctttaccagcgagagctaccagcagggcgtgctgagcgccaccaacctgagcgtgatcggcttcagaatcctgctgctgaaagtggccggctttaacctgctgatgaccctgcggctgtggtccagc

SEQ ID NO: 5847 - DNA, 2694 bp, synthetic construct
  source 1..2694: mol_type = other DNA
atggccttaccagtgaccgccttgctcctgccgctggccttgctgctccacgccgccaggccggaagtgcagctggttgaatctggcggaggactggttcagcctggcggatctctgagactgtcttgtgccgccagcggcttcagcttcagcgacttttggatgagctgggtccgacaggcccctggcaaaggacttgaatgggtcgccacaatcagccaggccggcagcgagaaggactacgtggactctgtgaagggcagattcaccatcagccgggacaacgccaagaagtccctgtacctccagatgaacagcctgagagccgaggacaccgccgtgtactattgtgcctctggcgtgtacagcttcgactacagaggccagggcaccctggtcacagtctcttctggtaccggcggaggcggatctggcggcggaggtagcggtggcggaggatctgaattccagttcgtgctgacccagagcccttctgcctctgctgccctgggagcctctgccaagctgacctgtacactgagcagcgcccacaagacctacaccatcgactggtatcagcagcagaagggaaaggcccccagatacctgatccaagtgaagtccgacggcacctacacaaaggccaccggcgtgcccgatagattcagcggcagtagcagcggagccgatagatacctgattatccccagcgtgcaggccgacgacgaggccgattactactgcggcaccgattacaccggcggctacgtgttcggcggaggcacacaactgaccgtgacactcgagatccagaaccctgatcctgccgtgtaccagctgcgggatagcaagagcagcgacaagagcgtgtgtctgttcaccgacttcgacagccagaccaacgtgtcccagagcaaggactccgacgtgtacatcaccgataagtgcgtgctggacatgcggagcatggacttcaagagcaactccgccgtggcctggtccaacaagtccgatttcgcctgcgccaacgccttcaacaacagcattatccccgaggacacattcttcccaagccccgagagcagctgcgacgtgaagctggtggaaaagagcttcgagacagacaccaacctgaacttccagatcctgtacgagatcctgctgggcaaggccaccctgtacgccgtgctggtgtctgccctggtgctgatggctatggtcaagcggaaggacagccggggacgcgccaagagaagcggatctggcgtgaagcagaccctgaatttcgacctgctgaagctggctggcgacgtggaatccaacccaggccctactagtatggactggatttggcgcatccttttccttgtcggcgctgctaccggcgcgcattccgggccccagctccagctgcaagagtctggacctggcctggtcaagcctagcgagacactgagcctgacctgtaccgtgtccggcgatagcatcagcagcggcgattactactggggctggatcagacagcctcctggcaaaggactggaatggatcggccacatctactacagcggcgtgacctactacaaccccagcctgaagtccagagtgaccatcagcgtggacaccagccggaaccagttctccctgaagctgtctagcgtgacagccgccgataccgccgtgtactactgcaccagagaggacagcagcaactggcggagtagaggccagggaacactggtcacagttagctctggatccggcggaggcggaagtggaggcggaggatctggcggcggaggctctttcgaagagcaactgaaagagtctggcggcggactgttcaagcccaccgataccctgaccctgacctgcaccgtgtccggcttcagcctgagctactacggcgtgaactgggtgcgccaggcccctggcaatggcctggaatggatcggcacaatcggcggcagcggcgacacctactatgcctcttgggccaagtccagaagcaccatcatcagaaacaccaacgagaacaccgtgaccctgaagatgaccagcctgacagccgccgacaccgccacctacttttgcgtcagatacgccaacatcggctacgagtatttcaacgtgtggggacccggcaccctcgtgaccgtgtcatctacgcgtgaggacctgaagaacgtgttcccacctgaggtggccgtgttcgagcctagcgaggccgagatcagccacacccagaaagccaccctcgtgtgcctggctaccggcttctaccccgaccatgtggaactgtcttggtgggtcaacggcaaagaggtgcacagcggcgtgtgtaccgacccccagccactgaaagaacagcccgccctgaacgacagccggtactgcctgagcagcagactgagagtgtccgccaccttctggcagaacccccggaaccacttcagatgccaggtgcagttctacggcctgagcgagaacgacgagtggacccaggacagagccaagcccgtgacccagatcgtgtctgccgaagcctggggcagagccgattgcggctttaccagcgagagctaccagcagggcgtgctgagcgccaccaacctgagcgtgatcggcttcagaatcctgctgctgaaagtggccggctttaacctgctgatgaccctgcggctgtggtccagc

SEQ ID NO: 5848 - DNA, 2709 bp, synthetic construct
  source 1..2709: mol_type = other DNA
atggccttaccagtgaccgccttgctcctgccgctggccttgctgctccacgccgccaggccggaagtgcagctggttgaatctggcggaggactggttcagcctggcggatctctgagactgtcttgtgccgccagcggcttcagcttcagcgacttttggatgagctgggtccgacaggcccctggcaaaggacttgaatgggtcgccacaatcagccaggccggcagcgagaaggactacgtggactctgtgaagggcagattcaccatcagccgggacaacgccaagaagtccctgtacctccagatgaacagcctgagagccgaggacaccgccgtgtactattgtgcctctggcgtgtacagcttcgactacagaggccagggcaccctggtcacagtctcttctggtaccggcggaggcggatctggcggcggaggtagcggtggcggaggatctgaattccagttcgtgctgacccagagcccttctgtgtctgccgccctgggagcctctgccaagctgacctgtacactgagcagcgcccacaagacctacaccatcgactggtatcagcagcagcagggcgaggcccccagatacctgatgcaagtgaagtccgacggcagctacaccaagggcaccggcgtgcccgatagattcagcggcagtagcagcggagccgatagatacctgattatccccagcgtgcaggccgacgacgaggccggatatgtgtgcggcgctgacgacaatggcggctacgtgttcggcggaggcacccaactgacagtgacactcgagatccagaaccctgatcctgccgtgtaccagctgcgggatagcaagagcagcgacaagagcgtgtgtctgttcaccgacttcgacagccagaccaacgtgtcccagagcaaggactccgacgtgtacatcaccgataagtgcgtgctggacatgcggagcatggacttcaagagcaactccgccgtggcctggtccaacaagtccgatttcgcctgcgccaacgccttcaacaacagcattatccccgaggacacattcttcccaagccccgagagcagctgcgacgtgaagctggtggaaaagagcttcgagacagacaccaacctgaacttccagatcctgtacgagatcctgctgggcaaggccaccctgtacgccgtgctggtgtctgccctggtgctgatggctatggtcaagcggaaggacagccggggacgcgccaagagaagcggatctggcgtgaagcagaccctgaatttcgacctgctgaagctggctggcgacgtggaatccaacccaggccctactagtatggactggatttggcgcatccttttccttgtcggcgctgctaccggcgcgcattccgggccccagctccagctgcaagagtctggacctggcctggtcaagcctagcgagacactgagcctgacctgtaccgtgtccggcgatagcatcagcagcggcgattactactggggctggatcagacagcctcctggcaaaggactggaatggatcggccacatctactacagcggcgtgacctactacaaccccagcctgaagtccagagtgaccatcagcgtggacaccagccggaaccagttctccctgaagctgtctagcgtgacagccgccgataccgccgtgtactactgcaccagagaggacagcagcaactggcggagtagaggccagggaacactggtcacagttagctctggatccggcggaggcggaagtggaggcggaggatctggcggcggaggctctttcgaacagagcgtgaaagagtctgagggcggcctgttcaagcccaccgataccctgaccctgacctgcaccgtgtccggcttcagcctgagcagacacgccctgacatgggtgcgccaggcccctggaaatggcctggaatggatcggagccatcgacaacgccggcaccacctactatgcctcttgggccaagtccagaagcaccatcacccggaacaccgacctgcacaccgtgaccctgaagatgaccagcctgaccgccagcgacaccgccacctacttttgcgccagagtgttctacgacatcaacagcggctactacctggacggcatggacctgtggggacctggcacacttgtgaccgtgtccagcacgcgtgaggacctgaagaacgtgttcccacctgaggtggccgtgttcgagcctagcgaggccgagatcagccacacccagaaagccaccctcgtgtgcctggctaccggcttctaccccgaccatgtggaactgtcttggtgggtcaacggcaaagaggtgcacagcggcgtgtgtaccgacccccagccactgaaagaacagcccgccctgaacgacagccggtactgcctgagcagcagactgagagtgtccgccaccttctggcagaacccccggaaccacttcagatgccaggtgcagttctacggcctgagcgagaacgacgagtggacccaggacagagccaagcccgtgacccagatcgtgtctgccgaagcctggggcagagccgattgcggctttaccagcgagagctaccagcagggcgtgctgagcgccaccaacctgagcgtgatcggcttcagaatcctgctgctgaaagtggccggctttaacctgctgatgaccctgcggctgtggtccagc

SEQ ID NO: 5849 - DNA, 2691 bp, synthetic construct
  source 1..2691: mol_type = other DNA
atggccttaccagtgaccgccttgctcctgccgctggccttgctgctccacgccgccaggccggaagtgcagctggttgaatctggcggaggactggttcagcctggcggatctctgagactgtcttgtgccgccagcggcttcagcttcagcgacttttggatgagctgggtccgacaggcccctggcaaaggacttgaatgggtcgccacaatcagccaggccggcagcgagaaggactacgtggactctgtgaagggcagattcaccatcagccgggacaacgccaagaagtccctgtacctccagatgaacagcctgagagccgaggacaccgccgtgtactattgtgcctctggcgtgtacagcttcgactacagaggccagggcaccctggtcacagtctcttctggtaccggcggaggcggatctggcggcggaggtagcggtggcggaggatctgaattcgacatccagatgacccagagccccagcagcctgtctgccagcgtgggcgacagagtgaccatcacctgtagagccagccagggcatcagctcttggctggcctggtatcagcagaagcccgagaaggcccccaagagcctgatctacgccgcctctagtctccagagcggcgtgcccagcagattttctggcagcggctccggcaccgacttcaccctgacaatcagctccctccagcccgaggacttcgccacctactactgccagcagtacaacagctacccccccacctttggcggaggcaccaaggtggaaatcaagctcgagatccagaaccctgatcctgccgtgtaccagctgcgggatagcaagagcagcgacaagagcgtgtgtctgttcaccgacttcgacagccagaccaacgtgtcccagagcaaggactccgacgtgtacatcaccgataagtgcgtgctggacatgcggagcatggacttcaagagcaactccgccgtggcctggtccaacaagtccgatttcgcctgcgccaacgccttcaacaacagcattatccccgaggacacattcttcccaagccccgagagcagctgcgacgtgaagctggtggaaaagagcttcgagacagacaccaacctgaacttccagatcctgtacgagatcctgctgggcaaggccaccctgtacgccgtgctggtgtctgccctggtgctgatggctatggtcaagcggaaggacagccggggacgcgccaagagaagcggatctggcgtgaagcagaccctgaatttcgacctgctgaagctggctggcgacgtggaatccaacccaggccctactagtatggactggatttggcgcatccttttccttgtcggcgctgctaccggcgcgcattccgggccccagctccagctgcaagagtctggacctggcctggtcaagcctagcgagacactgagcctgacctgtaccgtgtccggcgatagcatcagcagcggcgattactactggggctggatcagacagcctcctggcaaaggactggaatggatcggccacatctactacagcggcgtgacctactacaaccccagcctgaagtccagagtgaccatcagcgtggacaccagccggaaccagttctccctgaagctgtctagcgtgacagccgccgataccgccgtgtactactgcaccagagaggacagcagcaactggcggagtagaggccagggaacactggtcacagttagctctggatccggcggaggcggaagtggaggcggaggatctggcggcggaggctctttcgaagaagtgcaactggtggaatcaggcggcggactggtgcagcctggcgagtctctgagactgagctgtgtggcctccggcttcaccttcagccggtacaagatgaactgggtgcgccaggcccctggcaagggactggaatgggtgtcctacatcagccgcagcggcagagacatctactacgccgacagcgtgaagggccggttcaccatcagcagagacaacgccaagaacagcctgtacctccagatgaactccctgcgggacgaggacaccgccgtgtactactgtgccggaaccgtgaccacctattactacttcggcatggacgtgtggggccacggcaccaccgtgacagtgtcatctacgcgtgaggacctgaagaacgtgttcccacctgaggtggccgtgttcgagcctagcgaggccgagatcagccacacccagaaagccaccctcgtgtgcctggctaccggcttctaccccgaccatgtggaactgtcttggtgggtcaacggcaaagaggtgcacagcggcgtgtgtaccgacccccagccactgaaagaacagcccgccctgaacgacagccggtactgcctgagcagcagactgagagtgtccgccaccttctggcagaacccccggaaccacttcagatgccaggtgcagttctacggcctgagcgagaacgacgagtggacccaggacagagccaagcccgtgacccagatcgtgtctgccgaagcctggggcagagccgattgcggctttaccagcgagagctaccagcagggcgtgctgagcgccaccaacctgagcgtgatcggcttcagaatcctgctgctgaaagtggccggctttaacctgctgatgaccctgcggctgtggtccagc

SEQ ID NO: 5850 - DNA, 2694 bp, synthetic construct
  source 1..2694: mol_type = other DNA
atggccttaccagtgaccgccttgctcctgccgctggccttgctgctccacgccgccaggccggaagtgcagctggttgaatctggcggaggactggttcagcctggcggatctctgagactgtcttgtgccgccagcggcttcagcttcagcgacttttggatgagctgggtccgacaggcccctggcaaaggacttgaatgggtcgccacaatcagccaggccggcagcgagaaggactacgtggactctgtgaagggcagattcaccatcagccgggacaacgccaagaagtccctgtacctccagatgaacagcctgagagccgaggacaccgccgtgtactattgtgcctctggcgtgtacagcttcgactacagaggccagggcaccctggtcacagtctcttctggtaccggcggaggcggatctggcggcggaggtagcggtggcggaggatctgaattcgacatccagatgacccagagccccagcagcctgtctgccagcgtgggcgacagagtgaccatcacctgtagagccagccagggcatcagctcttggctggcctggtatcagcagaagcccgagaaggcccccaagagcctgatctacgccgcctctagtctccagagcggcgtgcccagcagattttctggcagcggctccggcaccgacttcaccctgacaatcagctccctccagcccgaggacttcgccacctactactgccagcagtacaacagctaccctcccacctttggcggaggcaccaaggtggaaatcaagctcgagatccagaaccctgatcctgccgtgtaccagctgcgggatagcaagagcagcgacaagagcgtgtgtctgttcaccgacttcgacagccagaccaacgtgtcccagagcaaggactccgacgtgtacatcaccgataagtgcgtgctggacatgcggagcatggacttcaagagcaactccgccgtggcctggtccaacaagtccgatttcgcctgcgccaacgccttcaacaacagcattatccccgaggacacattcttcccaagccccgagagcagctgcgacgtgaagctggtggaaaagagcttcgagacagacaccaacctgaacttccagatcctgtacgagatcctgctgggcaaggccaccctgtacgccgtgctggtgtctgccctggtgctgatggctatggtcaagcggaaggacagccggggacgcgccaagagaagcggatctggcgtgaagcagaccctgaatttcgacctgctgaagctggctggcgacgtggaatccaacccaggccctactagtatggactggatttggcgcatccttttccttgtcggcgctgctaccggcgcgcattccgggccccagctccagctgcaagagtctggacctggcctggtcaagcctagcgagacactgagcctgacctgtaccgtgtccggcgatagcatcagcagcggcgattactactggggctggatcagacagcctcctggcaaaggactggaatggatcggccacatctactacagcggcgtgacctactacaaccccagcctgaagtccagagtgaccatcagcgtggacaccagccggaaccagttctccctgaagctgtctagcgtgacagccgccgataccgccgtgtactactgcaccagagaggacagcagcaactggcggagtagaggccagggaacactggtcacagttagctctggatccggcggaggcggaagtggaggcggaggatctggcggcggaggctctttcgaagaagtgcaactggtggaatccgggggaggctctgtgcagcctggcgagtctctgagactgagctgtgtggcctccggcttcaccttcagccggtacaagatgaactgggtgcgccaggcccctggcaagggactggaatgggtgtcctacatcagccgcagcggcagagacatctactacgccgacagcgtgaagggccggttcaccatcagcagagacaacgccaagaacagcctgtacctccagatgaactccctgcgggacgaggacaccgccgtgtactactgtgccggaaccgtgaccacctattactacgacttcggcatggacgtgtggggccagggcacaaccgtgacagtgtctagcacgcgtgaggacctgaagaacgtgttcccacctgaggtggccgtgttcgagcctagcgaggccgagatcagccacacccagaaagccaccctcgtgtgcctggctaccggcttctaccccgaccatgtggaactgtcttggtgggtcaacggcaaagaggtgcacagcggcgtgtgtaccgacccccagccactgaaagaacagcccgccctgaacgacagccggtactgcctgagcagcagactgagagtgtccgccaccttctggcagaacccccggaaccacttcagatgccaggtgcagttctacggcctgagcgagaacgacgagtggacccaggacagagccaagcccgtgacccagatcgtgtctgccgaagcctggggcagagccgattgcggctttaccagcgagagctaccagcagggcgtgctgagcgccaccaacctgagcgtgatcggcttcagaatcctgctgctgaaagtggccggctttaacctgctgatgaccctgcggctgtggtccagc

SEQ ID NO: 5851 - DNA, 2688 bp, synthetic construct
  source 1..2688: mol_type = other DNA
atggccttaccagtgaccgccttgctcctgccgctggccttgctgctccacgccgccaggccggaagtgcagctggttgaatctggcggaggactggttcagcctggcggatctctgagactgtcttgtgccgccagcggcttcagcttcagcgacttttggatgagctgggtccgacaggcccctggcaaaggacttgaatgggtcgccacaatcagccaggccggcagcgagaaggactacgtggactctgtgaagggcagattcaccatcagccgggacaacgccaagaagtccctgtacctccagatgaacagcctgagagccgaggacaccgccgtgtactattgtgcctctggcgtgtacagcttcgactacagaggccagggcaccctggtcacagtctcttctggtaccggcggaggcggatctggcggcggaggtagcggtggcggaggatctgaattccagtctgtgctgacacagcctccatctgcctctggcacacctggacagagagtgaccatcagctgtagcggcagcagaagcaacgtcggcggcaactacgtgttctggtatcagcaggtcccaggcgctacccctaagctgctgatctacagaagcaatcagcggcctagcggcgtgcccgatagatttgccggaagcaagagcggcagctctgccagccttgccatctctggactgagaagcgaggacgaggccgactactactgtgccacctgggatgatagcctgagcggcttcgtgtttggcaccggcaccaaagtgacagtgcttggtctcgagatccagaaccctgatcctgccgtgtaccagctgcgggatagcaagagcagcgacaagagcgtgtgtctgttcaccgacttcgacagccagaccaacgtgtcccagagcaaggactccgacgtgtacatcaccgataagtgcgtgctggacatgcggagcatggacttcaagagcaactccgccgtggcctggtccaacaagtccgatttcgcctgcgccaacgccttcaacaacagcattatccccgaggacacattcttcccaagccccgagagcagctgcgacgtgaagctggtggaaaagagcttcgagacagacaccaacctgaacttccagatcctgtacgagatcctgctgggcaaggccaccctgtacgccgtgctggtgtctgccctggtgctgatggctatggtcaagcggaaggacagccggggacgcgccaagagaagcggatctggcgtgaagcagaccctgaatttcgacctgctgaagctggctggcgacgtggaatccaacccaggccctactagtatggactggatttggcgcatccttttccttgtcggcgctgctaccggcgcgcattccgggccccagctccagctgcaagagtctggacctggcctggtcaagcctagcgagacactgagcctgacctgtaccgtgtccggcgatagcatcagcagcggcgattactactggggctggatcagacagcctcctggcaaaggactggaatggatcggccacatctactacagcggcgtgacctactacaaccccagcctgaagtccagagtgaccatcagcgtggacaccagccggaaccagttctccctgaagctgtctagcgtgacagccgccgataccgccgtgtactactgcaccagagaggacagcagcaactggcggagtagaggccagggaacactggtcacagttagctctggatccggcggaggcggaagtggaggcggaggatctggcggcggaggctctttcgaagttcagctggttgaatctggcggcggactggttaagcctggcggatctctgagactgtcttgtgccgccagcggcttcaccttcagcgattactacatgagctggatcagacaggcccctggcaaaggactggaatgggtgtcctacatcagcagcagcggctccaccatctactacgccgatagcgtgaagggcagattcaccatcagccgggacaacgccaagaacagcctgtacctccagatgaactccctgagagccgaggacaccgccgtgtactattgcgccagaggctacggcaaagcctacgatcaatggggccagggcacactggtcaccgtttcttctacgcgtgaggacctgaagaacgtgttcccacctgaggtggccgtgttcgagcctagcgaggccgagatcagccacacccagaaagccaccctcgtgtgcctggctaccggcttctaccccgaccatgtggaactgtcttggtgggtcaacggcaaagaggtgcacagcggcgtgtgtaccgacccccagccactgaaagaacagcccgccctgaacgacagccggtactgcctgagcagcagactgagagtgtccgccaccttctggcagaacccccggaaccacttcagatgccaggtgcagttctacggcctgagcgagaacgacgagtggacccaggacagagccaagcccgtgacccagatcgtgtctgccgaagcctggggcagagccgattgcggctttaccagcgagagctaccagcagggcgtgctgagcgccaccaacctgagcgtgatcggcttcagaatcctgctgctgaaagtggccggctttaacctgctgatgaccctgcggctgtggtccagc

SEQ ID NO: 5852 - DNA, 2685 bp, synthetic construct
  source 1..2685: mol_type = other DNA
atggccttaccagtgaccgccttgctcctgccgctggccttgctgctccacgccgccaggccggaagtgcagctggttgaatctggcggaggactggttcagcctggcggatctctgagactgtcttgtgccgccagcggcttcagcttcagcgacttttggatgagctgggtccgacaggcccctggcaaaggacttgaatgggtcgccacaatcagccaggccggcagcgagaaggactacgtggactctgtgaagggcagattcaccatcagccgggacaacgccaagaagtccctgtacctccagatgaacagcctgagagccgaggacaccgccgtgtactattgtgcctctggcgtgtacagcttcgactacagaggccagggcaccctggtcacagtctcttctggtaccggcggaggcggatctggcggcggaggtagcggtggcggaggatctgaattccagtctgtggtcacacagccacctagcatgtctgccgctccaggccagcaagtgaccatctcttgtagcggcggcaacagcaacatcgagcggaactacgtgtcctggtatctgcaactgcctggcacagcccctaagctggtcatcttcgacaacgacagacggcccagcggcatccccgatagattttctggcagcaagagcggcaccagcgccacactgggaattaccggacttcagacaggcgacgaggccgactactactgtggcacatgggactctagcctgagaggctgggttttcggcggaggcacaaagctgacagtgcttggtctcgagatccagaaccctgatcctgccgtgtaccagctgcgggatagcaagagcagcgacaagagcgtgtgtctgttcaccgacttcgacagccagaccaacgtgtcccagagcaaggactccgacgtgtacatcaccgataagtgcgtgctggacatgcggagcatggacttcaagagcaactccgccgtggcctggtccaacaagtccgatttcgcctgcgccaacgccttcaacaacagcattatccccgaggacacattcttcccaagccccgagagcagctgcgacgtgaagctggtggaaaagagcttcgagacagacaccaacctgaacttccagatcctgtacgagatcctgctgggcaaggccaccctgtacgccgtgctggtgtctgccctggtgctgatggctatggtcaagcggaaggacagccggggacgcgccaagagaagcggatctggcgtgaagcagaccctgaatttcgacctgctgaagctggctggcgacgtggaatccaacccaggccctactagtatggactggatttggcgcatccttttccttgtcggcgctgctaccggcgcgcattccgggccccagctccagctgcaagagtctggacctggcctggtcaagcctagcgagacactgagcctgacctgtaccgtgtccggcgatagcatcagcagcggcgattactactggggctggatcagacagcctcctggcaaaggactggaatggatcggccacatctactacagcggcgtgacctactacaaccccagcctgaagtccagagtgaccatcagcgtggacaccagccggaaccagttctccctgaagctgtctagcgtgacagccgccgataccgccgtgtactactgcaccagagaggacagcagcaactggcggagtagaggccagggaacactggtcacagttagctctggatccggcggaggcggaagtggaggcggaggatctggcggcggaggctctttcgaagtgcagctcgttgagtctggcggcggactgattcaacctggcggaagcctgagactgagctgtgccgcttccggcttcaccttcagcaactacgccatgaactgggttcgacaggcccctggcaaaggactggaatgggtgtccaccatcaacggcagaggcagcagcaccatctacgccgattctgtgaagggcagattcaccatcagccgggacaacagcaagaacaccctgtacctccagatgaactccctgagagccgaggacaccgccacctattactgtgcccggtacatcagcagaggactgggcgattcttggggccagggcacactggttacagtgacgcgtgaggacctgaagaacgtgttcccacctgaggtggccgtgttcgagcctagcgaggccgagatcagccacacccagaaagccaccctcgtgtgcctggctaccggcttctaccccgaccatgtggaactgtcttggtgggtcaacggcaaagaggtgcacagcggcgtgtgtaccgacccccagccactgaaagaacagcccgccctgaacgacagccggtactgcctgagcagcagactgagagtgtccgccaccttctggcagaacccccggaaccacttcagatgccaggtgcagttctacggcctgagcgagaacgacgagtggacccaggacagagccaagcccgtgacccagatcgtgtctgccgaagcctggggcagagccgattgcggctttaccagcgagagctaccagcagggcgtgctgagcgccaccaacctgagcgtgatcggcttcagaatcctgctgctgaaagtggccggctttaacctgctgatgaccctgcggctgtggtccagc

SEQ ID NO: 5853 - DNA, 2688 bp, synthetic construct
  source 1..2688: mol_type = other DNA
atggccttaccagtgaccgccttgctcctgccgctggccttgctgctccacgccgccaggccggaagtgcagctggttgaatctggcggaggactggttcagcctggcggatctctgagactgtcttgtgccgccagcggcttcagcttcagcgacttttggatgagctgggtccgacaggcccctggcaaaggacttgaatgggtcgccacaatcagccaggccggcagcgagaaggactacgtggactctgtgaagggcagattcaccatcagccgggacaacgccaagaagtccctgtacctccagatgaacagcctgagagccgaggacaccgccgtgtactattgtgcctctggcgtgtacagcttcgactacagaggccagggcaccctggtcacagtctcttctggtaccggcggaggcggatctggcggcggaggtagcggtggcggaggatctgaattcgacgtcgtgatgacccagacccctctgagcctgcctgtgtccctgggcgatcaggccagcatcagctgtagaagcagccagagcctggtgcacagcaacggcaacacctacctgcactggtatctccagaagcccggccagagccccaagctgctgatctacaaggtgtccaacagattcagcggcgtgcccgacagattctccggcagcggctctggcaccgacttcaccctgaagatcagccgggtggaagccgaggacctgggcgtgtacttctgtagccagaacacccccgtgccccccaagtttggcagcggcaccaagctggaaatcaagctcgagatccagaaccctgatcctgccgtgtaccagctgcgggatagcaagagcagcgacaagagcgtgtgtctgttcaccgacttcgacagccagaccaacgtgtcccagagcaaggactccgacgtgtacatcaccgataagtgcgtgctggacatgcggagcatggacttcaagagcaactccgccgtggcctggtccaacaagtccgatttcgcctgcgccaacgccttcaacaacagcattatccccgaggacacattcttcccaagccccgagagcagctgcgacgtgaagctggtggaaaagagcttcgagacagacaccaacctgaacttccagatcctgtacgagatcctgctgggcaaggccaccctgtacgccgtgctggtgtctgccctggtgctgatggctatggtcaagcggaaggacagccggggacgcgccaagagaagcggatctggcgtgaagcagaccctgaatttcgacctgctgaagctggctggcgacgtggaatccaacccaggccctactagtatggactggatttggcgcatccttttccttgtcggcgctgctaccggcgcgcattccgggccccagctccagctgcaagagtctggacctggcctggtcaagcctagcgagacactgagcctgacctgtaccgtgtccggcgatagcatcagcagcggcgattactactggggctggatcagacagcctcctggcaaaggactggaatggatcggccacatctactacagcggcgtgacctactacaaccccagcctgaagtccagagtgaccatcagcgtggacaccagccggaaccagttctccctgaagctgtctagcgtgacagccgccgataccgccgtgtactactgcaccagagaggacagcagcaactggcggagtagaggccagggaacactggtcacagttagctctggatccggcggaggcggaagtggaggcggaggatctggcggcggaggctctttcgaacaggtgcagctccagcagtctggcgctgaactcgtgcggcctggcgcttctgtgaagctgtcttgcaaggccagcggctacaccttcaacgactacgagatgcactgggtcaagcagacccctgtgcacggcctgaagtggatcggagccctggaacccaagaccggcgataccgcctacagccagaagttcaagggcaaggccaccctgaccgccgacaagagcagcagcacagcctacatggaactgcggagcctgaccagcgaggacagcgccgtgtactactgcaccagctgctactactacacctacagcggccagggcaccctcgtgacagtgtctgctacgcgtgaggacctgaagaacgtgttcccacctgaggtggccgtgttcgagcctagcgaggccgagatcagccacacccagaaagccaccctcgtgtgcctggctaccggcttctaccccgaccatgtggaactgtcttggtgggtcaacggcaaagaggtgcacagcggcgtgtgtaccgacccccagccactgaaagaacagcccgccctgaacgacagccggtactgcctgagcagcagactgagagtgtccgccaccttctggcagaacccccggaaccacttcagatgccaggtgcagttctacggcctgagcgagaacgacgagtggacccaggacagagccaagcccgtgacccagatcgtgtctgccgaagcctggggcagagccgattgcggctttaccagcgagagctaccagcagggcgtgctgagcgccaccaacctgagcgtgatcggcttcagaatcctgctgctgaaagtggccggctttaacctgctgatgaccctgcggctgtggtccagc

SEQ ID NO: 5854 - DNA, 2685 bp, synthetic construct
  source 1..2685: mol_type = other DNA
atggccttaccagtgaccgccttgctcctgccgctggccttgctgctccacgccgccaggccggaagtgcagctggttgaatctggcggaggactggttcagcctggcggatctctgagactgtcttgtgccgccagcggcttcagcttcagcgacttttggatgagctgggtccgacaggcccctggcaaaggacttgaatgggtcgccacaatcagccaggccggcagcgagaaggactacgtggactctgtgaagggcagattcaccatcagccgggacaacgccaagaagtccctgtacctccagatgaacagcctgagagccgaggacaccgccgtgtactattgtgcctctggcgtgtacagcttcgactacagaggccagggcaccctggtcacagtctcttctggtaccggcggaggcggatctggcggcggaggtagcggtggcggaggatctgaattcgacatccaactgacccagagccccagcagcctgtctgcctctgtgggcgacagagtgaccatcacctgtagagccagccagggcatcagaaacgacctgggctggtatcagcagaagcccggcaaggcccccaagcggctgatctatgctgccagctccctccagaatggcgtgcccagcagattttccggcagcggctctggcaccgagttcaccctgaccatcagctccctccagcccgaggacttcgccacctactactgcctccagcacaacacctaccccgccttcggccagggcaccaaggtggaaatcaagagactcgagatccagaaccctgatcctgccgtgtaccagctgcgggatagcaagagcagcgacaagagcgtgtgtctgttcaccgacttcgacagccagaccaacgtgtcccagagcaaggactccgacgtgtacatcaccgataagtgcgtgctggacatgcggagcatggacttcaagagcaactccgccgtggcctggtccaacaagtccgatttcgcctgcgccaacgccttcaacaacagcattatccccgaggacacattcttcccaagccccgagagcagctgcgacgtgaagctggtggaaaagagcttcgagacagacaccaacctgaacttccagatcctgtacgagatcctgctgggcaaggccaccctgtacgccgtgctggtgtctgccctggtgctgatggctatggtcaagcggaaggacagccggggacgcgccaagagaagcggatctggcgtgaagcagaccctgaatttcgacctgctgaagctggctggcgacgtggaatccaacccaggccctactagtatggactggatttggcgcatccttttccttgtcggcgctgctaccggcgcgcattccgggccccagctccagctgcaagagtctggacctggcctggtcaagcctagcgagacactgagcctgacctgtaccgtgtccggcgatagcatcagcagcggcgattactactggggctggatcagacagcctcctggcaaaggactggaatggatcggccacatctactacagcggcgtgacctactacaaccccagcctgaagtccagagtgaccatcagcgtggacaccagccggaaccagttctccctgaagctgtctagcgtgacagccgccgataccgccgtgtactactgcaccagagaggacagcagcaactggcggagtagaggccagggaacactggtcacagttagctctggatccggcggaggcggaagtggaggcggaggatctggcggcggaggctctttcgaacaggtgcaactccaggaatctggccctggcctcgtgaagcctagccagaccctgagcctgacctgtaccgtgtctggcggcagcatcagcagcttcaactactactggtcctggatcagacaccaccctggcaagggcctggaatggatcggctacatctactacagcggcagcacctacagcaaccccagcctgaagtcccgcgtgaccatctccgtggacaccagcaagaaccagtttagcctgaccctgtccagcgtgacagccgccgataccgccgtgtactactgcgccagaggctacaactggaactacttcgactactggggccagggaaccctcgtgaccgtgtctagtacgcgtgaggacctgaagaacgtgttcccacctgaggtggccgtgttcgagcctagcgaggccgagatcagccacacccagaaagccaccctcgtgtgcctggctaccggcttctaccccgaccatgtggaactgtcttggtgggtcaacggcaaagaggtgcacagcggcgtgtgtaccgacccccagccactgaaagaacagcccgccctgaacgacagccggtactgcctgagcagcagactgagagtgtccgccaccttctggcagaacccccggaaccacttcagatgccaggtgcagttctacggcctgagcgagaacgacgagtggacccaggacagagccaagcccgtgacccagatcgtgtctgccgaagcctggggcagagccgattgcggctttaccagcgagagctaccagcagggcgtgctgagcgccaccaacctgagcgtgatcggcttcagaatcctgctgctgaaagtggccggctttaacctgctgatgaccctgcggctgtggtccagc

SEQ ID NO: 5855 - DNA, 2691 bp, synthetic construct
  source 1..2691: mol_type = other DNA
atggccttaccagtgaccgccttgctcctgccgctggccttgctgctccacgccgccaggccggaagtgcagctggttgaatctggcggaggactggttcagcctggcggatctctgagactgtcttgtgccgccagcggcttcagcttcagcgacttttggatgagctgggtccgacaggcccctggcaaaggacttgaatgggtcgccacaatcagccaggccggcagcgagaaggactacgtggactctgtgaagggcagattcaccatcagccgggacaacgccaagaagtccctgtacctccagatgaacagcctgagagccgaggacaccgccgtgtactattgtgcctctggcgtgtacagcttcgactacagaggccagggcaccctggtcacagtctcttctggtaccggcggaggcggatctggcggcggaggtagcggtggcggaggatctgaattcgacgacatcgtgctgacccagagccccgccagcctggccgtgagcctgggccagagcgtgaccatcagctgcagagccagcgagagcgtggagtactacggcaccagcctgatgcagtggtaccagcagaagcccggccagccccccaagctgctgatctacgccaccagcaacgtggagagcggcgtgcccgccagattcagcggcagcggcagcggcaccgacttcagcctgaacatccaccccgtggaggaggacgacatcgccatgtacttctgccagcagagcagaaagctgcccagcaccttcggcggcggcaccaagctggagatcaagctcgagatccagaaccctgatcctgccgtgtaccagctgcgggatagcaagagcagcgacaagagcgtgtgtctgttcaccgacttcgacagccagaccaacgtgtcccagagcaaggactccgacgtgtacatcaccgataagtgcgtgctggacatgcggagcatggacttcaagagcaactccgccgtggcctggtccaacaagtccgatttcgcctgcgccaacgccttcaacaacagcattatccccgaggacacattcttcccaagccccgagagcagctgcgacgtgaagctggtggaaaagagcttcgagacagacaccaacctgaacttccagatcctgtacgagatcctgctgggcaaggccaccctgtacgccgtgctggtgtctgccctggtgctgatggctatggtcaagcggaaggacagccggggacgcgccaagagaagcggatctggcgtgaagcagaccctgaatttcgacctgctgaagctggctggcgacgtggaatccaacccaggccctactagtatggactggatttggcgcatccttttccttgtcggcgctgctaccggcgcgcattccgggccccagctccagctgcaagagtctggacctggcctggtcaagcctagcgagacactgagcctgacctgtaccgtgtccggcgatagcatcagcagcggcgattactactggggctggatcagacagcctcctggcaaaggactggaatggatcggccacatctactacagcggcgtgacctactacaaccccagcctgaagtccagagtgaccatcagcgtggacaccagccggaaccagttctccctgaagctgtctagcgtgacagccgccgataccgccgtgtactactgcaccagagaggacagcagcaactggcggagtagaggccagggaacactggtcacagttagctctggatccggcggaggcggaagtggaggcggaggatctggcggcggaggctctttcgaagacgtgagactgcaggagagcggccccggccaggtgaagcccagccagaccgtgagcctgacctgcagcgtgaccggctacagcatcaccaacggcaaccactggtggaactggatcagacaggtgagcggcagcaagctggagtggatcggctacatcagcagcagcggcagcaccgacagcaaccccagcctgaagagcagaatcagcatcaccagagacaccagcaagaaccagctgttcctgcagctgaacagcgtgaccaccgaggacatcgccacctactactgcgccagaggctactacttcgactactggggccagggcaccaccctgaccgtgagcagcacgcgtgaggacctgaagaacgtgttcccacctgaggtggccgtgttcgagcctagcgaggccgagatcagccacacccagaaagccaccctcgtgtgcctggctaccggcttctaccccgaccatgtggaactgtcttggtgggtcaacggcaaagaggtgcacagcggcgtgtgtaccgacccccagccactgaaagaacagcccgccctgaacgacagccggtactgcctgagcagcagactgagagtgtccgccaccttctggcagaacccccggaaccacttcagatgccaggtgcagttctacggcctgagcgagaacgacgagtggacccaggacagagccaagcccgtgacccagatcgtgtctgccgaagcctggggcagagccgattgcggctttaccagcgagagctaccagcagggcgtgctgagcgccaccaacctgagcgtgatcggcttcagaatcctgctgctgaaagtggccggctttaacctgctgatgaccctgcggctgtggtccagc

SEQ ID NO: 5856 - DNA, 2688 bp, synthetic construct
  source 1..2688: mol_type = other DNA
atggccttaccagtgaccgccttgctcctgccgctggccttgctgctccacgccgccaggccggaagtgcagctggttgaatctggcggaggactggttcagcctggcggatctctgagactgtcttgtgccgccagcggcttcagcttcagcgacttttggatgagctgggtccgacaggcccctggcaaaggacttgaatgggtcgccacaatcagccaggccggcagcgagaaggactacgtggactctgtgaagggcagattcaccatcagccgggacaacgccaagaagtccctgtacctccagatgaacagcctgagagccgaggacaccgccgtgtactattgtgcctctggcgtgtacagcttcgactacagaggccagggcaccctggtcacagtctcttctggtaccggcggaggcggatctggcggcggaggtagcggtggcggaggatctgaattcgacatccagatgacccagagccccagcagcctgtctgccagcgtgggcgacagagtgaccatcacctgtagagccagccaggacgtgaacaccgccgtggcctggtatcagcagaagcctggcaaggcccccaagctgctgatctacagcgccagcttcctggaaagcggcgtgcccagcagattcagcggaagcagaagcggcaccgacttcaccctgaccatcagctccctccagcccgaggacttcgccacctactactgccagcagcactacaccacccctcccaccttcggccagaccaaggtggaaatcaagagactcgagatccagaaccctgatcctgccgtgtaccagctgcgggatagcaagagcagcgacaagagcgtgtgtctgttcaccgacttcgacagccagaccaacgtgtcccagagcaaggactccgacgtgtacatcaccgataagtgcgtgctggacatgcggagcatggacttcaagagcaactccgccgtggcctggtccaacaagtccgatttcgcctgcgccaacgccttcaacaacagcattatccccgaggacacattcttcccaagccccgagagcagctgcgacgtgaagctggtggaaaagagcttcgagacagacaccaacctgaacttccagatcctgtacgagatcctgctgggcaaggccaccctgtacgccgtgctggtgtctgccctggtgctgatggctatggtcaagcggaaggacagccggggacgcgccaagagaagcggatctggcgtgaagcagaccctgaatttcgacctgctgaagctggctggcgacgtggaatccaacccaggccctactagtatggactggatttggcgcatccttttccttgtcggcgctgctaccggcgcgcattccgggccccagctccagctgcaagagtctggacctggcctggtcaagcctagcgagacactgagcctgacctgtaccgtgtccggcgatagcatcagcagcggcgattactactggggctggatcagacagcctcctggcaaaggactggaatggatcggccacatctactacagcggcgtgacctactacaaccccagcctgaagtccagagtgaccatcagcgtggacaccagccggaaccagttctccctgaagctgtctagcgtgacagccgccgataccgccgtgtactactgcaccagagaggacagcagcaactggcggagtagaggccagggaacactggtcacagttagctctggatccggcggaggcggaagtggaggcggaggatctggcggcggaggctctttcgaagaagtgcaactggtggaatctggcggcggactggtgcagcctggcggatctctgagactgagctgtgccgccagcggcttcaacatcaaggacacctacatccactgggtgcgccaggcccctggaaagggactggaatgggtggcccggatctaccccaccaacggctacaccagatacgccgacagcgtgaagggccggttcaccatcagcgccgacaccagcaagaataccgcctacctccagatgaacagcctgcgggccgaggataccgccgtgtactactgctcaagatggggaggcgacggcttctacgctatggacgtgtggggccagggcacccttgtgaccgtgtcatctacgcgtgaggacctgaagaacgtgttcccacctgaggtggccgtgttcgagcctagcgaggccgagatcagccacacccagaaagccaccctcgtgtgcctggctaccggcttctaccccgaccatgtggaactgtcttggtgggtcaacggcaaagaggtgcacagcggcgtgtgtaccgacccccagccactgaaagaacagcccgccctgaacgacagccggtactgcctgagcagcagactgagagtgtccgccaccttctggcagaacccccggaaccacttcagatgccaggtgcagttctacggcctgagcgagaacgacgagtggacccaggacagagccaagcccgtgacccagatcgtgtctgccgaagcctggggcagagccgattgcggctttaccagcgagagctaccagcagggcgtgctgagcgccaccaacctgagcgtgatcggcttcagaatcctgctgctgaaagtggccggctttaacctgctgatgaccctgcggctgtggtccagc

SEQ ID NO: 5857 - DNA, 2685 bp, synthetic construct
  source 1..2685: mol_type = other DNA
atggccttaccagtgaccgccttgctcctgccgctggccttgctgctccacgccgccaggccggaagtgcagctggttgaatctggcggaggactggttcagcctggcggatctctgagactgtcttgtgccgccagcggcttcagcttcagcgacttttggatgagctgggtccgacaggcccctggcaaaggacttgaatgggtcgccacaatcagccaggccggcagcgagaaggactacgtggactctgtgaagggcagattcaccatcagccgggacaacgccaagaagtccctgtacctccagatgaacagcctgagagccgaggacaccgccgtgtactattgtgcctctggcgtgtacagcttcgactacagaggccagggcaccctggtcacagtctcttctggtaccggcggaggcggatctggcggcggaggtagcggtggcggaggatctgaattcgaccagagcgtgctgacacagcctcctagcgtgtcagtggcccctggcaagaccgccagaatcccctgcgagggcaactacatcggcagcagcaacgtgcactggtatcagcagaagcccggccaggctcccgtgctcgtgatccacttcgacagcgacagacccagcggcatccccgacagattcagcggcagcaacagcggcaacatggctaccctgaccatcagcagagtggaagccggggacgaggccgactactactgtcaagtgtgggagaaccacggctgggtgttcggcggaggcaccaagctgacagtgctgtctctcgagatccagaaccctgatcctgccgtgtaccagctgcgggatagcaagagcagcgacaagagcgtgtgtctgttcaccgacttcgacagccagaccaacgtgtcccagagcaaggactccgacgtgtacatcaccgataagtgcgtgctggacatgcggagcatggacttcaagagcaactccgccgtggcctggtccaacaagtccgatttcgcctgcgccaacgccttcaacaacagcattatccccgaggacacattcttcccaagccccgagagcagctgcgacgtgaagctggtggaaaagagcttcgagacagacaccaacctgaacttccagatcctgtacgagatcctgctgggcaaggccaccctgtacgccgtgctggtgtctgccctggtgctgatggctatggtcaagcggaaggacagccggggacgcgccaagagaagcggatctggcgtgaagcagaccctgaatttcgacctgctgaagctggctggcgacgtggaatccaacccaggccctactagtatggactggatttggcgcatccttttccttgtcggcgctgctaccggcgcgcattccgggccccagctccagctgcaagagtctggacctggcctggtcaagcctagcgagacactgagcctgacctgtaccgtgtccggcgatagcatcagcagcggcgattactactggggctggatcagacagcctcctggcaaaggactggaatggatcggccacatctactacagcggcgtgacctactacaaccccagcctgaagtccagagtgaccatcagcgtggacaccagccggaaccagttctccctgaagctgtctagcgtgacagccgccgataccgccgtgtactactgcaccagagaggacagcagcaactggcggagtagaggccagggaacactggtcacagttagctctggatccggcggaggcggaagtggaggcggaggatctggcggcggaggctctttcgaagaggtgcaactggtggaaacaggcggcggactggtgcagcctggcgagtctctgagactgagctgtgccgccagcggcttcaccttcagcgactacgagatgaactgggtgcgccaggcccctggaaagggcctggaatgggtgtcctacatcagcagctccggcagcaccatctactacgccgacagcgtgaagggccggtttaccatctaccgggacaacgccaagaacagcctgtacctccagatgaactccctgcgggccgaggacaccgccctgtactattgtgccagagcctggggcgtgggaccccctgattattggggacagggcaccctcgtgaccgtgtcctctacgcgtgaggacctgaagaacgtgttcccacctgaggtggccgtgttcgagcctagcgaggccgagatcagccacacccagaaagccaccctcgtgtgcctggctaccggcttctaccccgaccatgtggaactgtcttggtgggtcaacggcaaagaggtgcacagcggcgtgtgtaccgacccccagccactgaaagaacagcccgccctgaacgacagccggtactgcctgagcagcagactgagagtgtccgccaccttctggcagaacccccggaaccacttcagatgccaggtgcagttctacggcctgagcgagaacgacgagtggacccaggacagagccaagcccgtgacccagatcgtgtctgccgaagcctggggcagagccgattgcggctttaccagcgagagctaccagcagggcgtgctgagcgccaccaacctgagcgtgatcggcttcagaatcctgctgctgaaagtggccggctttaacctgctgatgaccctgcggctgtggtccagc

SEQ ID NO: 5858 - DNA, 2709 bp, synthetic construct
  source 1..2709: mol_type = other DNA
atggccttaccagtgaccgccttgctcctgccgctggccttgctgctccacgccgccaggccggaagtgcagctggttgaatctggcggaggactggttcagcctggcggatctctgagactgtcttgtgccgccagcggcttcagcttcagcgacttttggatgagctgggtccgacaggcccctggcaaaggacttgaatgggtcgccacaatcagccaggccggcagcgagaaggactacgtggactctgtgaagggcagattcaccatcagccgggacaacgccaagaagtccctgtacctccagatgaacagcctgagagccgaggacaccgccgtgtactattgtgcctctggcgtgtacagcttcgactacagaggccagggcaccctggtcacagtctcttctggtaccggcggaggcggatctggcggcggaggtagcggtggcggaggatctgaattcgacatccagatgacccagagccccagcagcctgtctgccagcgtgggcgataccgtgaccatcacctgtcaggccaacggctacctgaactggtatcagcagcggagaggcaaggcccccaagctgctgatctacgacggcagcaagctggaaagaggcgtgcccagcagattcagcggcagaagatggggccaggagtacaacctgaccatcaacaacctccagcccgaggatattgccacatacttttgccaggtgtacgagttcgtggtgcccggcacacggctggacctgaagagaacagtggctgctcctctcgagatccagaaccctgatcctgccgtgtaccagctgcgggatagcaagagcagcgacaagagcgtgtgtctgttcaccgacttcgacagccagaccaacgtgtcccagagcaaggactccgacgtgtacatcaccgataagtgcgtgctggacatgcggagcatggacttcaagagcaactccgccgtggcctggtccaacaagtccgatttcgcctgcgccaacgccttcaacaacagcattatccccgaggacacattcttcccaagccccgagagcagctgcgacgtgaagctggtggaaaagagcttcgagacagacaccaacctgaacttccagatcctgtacgagatcctgctgggcaaggccaccctgtacgccgtgctggtgtctgccctggtgctgatggctatggtcaagcggaaggacagccggggacgcgccaagagaagcggatctggcgtgaagcagaccctgaatttcgacctgctgaagctggctggcgacgtggaatccaacccaggccctactagtatggactggatttggcgcatccttttccttgtcggcgctgctaccggcgcgcattccgggccccagctccagctgcaagagtctggacctggcctggtcaagcctagcgagacactgagcctgacctgtaccgtgtccggcgatagcatcagcagcggcgattactactggggctggatcagacagcctcctggcaaaggactggaatggatcggccacatctactacagcggcgtgacctactacaaccccagcctgaagtccagagtgaccatcagcgtggacaccagccggaaccagttctccctgaagctgtctagcgtgacagccgccgataccgccgtgtactactgcaccagagaggacagcagcaactggcggagtagaggccagggaacactggtcacagttagctctggatccggcggaggcggaagtggaggcggaggatctggcggcggaggctctttcgaacaggtgcagctgctccagtctggcgctgccgtgacaaagcctggcgcttctgtgcgggtgtcctgtgaagccagcggctacaacatccgggactacttcatccactggtggcggcaggctccaggccagggactccagtgggtgggatggatcaaccccaagaccggccagcccaacaaccccagacagttccagggcagagtgtccctgaccagacacgccagctgggacttcgacaccttcagcttctacatggatctgaaggccctgcggagcgacgataccgccgtgtacttctgcgccagacagagaagcgactactgggatttcgacgtgtggggcagcggcacccaagtgacagtgtctagcgccagcaccaagggacccacgcgtgaggacctgaagaacgtgttcccacctgaggtggccgtgttcgagcctagcgaggccgagatcagccacacccagaaagccaccctcgtgtgcctggctaccggcttctaccccgaccatgtggaactgtcttggtgggtcaacggcaaagaggtgcacagcggcgtgtgtaccgacccccagccactgaaagaacagcccgccctgaacgacagccggtactgcctgagcagcagactgagagtgtccgccaccttctggcagaacccccggaaccacttcagatgccaggtgcagttctacggcctgagcgagaacgacgagtggacccaggacagagccaagcccgtgacccagatcgtgtctgccgaagcctggggcagagccgattgcggctttaccagcgagagctaccagcagggcgtgctgagcgccaccaacctgagcgtgatcggcttcagaatcctgctgctgaaagtggccggctttaacctgctgatgaccctgcggctgtggtccagc

SEQ ID NO: 5859 - DNA, 2727 bp, synthetic construct
  source 1..2727: mol_type = other DNA
atggccttaccagtgaccgccttgctcctgccgctggccttgctgctccacgccgccaggccggaagtgcagctggttgaatctggcggaggactggttcagcctggcggatctctgagactgtcttgtgccgccagcggcttcagcttcagcgacttttggatgagctgggtccgacaggcccctggcaaaggacttgaatgggtcgccacaatcagccaggccggcagcgagaaggactacgtggactctgtgaagggcagattcaccatcagccgggacaacgccaagaagtccctgtacctccagatgaacagcctgagagccgaggacaccgccgtgtactattgtgcctctggcgtgtacagcttcgactacagaggccagggcaccctggtcacagtctcttctggtaccggcggaggcggatctggcggcggaggtagcggtggcggaggatctgaattccagtctgccctgacacagcctcctagcgcctctggctctcccggccagagcatcaccatcagctgtaccggcaccagcaacaacttcgtgtcctggtatcagcagcacgccggcaaggcccccaagctcgtgatctacgacgtgaacaagcggcccagcggcgtgcccgatagattcagcggcagcaagagcggcaacaccgccagcctgacagtgtctggcctccagaccgatgacgaggccgtgtactactgcggcagcctcgtgggcaactgggacgtgatctttggcggaggcaccaagctgaccgtgctgctcgagatccagaaccctgatcctgccgtgtaccagctgcgggatagcaagagcagcgacaagagcgtgtgtctgttcaccgacttcgacagccagaccaacgtgtcccagagcaaggactccgacgtgtacatcaccgataagtgcgtgctggacatgcggagcatggacttcaagagcaactccgccgtggcctggtccaacaagtccgatttcgcctgcgccaacgccttcaacaacagcattatccccgaggacacattcttcccaagccccgagagcagctgcgacgtgaagctggtggaaaagagcttcgagacagacaccaacctgaacttccagatcctgtacgagatcctgctgggcaaggccaccctgtacgccgtgctggtgtctgccctggtgctgatggctatggtcaagcggaaggacagccggggacgcgccaagagaagcggatctggcgtgaagcagaccctgaatttcgacctgctgaagctggctggcgacgtggaatccaacccaggccctactagtatggactggatttggcgcatccttttccttgtcggcgctgctaccggcgcgcattccgggccccagctccagctgcaagagtctggacctggcctggtcaagcctagcgagacactgagcctgacctgtaccgtgtccggcgatagcatcagcagcggcgattactactggggctggatcagacagcctcctggcaaaggactggaatggatcggccacatctactacagcggcgtgacctactacaaccccagcctgaagtccagagtgaccatcagcgtggacaccagccggaaccagttctccctgaagctgtctagcgtgacagccgccgataccgccgtgtactactgcaccagagaggacagcagcaactggcggagtagaggccagggaacactggtcacagttagctctggatccggcggaggcggaagtggaggcggaggatctggcggcggaggctctttcgaacagccccagctccaggaatctggccccacactggtggaagccagcgagacactgagcctgacctgtgccgtgtccggcgattctaccgccgcctgcaatagcttctggggctgggtgcgccagcctcctggaaagggactggaatgggtgggaagcctgagccactgcgccagctattggaaccggggctggacctaccacaaccccagcctgaagtccagactgaccctggccctggacacccccaagaacctggtgttcctgaagctgaacagcgtgacagccgccgacaccgccacctactactgtgccagatttggcggcgaggtgctgcggtacaccgactggcctaaacctgcctgggtggacctgtggggcagaggaacactcgtgaccgtgtccagcacgcgtgaggacctgaagaacgtgttcccacctgaggtggccgtgttcgagcctagcgaggccgagatcagccacacccagaaagccaccctcgtgtgcctggctaccggcttctaccccgaccatgtggaactgtcttggtgggtcaacggcaaagaggtgcacagcggcgtgtgtaccgacccccagccactgaaagaacagcccgccctgaacgacagccggtactgcctgagcagcagactgagagtgtccgccaccttctggcagaacccccggaaccacttcagatgccaggtgcagttctacggcctgagcgagaacgacgagtggacccaggacagagccaagcccgtgacccagatcgtgtctgccgaagcctggggcagagccgattgcggctttaccagcgagagctaccagcagggcgtgctgagcgccaccaacctgagcgtgatcggcttcagaatcctgctgctgaaagtggccggctttaacctgctgatgaccctgcggctgtggtccagc

SEQ ID NO: 5860 - DNA, 2682 bp, synthetic construct
  source 1..2682: mol_type = other DNA
atggccttaccagtgaccgccttgctcctgccgctggccttgctgctccacgccgccaggccggaagtgcagctggttgaatctggcggaggactggttcagcctggcggatctctgagactgtcttgtgccgccagcggcttcagcttcagcgacttttggatgagctgggtccgacaggcccctggcaaaggacttgaatgggtcgccacaatcagccaggccggcagcgagaaggactacgtggactctgtgaagggcagattcaccatcagccgggacaacgccaagaagtccctgtacctccagatgaacagcctgagagccgaggacaccgccgtgtactattgtgcctctggcgtgtacagcttcgactacagaggccagggcaccctggtcacagtctcttctggtaccggcggaggcggatctggcggcggaggtagcggtggcggaggatctgaattcgagatcgtgctgacacagagccctggcaccctgagcctgtctccaggcgagacagccatcatcagctgccggacaagccagtacggcagcctggcctggtatcagcagaggccaggacaggcccccagactcgtgatctacagcggcagcacaagagccgccggaatccccgatagattcagcggctccagatggggacccgactacaacctgaccatcagcaacctggaaagcggcgacttcggcgtgtactactgccagcagtacgagttcttcggccagggcaccaaggtgcaggtggacatcaaaagactcgagatccagaaccctgatcctgccgtgtaccagctgcgggatagcaagagcagcgacaagagcgtgtgtctgttcaccgacttcgacagccagaccaacgtgtcccagagcaaggactccgacgtgtacatcaccgataagtgcgtgctggacatgcggagcatggacttcaagagcaactccgccgtggcctggtccaacaagtccgatttcgcctgcgccaacgccttcaacaacagcattatccccgaggacacattcttcccaagccccgagagcagctgcgacgtgaagctggtggaaaagagcttcgagacagacaccaacctgaacttccagatcctgtacgagatcctgctgggcaaggccaccctgtacgccgtgctggtgtctgccctggtgctgatggctatggtcaagcggaaggacagccggggacgcgccaagagaagcggatctggcgtgaagcagaccctgaatttcgacctgctgaagctggctggcgacgtggaatccaacccaggccctactagtatggactggatttggcgcatccttttccttgtcggcgctgctaccggcgcgcattccgggccccagctccagctgcaagagtctggacctggcctggtcaagcctagcgagacactgagcctgacctgtaccgtgtccggcgatagcatcagcagcggcgattactactggggctggatcagacagcctcctggcaaaggactggaatggatcggccacatctactacagcggcgtgacctactacaaccccagcctgaagtccagagtgaccatcagcgtggacaccagccggaaccagttctccctgaagctgtctagcgtgacagccgccgataccgccgtgtactactgcaccagagaggacagcagcaactggcggagtagaggccagggaacactggtcacagttagctctggatccggcggaggcggaagtggaggcggaggatctggcggcggaggctctttcgaacaggtgcagctggtgcagtctggcggccagatgaagaaacccggcgagagcatgagaatcagctgtcgggcctccggctacgagttcatcgactgcaccctgaactggatcagactggcccctggcaagcggcctgagtggatgggatggctgaagcctagaggcggagccgtgaactacgccagacctctccagggcagagtgaccatgaccagggacgtgtacagcgataccgccttcctggaactgcggagcctgaccgtggatgataccgccgtgtacttctgcaccagaggcaagaactgcgattacaactgggacttcgagcactggggcagaggcacccctgtgatcgtgtctagcacgcgtgaggacctgaagaacgtgttcccacctgaggtggccgtgttcgagcctagcgaggccgagatcagccacacccagaaagccaccctcgtgtgcctggctaccggcttctaccccgaccatgtggaactgtcttggtgggtcaacggcaaagaggtgcacagcggcgtgtgtaccgacccccagccactgaaagaacagcccgccctgaacgacagccggtactgcctgagcagcagactgagagtgtccgccaccttctggcagaacccccggaaccacttcagatgccaggtgcagttctacggcctgagcgagaacgacgagtggacccaggacagagccaagcccgtgacccagatcgtgtctgccgaagcctggggcagagccgattgcggctttaccagcgagagctaccagcagggcgtgctgagcgccaccaacctgagcgtgatcggcttcagaatcctgctgctgaaagtggccggctttaacctgctgatgaccctgcggctgtggtccagc

SEQ ID NO: 5861 - DNA, 2712 bp, synthetic construct
  source 1..2712: mol_type = other DNA
atggccttaccagtgaccgccttgctcctgccgctggccttgctgctccacgccgccaggccggaagtgcagctggttgaatctggcggaggactggttcagcctggcggatctctgagactgtcttgtgccgccagcggcttcagcttcagcgacttttggatgagctgggtccgacaggcccctggcaaaggacttgaatgggtcgccacaatcagccaggccggcagcgagaaggactacgtggactctgtgaagggcagattcaccatcagccgggacaacgccaagaagtccctgtacctccagatgaacagcctgagagccgaggacaccgccgtgtactattgtgcctctggcgtgtacagcttcgactacagaggccagggcaccctggtcacagtctcttctggtaccggcggaggcggatctggcggcggaggtagcggtggcggaggatctgaattcgagctggtgctgacacagagccctggcaccctgtctctgtctgccggcgaaagagccaccctgagctgtagagccagccagagcgtgtcctctggcagcctggcttggtatcagcagaagccaggccaggcccccagactgctgatctacggcgcttctaccagagccaccggcatccccgatagattcagcggctctggctccggcaccgacttcaccctgacaatcggcagactggaacccgaggacctggccgtgtactactgccagcagtacggcaccagcccctacacattcggccagggcaccaagctggaaatcctcgagatccagaaccctgatcctgccgtgtaccagctgcgggatagcaagagcagcgacaagagcgtgtgtctgttcaccgacttcgacagccagaccaacgtgtcccagagcaaggactccgacgtgtacatcaccgataagtgcgtgctggacatgcggagcatggacttcaagagcaactccgccgtggcctggtccaacaagtccgatttcgcctgcgccaacgccttcaacaacagcattatccccgaggacacattcttcccaagccccgagagcagctgcgacgtgaagctggtggaaaagagcttcgagacagacaccaacctgaacttccagatcctgtacgagatcctgctgggcaaggccaccctgtacgccgtgctggtgtctgccctggtgctgatggctatggtcaagcggaaggacagccggggacgcgccaagagaagcggatctggcgtgaagcagaccctgaatttcgacctgctgaagctggctggcgacgtggaatccaacccaggccctactagtatggactggatttggcgcatccttttccttgtcggcgctgctaccggcgcgcattccgggccccagctccagctgcaagagtctggacctggcctggtcaagcctagcgagacactgagcctgacctgtaccgtgtccggcgatagcatcagcagcggcgattactactggggctggatcagacagcctcctggcaaaggactggaatggatcggccacatctactacagcggcgtgacctactacaaccccagcctgaagtccagagtgaccatcagcgtggacaccagccggaaccagttctccctgaagctgtctagcgtgacagccgccgataccgccgtgtactactgcaccagagaggacagcagcaactggcggagtagaggccagggaacactggtcacagttagctctggatccggcggaggcggaagtggaggcggaggatctggcggcggaggctctttcgaactggaacagagcggagccgaagtgaagaaacccggcagcagcgtgcaggtgtcctgcaaagcaagcggcggcaccttctctatgtacggcttcaactgggtgcgccaggctcctggacacggcctggaatggatgggcggcatcatccccatcttcggcacctccaactacgcccagaaattccggggcagagtgaccttcaccgccgaccaggccacaagcaccgcctacatggaactgaccaacctgcggagcgacgacaccgccgtgtattattgcgccagagacttcggccccgactgggaggatggcgacagctacgatggcagcggcagaggcttcttcgacttctggggccagggaacccttgtgaccgtgtcctcaacgcgtgaggacctgaagaacgtgttcccacctgaggtggccgtgttcgagcctagcgaggccgagatcagccacacccagaaagccaccctcgtgtgcctggctaccggcttctaccccgaccatgtggaactgtcttggtgggtcaacggcaaagaggtgcacagcggcgtgtgtaccgacccccagccactgaaagaacagcccgccctgaacgacagccggtactgcctgagcagcagactgagagtgtccgccaccttctggcagaacccccggaaccacttcagatgccaggtgcagttctacggcctgagcgagaacgacgagtggacccaggacagagccaagcccgtgacccagatcgtgtctgccgaagcctggggcagagccgattgcggctttaccagcgagagctaccagcagggcgtgctgagcgccaccaacctgagcgtgatcggcttcagaatcctgctgctgaaagtggccggctttaacctgctgatgaccctgcggctgtggtccagc

SEQ ID NO: 5862 - DNA, 2652 bp, synthetic construct
  source 1..2652: mol_type = other DNA
atggccttaccagtgaccgccttgctcctgccgctggccttgctgctccacgccgccaggccggaagtgcagctggttgaatctggcggaggactggttcagcctggcggatctctgagactgtcttgtgccgccagcggcttcagcttcagcgacttttggatgagctgggtccgacaggcccctggcaaaggacttgaatgggtcgccacaatcagccaggccggcagcgagaaggactacgtggactctgtgaagggcagattcaccatcagccgggacaacgccaagaagtccctgtacctccagatgaacagcctgagagccgaggacaccgccgtgtactattgtgcctctggcgtgtacagcttcgactacagaggccagggcaccctggtcacagtctcttctggtaccggcggaggcggatctggcggcggaggtagcggtggcggaggatctgaattcgacatccagatgacccagagccccagcagcctgtctgccagcgtgggcgacagagtgaccatcacctgtcaggccagccaggacatcaacaactacctgaactggtatcagcagaagcccggcaaggcccccaagctgctgatctacgacgccagcaatctgcagaccggcgtgcccagcagattttccggctctggcagcggcaccgacttcaccttcaccatcgaggacattgccacctactactgccagcagtacaccttcggccctggcaccaaggtggacatcaaactcgagatccagaaccctgatcctgccgtgtaccagctgcgggatagcaagagcagcgacaagagcgtgtgtctgttcaccgacttcgacagccagaccaacgtgtcccagagcaaggactccgacgtgtacatcaccgataagtgcgtgctggacatgcggagcatggacttcaagagcaactccgccgtggcctggtccaacaagtccgatttcgcctgcgccaacgccttcaacaacagcattatccccgaggacacattcttcccaagccccgagagcagctgcgacgtgaagctggtggaaaagagcttcgagacagacaccaacctgaacttccagatcctgtacgagatcctgctgggcaaggccaccctgtacgccgtgctggtgtctgccctggtgctgatggctatggtcaagcggaaggacagccggggacgcgccaagagaagcggatctggcgtgaagcagaccctgaatttcgacctgctgaagctggctggcgacgtggaatccaacccaggccctactagtatggactggatttggcgcatccttttccttgtcggcgctgctaccggcgcgcattccgggccccagctccagctgcaagagtctggacctggcctggtcaagcctagcgagacactgagcctgacctgtaccgtgtccggcgatagcatcagcagcggcgattactactggggctggatcagacagcctcctggcaaaggactggaatggatcggccacatctactacagcggcgtgacctactacaaccccagcctgaagtccagagtgaccatcagcgtggacaccagccggaaccagttctccctgaagctgtctagcgtgacagccgccgataccgccgtgtactactgcaccagagaggacagcagcaactggcggagtagaggccagggaacactggtcacagttagctctggatccggcggaggcggaagtggaggcggaggatctggcggcggaggctctttcgaagaagtgcaactgctggaatctggcggcggactggtgcagcctggcggatctctgagactgagctgtgccgccagcggcttcacctttagctggtacagcatgacctgggtgcgccaggcccctggcaaaggactggaatgggtgtccagcatcgtgccctggggcgatttcacccagtacgccgatagcgtgaagggccggttcaccatcagccgggacaacagcaagaacaccctgtacctgcagatgaacagcctgcgggccgaggacaccgccgtgtactattgtgccaagggacctggctggggcagcttcgatctgtggggcagaggaacccttgtgaccgtgtccagcacgcgtgaggacctgaagaacgtgttcccacctgaggtggccgtgttcgagcctagcgaggccgagatcagccacacccagaaagccaccctcgtgtgcctggctaccggcttctaccccgaccatgtggaactgtcttggtgggtcaacggcaaagaggtgcacagcggcgtgtgtaccgacccccagccactgaaagaacagcccgccctgaacgacagccggtactgcctgagcagcagactgagagtgtccgccaccttctggcagaacccccggaaccacttcagatgccaggtgcagttctacggcctgagcgagaacgacgagtggacccaggacagagccaagcccgtgacccagatcgtgtctgccgaagcctggggcagagccgattgcggctttaccagcgagagctaccagcagggcgtgctgagcgccaccaacctgagcgtgatcggcttcagaatcctgctgctgaaagtggccggctttaacctgctgatgaccctgcggctgtggtccagc

SEQ ID NO: 5863 - DNA, 2682 bp, synthetic construct
  source 1..2682: mol_type = other DNA
atggccttaccagtgaccgccttgctcctgccgctggccttgctgctccacgccgccaggccggaagtgcagctggttgaatctggcggaggactggttcagcctggcggatctctgagactgtcttgtgccgccagcggcttcagcttcagcgacttttggatgagctgggtccgacaggcccctggcaaaggacttgaatgggtcgccacaatcagccaggccggcagcgagaaggactacgtggactctgtgaagggcagattcaccatcagccgggacaacgccaagaagtccctgtacctccagatgaacagcctgagagccgaggacaccgccgtgtactattgtgcctctggcgtgtacagcttcgactacagaggccagggcaccctggtcacagtctcttctggtaccggcggaggcggatctggcggcggaggtagcggtggcggaggatctgaattcgacatccagatgacccagagccccagcagcctgtctgccagcgtgggcgacagagtgaccatcacctgtaccgccagcctgagcgtgtccagcacctacctgcactggtatcagcagaagcccggcagcagccccaagctgtggatctacagcaccagcaacctggcctccggcgtgcccagcagattttctggcagcggctctggcaccagctacaccctgaccatcagctccctccagcccgaggacttcgccacctactactgccaccagtaccacagaagccccctgacctttggcggaggcaccaaggtggaaatcaagagactcgagatccagaaccctgatcctgccgtgtaccagctgcgggatagcaagagcagcgacaagagcgtgtgtctgttcaccgacttcgacagccagaccaacgtgtcccagagcaaggactccgacgtgtacatcaccgataagtgcgtgctggacatgcggagcatggacttcaagagcaactccgccgtggcctggtccaacaagtccgatttcgcctgcgccaacgccttcaacaacagcattatccccgaggacacattcttcccaagccccgagagcagctgcgacgtgaagctggtggaaaagagcttcgagacagacaccaacctgaacttccagatcctgtacgagatcctgctgggcaaggccaccctgtacgccgtgctggtgtctgccctggtgctgatggctatggtcaagcggaaggacagccggggacgcgccaagagaagcggatctggcgtgaagcagaccctgaatttcgacctgctgaagctggctggcgacgtggaatccaacccaggccctactagtatggactggatttggcgcatccttttccttgtcggcgctgctaccggcgcgcattccgggccccagctccagctgcaagagtctggacctggcctggtcaagcctagcgagacactgagcctgacctgtaccgtgtccggcgatagcatcagcagcggcgattactactggggctggatcagacagcctcctggcaaaggactggaatggatcggccacatctactacagcggcgtgacctactacaaccccagcctgaagtccagagtgaccatcagcgtggacaccagccggaaccagttctccctgaagctgtctagcgtgacagccgccgataccgccgtgtactactgcaccagagaggacagcagcaactggcggagtagaggccagggaacactggtcacagttagctctggatccggcggaggcggaagtggaggcggaggatctggcggcggaggctctttcgaagaagtgcaactggtggaatctggcggcggactggtgcagcctggcggatctctgagactgagctgtgccgccagcggcttcagcctgaccaaatacggcgtgcactgggtgcgccaggcccctggaaaaggactggaatgggtgggagtgaagtgggctggcggctccaccgactacaacagcgccctgatgagccggttcaccatcagcaaggacaacgccaagaacagcctgtacctccagatgaactccctgcgggccgaggacaccgccgtgtactactgtgccagagatcaccgggacgctatggactactggggccagggaacactcgtgaccgtgtcctctacgcgtgaggacctgaagaacgtgttcccacctgaggtggccgtgttcgagcctagcgaggccgagatcagccacacccagaaagccaccctcgtgtgcctggctaccggcttctaccccgaccatgtggaactgtcttggtgggtcaacggcaaagaggtgcacagcggcgtgtgtaccgacccccagccactgaaagaacagcccgccctgaacgacagccggtactgcctgagcagcagactgagagtgtccgccaccttctggcagaacccccggaaccacttcagatgccaggtgcagttctacggcctgagcgagaacgacgagtggacccaggacagagccaagcccgtgacccagatcgtgtctgccgaagcctggggcagagccgattgcggctttaccagcgagagctaccagcagggcgtgctgagcgccaccaacctgagcgtgatcggcttcagaatcctgctgctgaaagtggccggctttaacctgctgatgaccctgcggctgtggtccagc

SEQ ID NO: 5864 - DNA, 2694 bp, synthetic construct
  source 1..2694: mol_type = other DNA
atggccttaccagtgaccgccttgctcctgccgctggccttgctgctccacgccgccaggccggaagtgcagctggttgaatctggcggaggactggttcagcctggcggatctctgagactgtcttgtgccgccagcggcttcagcttcagcgacttttggatgagctgggtccgacaggcccctggcaaaggacttgaatgggtcgccacaatcagccaggccggcagcgagaaggactacgtggactctgtgaagggcagattcaccatcagccgggacaacgccaagaagtccctgtacctccagatgaacagcctgagagccgaggacaccgccgtgtactattgtgcctctggcgtgtacagcttcgactacagaggccagggcaccctggtcacagtctcttctggtaccggcggaggcggatctggcggcggaggtagcggtggcggaggatctgaattcgacatccagatgacccagagccccagcagcctgtctgccagcgtgggcgacagagtgaccatcacatgcaaggccagccaggacgtgggaacagccgtggcctggtatcagcagaagcctggcaaggcccccaagctgctgatctacagcgccagctacagatccaccggcgtgcccagcagattttccggctctggcagcggcaccgacttcaccctgaccatctctagcctccagcccgaggacttcgccacctactactgccagcaccactactccgccccctggacatttggcggaggcaccaaggtggaaatcaagctcgagatccagaaccctgatcctgccgtgtaccagctgcgggatagcaagagcagcgacaagagcgtgtgtctgttcaccgacttcgacagccagaccaacgtgtcccagagcaaggactccgacgtgtacatcaccgataagtgcgtgctggacatgcggagcatggacttcaagagcaactccgccgtggcctggtccaacaagtccgatttcgcctgcgccaacgccttcaacaacagcattatccccgaggacacattcttcccaagccccgagagcagctgcgacgtgaagctggtggaaaagagcttcgagacagacaccaacctgaacttccagatcctgtacgagatcctgctgggcaaggccaccctgtacgccgtgctggtgtctgccctggtgctgatggctatggtcaagcggaaggacagccggggacgcgccaagagaagcggatctggcgtgaagcagaccctgaatttcgacctgctgaagctggctggcgacgtggaatccaacccaggccctactagtatggactggatttggcgcatccttttccttgtcggcgctgctaccggcgcgcattccgggccccagctccagctgcaagagtctggacctggcctggtcaagcctagcgagacactgagcctgacctgtaccgtgtccggcgatagcatcagcagcggcgattactactggggctggatcagacagcctcctggcaaaggactggaatggatcggccacatctactacagcggcgtgacctactacaaccccagcctgaagtccagagtgaccatcagcgtggacaccagccggaaccagttctccctgaagctgtctagcgtgacagccgccgataccgccgtgtactactgcaccagagaggacagcagcaactggcggagtagaggccagggaacactggtcacagttagctctggatccggcggaggcggaagtggaggcggaggatctggcggcggaggctctttcgaagaagtgcaactggtggaatcaggcggcggactggtgcagcctggcggatctctgagactgagctgtgccgccagcggcttcaccttcagcagaaacggcatgagctgggtgcgccaggcccctggaaaaggactggaatgggtggcaaccgtgtccagcggcggcagctacatctactacgccgacagcgtgaagggccggttcaccatctccagagacaacgccaagaacagcctgtacctccagatgaactccctgcgggccgaggacaccgccgtgtactattgtgccagacagggcaccaccgccctggctaccagattcttcgatgtgtggggccagggcaccctcgtgaccgtgtcatctacgcgtgaggacctgaagaacgtgttcccacctgaggtggccgtgttcgagcctagcgaggccgagatcagccacacccagaaagccaccctcgtgtgcctggctaccggcttctaccccgaccatgtggaactgtcttggtgggtcaacggcaaagaggtgcacagcggcgtgtgtaccgacccccagccactgaaagaacagcccgccctgaacgacagccggtactgcctgagcagcagactgagagtgtccgccaccttctggcagaacccccggaaccacttcagatgccaggtgcagttctacggcctgagcgagaacgacgagtggacccaggacagagccaagcccgtgacccagatcgtgtctgccgaagcctggggcagagccgattgcggctttaccagcgagagctaccagcagggcgtgctgagcgccaccaacctgagcgtgatcggcttcagaatcctgctgctgaaagtggccggctttaacctgctgatgaccctgcggctgtggtccagc

SEQ ID NO: 5865 - DNA, 2682 bp, synthetic construct
  source 1..2682: mol_type = other DNA
atggccttaccagtgaccgccttgctcctgccgctggccttgctgctccacgccgccaggccggaagtgcagctggttgaatctggcggaggactggttcagcctggcggatctctgagactgtcttgtgccgccagcggcttcagcttcagcgacttttggatgagctgggtccgacaggcccctggcaaaggacttgaatgggtcgccacaatcagccaggccggcagcgagaaggactacgtggactctgtgaagggcagattcaccatcagccgggacaacgccaagaagtccctgtacctccagatgaacagcctgagagccgaggacaccgccgtgtactattgtgcctctggcgtgtacagcttcgactacagaggccagggcaccctggtcacagtctcttctggtaccggcggaggcggatctggcggcggaggtagcggtggcggaggatctgaattcgacatccagatgacccagagcccccctagcctgtctgcctctgtgggcggcaaagtgaccatcacatgcaaggccagccaggacatcgaccgctacatggcctggtatcaggacaagcccggcaagggacccaagctgctgatccacgataccagcaccctccagcccggcatccccagcagattttctggcagcggctccggcagagactacagcttcagcatcagcaacctggaacccgaggacattgccacctactactgcctccagtacgacaacctgtggaccttcggcggaggcaccaagctggaaatcaagagactcgagatccagaaccctgatcctgccgtgtaccagctgcgggatagcaagagcagcgacaagagcgtgtgtctgttcaccgacttcgacagccagaccaacgtgtcccagagcaaggactccgacgtgtacatcaccgataagtgcgtgctggacatgcggagcatggacttcaagagcaactccgccgtggcctggtccaacaagtccgatttcgcctgcgccaacgccttcaacaacagcattatccccgaggacacattcttcccaagccccgagagcagctgcgacgtgaagctggtggaaaagagcttcgagacagacaccaacctgaacttccagatcctgtacgagatcctgctgggcaaggccaccctgtacgccgtgctggtgtctgccctggtgctgatggctatggtcaagcggaaggacagccggggacgcgccaagagaagcggatctggcgtgaagcagaccctgaatttcgacctgctgaagctggctggcgacgtggaatccaacccaggccctactagtatggactggatttggcgcatccttttccttgtcggcgctgctaccggcgcgcattccgggccccagctccagctgcaagagtctggacctggcctggtcaagcctagcgagacactgagcctgacctgtaccgtgtccggcgatagcatcagcagcggcgattactactggggctggatcagacagcctcctggcaaaggactggaatggatcggccacatctactacagcggcgtgacctactacaaccccagcctgaagtccagagtgaccatcagcgtggacaccagccggaaccagttctccctgaagctgtctagcgtgacagccgccgataccgccgtgtactactgcaccagagaggacagcagcaactggcggagtagaggccagggaacactggtcacagttagctctggatccggcggaggcggaagtggaggcggaggatctggcggcggaggctctttcgaacaggtgcaactggtgcagagcggagccgagcttgtgaagcctggcgcttccgtgaagatgagctgcaaagccagcggctacatcttcaccaactacaacatccactgggtcaagaagtccccaggccagggcctggaatggatcggagccatctaccccggaaacggcgacgccccttacagccagaagttccaggacagagccaccctgaccgccgacaccagcagcagcaccacctacatggaactgagcagcctgaccagcgaggacagcgccgtgtactattgcgtgcgggccaactgggatgtggccttcgcctattggggccagggcacactggtgtccgtgtcctctacgcgtgaggacctgaagaacgtgttcccacctgaggtggccgtgttcgagcctagcgaggccgagatcagccacacccagaaagccaccctcgtgtgcctggctaccggcttctaccccgaccatgtggaactgtcttggtgggtcaacggcaaagaggtgcacagcggcgtgtgtaccgacccccagccactgaaagaacagcccgccctgaacgacagccggtactgcctgagcagcagactgagagtgtccgccaccttctggcagaacccccggaaccacttcagatgccaggtgcagttctacggcctgagcgagaacgacgagtggacccaggacagagccaagcccgtgacccagatcgtgtctgccgaagcctggggcagagccgattgcggctttaccagcgagagctaccagcagggcgtgctgagcgccaccaacctgagcgtgatcggcttcagaatcctgctgctgaaagtggccggctttaacctgctgatgaccctgcggctgtggtccagc

SEQ ID NO: 5866 - DNA, 2685 bp, synthetic construct
  source 1..2685: mol_type = other DNA
atggccttaccagtgaccgccttgctcctgccgctggccttgctgctccacgccgccaggccggaagtgcagctggttgaatctggcggaggactggttcagcctggcggatctctgagactgtcttgtgccgccagcggcttcagcttcagcgacttttggatgagctgggtccgacaggcccctggcaaaggacttgaatgggtcgccacaatcagccaggccggcagcgagaaggactacgtggactctgtgaagggcagattcaccatcagccgggacaacgccaagaagtccctgtacctccagatgaacagcctgagagccgaggacaccgccgtgtactattgtgcctctggcgtgtacagcttcgactacagaggccagggcaccctggtcacagtctcttctggtaccggcggaggcggatctggcggcggaggtagcggtggcggaggatctgaattcgacatccagatgacccagagccctgccagcctgtctgcctctgtgggcgagacagtgaccatcacctgtcgggtgtccggcaacatccacaactacctggcctggtatcagcagaagcagggcaagagcccccaactgctggtgtacaacgccaagaccctggccgatggcgtgcccagcagattttctggctctggcagcggcacccagtacagcctgaagatcaacagcctccagcccgaggacttcggcagctactactgccagcacttctggtccaacccctacaccttcggcggaggcaccaagctggaaatcaagctcgagatccagaaccctgatcctgccgtgtaccagctgcgggatagcaagagcagcgacaagagcgtgtgtctgttcaccgacttcgacagccagaccaacgtgtcccagagcaaggactccgacgtgtacatcaccgataagtgcgtgctggacatgcggagcatggacttcaagagcaactccgccgtggcctggtccaacaagtccgatttcgcctgcgccaacgccttcaacaacagcattatccccgaggacacattcttcccaagccccgagagcagctgcgacgtgaagctggtggaaaagagcttcgagacagacaccaacctgaacttccagatcctgtacgagatcctgctgggcaaggccaccctgtacgccgtgctggtgtctgccctggtgctgatggctatggtcaagcggaaggacagccggggacgcgccaagagaagcggatctggcgtgaagcagaccctgaatttcgacctgctgaagctggctggcgacgtggaatccaacccaggccctactagtatggactggatttggcgcatccttttccttgtcggcgctgctaccggcgcgcattccgggccccagctccagctgcaagagtctggacctggcctggtcaagcctagcgagacactgagcctgacctgtaccgtgtccggcgatagcatcagcagcggcgattactactggggctggatcagacagcctcctggcaaaggactggaatggatcggccacatctactacagcggcgtgacctactacaaccccagcctgaagtccagagtgaccatcagcgtggacaccagccggaaccagttctccctgaagctgtctagcgtgacagccgccgataccgccgtgtactactgcaccagagaggacagcagcaactggcggagtagaggccagggaacactggtcacagttagctctggatccggcggaggcggaagtggaggcggaggatctggcggcggaggctctttcgaacaggtgcaactccagcagtctggcgcttccgtgaaggtgtcctgcaaggccagcgaactcgtgcggcctggcacaggctacgccttcaccaattacctgatcgagtgggtcaagcagaggcccggacagggcctggaatggatcggagtgattaacccaggcagcggcggcaccaactacaacgagaagttcaagggcaaggccaccctgaccgccgacaagagcagcagcacagcctacatgcaactgagcagcctgaccagcgacgacagcgccgtgtacttctgcgcccggtacagaagctacgactggtacttcgacgtgtggggagccggcaccaccgtgacagtgtcatctacgcgtgaggacctgaagaacgtgttcccacctgaggtggccgtgttcgagcctagcgaggccgagatcagccacacccagaaagccaccctcgtgtgcctggctaccggcttctaccccgaccatgtggaactgtcttggtgggtcaacggcaaagaggtgcacagcggcgtgtgtaccgacccccagccactgaaagaacagcccgccctgaacgacagccggtactgcctgagcagcagactgagagtgtccgccaccttctggcagaacccccggaaccacttcagatgccaggtgcagttctacggcctgagcgagaacgacgagtggacccaggacagagccaagcccgtgacccagatcgtgtctgccgaagcctggggcagagccgattgcggctttaccagcgagagctaccagcagggcgtgctgagcgccaccaacctgagcgtgatcggcttcagaatcctgctgctgaaagtggccggctttaacctgctgatgaccctgcggctgtggtccagc

SEQ ID NO: 5867 - DNA, 2682 bp, synthetic construct
  source 1..2682: mol_type = other DNA
atggccttaccagtgaccgccttgctcctgccgctggccttgctgctccacgccgccaggccggaagtgcagctggttgaatctggcggaggactggttcagcctggcggatctctgagactgtcttgtgccgccagcggcttcagcttcagcgacttttggatgagctgggtccgacaggcccctggcaaaggacttgaatgggtcgccacaatcagccaggccggcagcgagaaggactacgtggactctgtgaagggcagattcaccatcagccgggacaacgccaagaagtccctgtacctccagatgaacagcctgagagccgaggacaccgccgtgtactattgtgcctctggcgtgtacagcttcgactacagaggccagggcaccctggtcacagtctcttctggtaccggcggaggcggatctggcggcggaggtagcggtggcggaggatctgaattcgacatccagatgacccagagcttcagcagcctgagcgccagcgtgggcgacagagtgaccatcacctgtagagccagccaggacatcagcaactacctgaactggtatcagcagaagcccggcaaggcccccaagctgctgatctactacaccagcagactgcacagcggcgtgcccagcagattttctggcagcggctccggcaccgactacaccctgacaatcagctccctgcagcccgaggacttcgctacctacttctgtcagcaaggcaacaccctgccctggacctttggcggaggcaccaagctggaaatcaagagactcgagatccagaaccctgatcctgccgtgtaccagctgcgggatagcaagagcagcgacaagagcgtgtgtctgttcaccgacttcgacagccagaccaacgtgtcccagagcaaggactccgacgtgtacatcaccgataagtgcgtgctggacatgcggagcatggacttcaagagcaactccgccgtggcctggtccaacaagtccgatttcgcctgcgccaacgccttcaacaacagcattatccccgaggacacattcttcccaagccccgagagcagctgcgacgtgaagctggtggaaaagagcttcgagacagacaccaacctgaacttccagatcctgtacgagatcctgctgggcaaggccaccctgtacgccgtgctggtgtctgccctggtgctgatggctatggtcaagcggaaggacagccggggacgcgccaagagaagcggatctggcgtgaagcagaccctgaatttcgacctgctgaagctggctggcgacgtggaatccaacccaggccctactagtatggactggatttggcgcatccttttccttgtcggcgctgctaccggcgcgcattccgggccccagctccagctgcaagagtctggacctggcctggtcaagcctagcgagacactgagcctgacctgtaccgtgtccggcgatagcatcagcagcggcgattactactggggctggatcagacagcctcctggcaaaggactggaatggatcggccacatctactacagcggcgtgacctactacaaccccagcctgaagtccagagtgaccatcagcgtggacaccagccggaaccagttctccctgaagctgtctagcgtgacagccgccgataccgccgtgtactactgcaccagagaggacagcagcaactggcggagtagaggccagggaacactggtcacagttagctctggatccggcggaggcggaagtggaggcggaggatctggcggcggaggctctttcgaagaagtgcaactggtgcagtccggcggagggctggtgcagagcggaggatctctgagactgagctgcagagccagcggctacaccttcacccggtactggatgctgtgggtgcgccagaggccaggcaagggactggaatgggtggccgagatcaacccccggaacgaccggaccaactacaacgagaagttcaagacccggttcaccatcagcgtggacagaagcaagaacaccctgtacctgcagatggacagcctgcgggccgaggataccgccgtgtacttttgtgctctgggaggcggctacgctatggactactggggccagggaacccttgtgaccgtgtcctctacgcgtgaggacctgaagaacgtgttcccacctgaggtggccgtgttcgagcctagcgaggccgagatcagccacacccagaaagccaccctcgtgtgcctggctaccggcttctaccccgaccatgtggaactgtcttggtgggtcaacggcaaagaggtgcacagcggcgtgtgtaccgacccccagccactgaaagaacagcccgccctgaacgacagccggtactgcctgagcagcagactgagagtgtccgccaccttctggcagaacccccggaaccacttcagatgccaggtgcagttctacggcctgagcgagaacgacgagtggacccaggacagagccaagcccgtgacccagatcgtgtctgccgaagcctggggcagagccgattgcggctttaccagcgagagctaccagcagggcgtgctgagcgccaccaacctgagcgtgatcggcttcagaatcctgctgctgaaagtggccggctttaacctgctgatgaccctgcggctgtggtccagc

SEQ ID NO: 5868 - DNA, 2685 bp, synthetic construct
  source 1..2685: mol_type = other DNA
atggccttaccagtgaccgccttgctcctgccgctggccttgctgctccacgccgccaggccggaagtgcagctggttgaatctggcggaggactggttcagcctggcggatctctgagactgtcttgtgccgccagcggcttcagcttcagcgacttttggatgagctgggtccgacaggcccctggcaaaggacttgaatgggtcgccacaatcagccaggccggcagcgagaaggactacgtggactctgtgaagggcagattcaccatcagccgggacaacgccaagaagtccctgtacctccagatgaacagcctgagagccgaggacaccgccgtgtactattgtgcctctggcgtgtacagcttcgactacagaggccagggcaccctggtcacagtctcttctggtaccggcggaggcggatctggcggcggaggtagcggtggcggaggatctgaattcgacatccagatgacacagtctccggcgtcactgtccgcctccgtgggggagactgtgactattatttgtagggcatcagttaacatctactcttatttggcctggtaccagcagaagcaaggcaagagtcctcagctgctggtgtataatgcgaagatcctggcagagggcgtgccgagccggttctccggcagcggctcaggtacccaattttccctcaagatcaattcactgcagccagaggactttggcagttactattgtcaacaccactacggcacattcactttcgggtccggtacaaaattggagattaagcgactcgagatccagaaccctgatcctgccgtgtaccagctgcgggatagcaagagcagcgacaagagcgtgtgtctgttcaccgacttcgacagccagaccaacgtgtcccagagcaaggactccgacgtgtacatcaccgataagtgcgtgctggacatgcggagcatggacttcaagagcaactccgccgtggcctggtccaacaagtccgatttcgcctgcgccaacgccttcaacaacagcattatccccgaggacacattcttcccaagccccgagagcagctgcgacgtgaagctggtggaaaagagcttcgagacagacaccaacctgaacttccagatcctgtacgagatcctgctgggcaaggccaccctgtacgccgtgctggtgtctgccctggtgctgatggctatggtcaagcggaaggacagccggggacgcgccaagagaagcggatctggcgtgaagcagaccctgaatttcgacctgctgaagctggctggcgacgtggaatccaacccaggccctactagtatggactggatttggcgcatccttttccttgtcggcgctgctaccggcgcgcattccgggccccagctccagctgcaagagtctggacctggcctggtcaagcctagcgagacactgagcctgacctgtaccgtgtccggcgatagcatcagcagcggcgattactactggggctggatcagacagcctcctggcaaaggactggaatggatcggccacatctactacagcggcgtgacctactacaaccccagcctgaagtccagagtgaccatcagcgtggacaccagccggaaccagttctccctgaagctgtctagcgtgacagccgccgataccgccgtgtactactgcaccagagaggacagcagcaactggcggagtagaggccagggaacactggtcacagttagctctggatccggcggaggcggaagtggaggcggaggatctggcggcggaggctctttcgaacaggtacagttgaaagaaagcgggcctggactggtagcgccttcccaatctctctccatcacgtgcaccatctctggcttctccctgacttcctatggagttcactgggtgaggcagccccccggcaagggactggaatggctggtcgtcatctggtccgacgggtccacaacctacaactccgctctgaaaagtcggctctctatttctaaagataatagcaagagccaggtgtttctgaaaatgaactctctgcagaccgatgatacggccatttactactgcgcttcacactatggctcaaccttggcattcgcttcctggggccacggaacactggtgaccgtttccgcagccacgcgtgaggacctgaagaacgtgttcccacctgaggtggccgtgttcgagcctagcgaggccgagatcagccacacccagaaagccaccctcgtgtgcctggctaccggcttctaccccgaccatgtggaactgtcttggtgggtcaacggcaaagaggtgcacagcggcgtgtgtaccgacccccagccactgaaagaacagcccgccctgaacgacagccggtactgcctgagcagcagactgagagtgtccgccaccttctggcagaacccccggaaccacttcagatgccaggtgcagttctacggcctgagcgagaacgacgagtggacccaggacagagccaagcccgtgacccagatcgtgtctgccgaagcctggggcagagccgattgcggctttaccagcgagagctaccagcagggcgtgctgagcgccaccaacctgagcgtgatcggcttcagaatcctgctgctgaaagtggccggctttaacctgctgatgaccctgcggctgtggtccagc

SEQ ID NO: 5869 - DNA, 2709 bp, synthetic construct
  source 1..2709: mol_type = other DNA
atggccttaccagtgaccgccttgctcctgccgctggccttgctgctccacgccgccaggccggaagtgcagctggttgaatctggcggaggactggttcagcctggcggatctctgagactgtcttgtgccgccagcggcttcagcttcagcgacttttggatgagctgggtccgacaggcccctggcaaaggacttgaatgggtcgccacaatcagccaggccggcagcgagaaggactacgtggactctgtgaagggcagattcaccatcagccgggacaacgccaagaagtccctgtacctccagatgaacagcctgagagccgaggacaccgccgtgtactattgtgcctctggcgtgtacagcttcgactacagaggccagggcaccctggtcacagtctcttctggtaccggcggaggcggatctggcggcggaggtagcggtggcggaggatctgaattcgacattgtgatgacccagtctcacaaattcatgtccacatcagtaggagacagggtcagcgtcacctgcaaggccagtcagaatgtgggtaataatgtagcctggtatcaacagaaaccagggcaatctcctaaagtactgatttactcggcatcctaccggtacagtggagtccctgatcgcttcacaggcagtggatctgggacagatttcactctcaccatcagtaatgtgcagtctgaagacttggcagagtatttctgtcagcaatataacacctatccattcacgttcggctcggggacaaagttggaaataaaactcgagatccagaaccctgatcctgccgtgtaccagctgcgggatagcaagagcagcgacaagagcgtgtgtctgttcaccgacttcgacagccagaccaacgtgtcccagagcaaggactccgacgtgtacatcaccgataagtgcgtgctggacatgcggagcatggacttcaagagcaactccgccgtggcctggtccaacaagtccgatttcgcctgcgccaacgccttcaacaacagcattatccccgaggacacattcttcccaagccccgagagcagctgcgacgtgaagctggtggaaaagagcttcgagacagacaccaacctgaacttccagatcctgtacgagatcctgctgggcaaggccaccctgtacgccgtgctggtgtctgccctggtgctgatggctatggtcaagcggaaggacagccggggacgcgccaagagaagcggatctggcgtgaagcagaccctgaatttcgacctgctgaagctggctggcgacgtggaatccaacccaggccctactagtatggactggatttggcgcatccttttccttgtcggcgctgctaccggcgcgcattccgggccccagctccagctgcaagagtctggacctggcctggtcaagcctagcgagacactgagcctgacctgtaccgtgtccggcgatagcatcagcagcggcgattactactggggctggatcagacagcctcctggcaaaggactggaatggatcggccacatctactacagcggcgtgacctactacaaccccagcctgaagtccagagtgaccatcagcgtggacaccagccggaaccagttctccctgaagctgtctagcgtgacagccgccgataccgccgtgtactactgcaccagagaggacagcagcaactggcggagtagaggccagggaacactggtcacagttagctctggatccggcggaggcggaagtggaggcggaggatctggcggcggaggctctttcgaagaggtacagctggaggaaagcggtggaggactggtgcaacctggagggtctatgaagctctcttgcgtagcttctgggttcacgttctccaattactggatgaactgggtgcggcagtcccccgagaaaggcctggaatgggtagcagaaattcggttcaagtcccataactatgctacacactttgccgagtctgtcaaaggccggttcactattagtcgagacgacagcaagtcttcagtctacctgcagatgaataacttgcgggcagaggacacaggtatctactactgcaccaggagaatcggcaactccgactatgactggtggtactttgacgtctggggagcaggcaccagcgtgacggtgagttcagcctcaacgcgtgaggacctgaagaacgtgttcccacctgaggtggccgtgttcgagcctagcgaggccgagatcagccacacccagaaagccaccctcgtgtgcctggctaccggcttctaccccgaccatgtggaactgtcttggtgggtcaacggcaaagaggtgcacagcggcgtgtgtaccgacccccagccactgaaagaacagcccgccctgaacgacagccggtactgcctgagcagcagactgagagtgtccgccaccttctggcagaacccccggaaccacttcagatgccaggtgcagttctacggcctgagcgagaacgacgagtggacccaggacagagccaagcccgtgacccagatcgtgtctgccgaagcctggggcagagccgattgcggctttaccagcgagagctaccagcagggcgtgctgagcgccaccaacctgagcgtgatcggcttcagaatcctgctgctgaaagtggccggctttaacctgctgatgaccctgcggctgtggtccagc

SEQ ID NO: 5870 - DNA, 2688 bp, synthetic construct
  source 1..2688: mol_type = other DNA
atggccttaccagtgaccgccttgctcctgccgctggccttgctgctccacgccgccaggccggaagtgcagctggttgaatctggcggaggactggttcagcctggcggatctctgagactgtcttgtgccgccagcggcttcagcttcagcgacttttggatgagctgggtccgacaggcccctggcaaaggacttgaatgggtcgccacaatcagccaggccggcagcgagaaggactacgtggactctgtgaagggcagattcaccatcagccgggacaacgccaagaagtccctgtacctccagatgaacagcctgagagccgaggacaccgccgtgtactattgtgcctctggcgtgtacagcttcgactacagaggccagggcaccctggtcacagtctcttctggtaccggcggaggcggatctggcggcggaggtagcggtggcggaggatctgaattcgaccagatcgtgctgacccagtcccccgctattatgtccgcatcaccgggcgaaaaagtgacgatctcctgtagcgcttcatctagcgtctcctacatgtattggtatcaacagaaacctgggtctagcccaaagccgtggatctacagaaccagtaaccttgccagtggggtgccagcccgcttcagcggtagtggcagtggaacttcctatagcctcacaataagcaacatggaggctgaagatgccgctgcctattactgccagcagtaccacagttacccaaccacgttcggcgggggaactaagctcgaagtaaaactcgagatccagaaccctgatcctgccgtgtaccagctgcgggatagcaagagcagcgacaagagcgtgtgtctgttcaccgacttcgacagccagaccaacgtgtcccagagcaaggactccgacgtgtacatcaccgataagtgcgtgctggacatgcggagcatggacttcaagagcaactccgccgtggcctggtccaacaagtccgatttcgcctgcgccaacgccttcaacaacagcattatccccgaggacacattcttcccaagccccgagagcagctgcgacgtgaagctggtggaaaagagcttcgagacagacaccaacctgaacttccagatcctgtacgagatcctgctgggcaaggccaccctgtacgccgtgctggtgtctgccctggtgctgatggctatggtcaagcggaaggacagccggggacgcgccaagagaagcggatctggcgtgaagcagaccctgaatttcgacctgctgaagctggctggcgacgtggaatccaacccaggccctactagtatggactggatttggcgcatccttttccttgtcggcgctgctaccggcgcgcattccgggccccagctccagctgcaagagtctggacctggcctggtcaagcctagcgagacactgagcctgacctgtaccgtgtccggcgatagcatcagcagcggcgattactactggggctggatcagacagcctcctggcaaaggactggaatggatcggccacatctactacagcggcgtgacctactacaaccccagcctgaagtccagagtgaccatcagcgtggacaccagccggaaccagttctccctgaagctgtctagcgtgacagccgccgataccgccgtgtactactgcaccagagaggacagcagcaactggcggagtagaggccagggaacactggtcacagttagctctggatccggcggaggcggaagtggaggcggaggatctggcggcggaggctctttcgaagaggtgcagctggtggaatctgggggcggcctggtccaacctaagggatcactcaagctctcttgtgcggccagcggattctctttcaatacctatgctatgaattgggtgagacaggcgcccggaaagggcctcgaatggatagcccatatccggtcaaaatcaaacaatttcgcaacctactatgcggactccgtgaaggaccgattttccatctcccgagatgcctccgagaatattctgttcctgcagatgaataacctcaagacagaggacaccgccatgtactactgtgtgcgccagggcggtgactttcccatggattactgggggcaggggaccagcgtgaccgtgagctctacgcgtgaggacctgaagaacgtgttcccacctgaggtggccgtgttcgagcctagcgaggccgagatcagccacacccagaaagccaccctcgtgtgcctggctaccggcttctaccccgaccatgtggaactgtcttggtgggtcaacggcaaagaggtgcacagcggcgtgtgtaccgacccccagccactgaaagaacagcccgccctgaacgacagccggtactgcctgagcagcagactgagagtgtccgccaccttctggcagaacccccggaaccacttcagatgccaggtgcagttctacggcctgagcgagaacgacgagtggacccaggacagagccaagcccgtgacccagatcgtgtctgccgaagcctggggcagagccgattgcggctttaccagcgagagctaccagcagggcgtgctgagcgccaccaacctgagcgtgatcggcttcagaatcctgctgctgaaagtggccggctttaacctgctgatgaccctgcggctgtggtccagc

SEQ ID NO: 5871 - DNA, 2685 bp, synthetic construct
  source 1..2685: mol_type = other DNA
atggccttaccagtgaccgccttgctcctgccgctggccttgctgctccacgccgccaggccggaagtgcagctggttgaatctggcggaggactggttcagcctggcggatctctgagactgtcttgtgccgccagcggcttcagcttcagcgacttttggatgagctgggtccgacaggcccctggcaaaggacttgaatgggtcgccacaatcagccaggccggcagcgagaaggactacgtggactctgtgaagggcagattcaccatcagccgggacaacgccaagaagtccctgtacctccagatgaacagcctgagagccgaggacaccgccgtgtactattgtgcctctggcgtgtacagcttcgactacagaggccagggcaccctggtcacagtctcttctggtaccggcggaggcggatctggcggcggaggtagcggtggcggaggatctgaattcgacgacatccagatgacccagagcagcagcagcttcagcgtgagcctgggcgacagagtgaccatcacctgcatggccagcgaggacatctacatcagactggcctggtaccagcagaagcccggcaacgcccccagactgctgatcagcgccgccaccagcctggagaccggcgtgcccagcagattcagcggcagcggcagcggcaaggactacaccctgagcatcaccagcctgcagaccgaggacgtgggcacctactactgccagcagtactggagcagcccctggaccttcggcggcggcaccaagctggagatcaacctcgagatccagaaccctgatcctgccgtgtaccagctgcgggatagcaagagcagcgacaagagcgtgtgtctgttcaccgacttcgacagccagaccaacgtgtcccagagcaaggactccgacgtgtacatcaccgataagtgcgtgctggacatgcggagcatggacttcaagagcaactccgccgtggcctggtccaacaagtccgatttcgcctgcgccaacgccttcaacaacagcattatccccgaggacacattcttcccaagccccgagagcagctgcgacgtgaagctggtggaaaagagcttcgagacagacaccaacctgaacttccagatcctgtacgagatcctgctgggcaaggccaccctgtacgccgtgctggtgtctgccctggtgctgatggctatggtcaagcggaaggacagccggggacgcgccaagagaagcggatctggcgtgaagcagaccctgaatttcgacctgctgaagctggctggcgacgtggaatccaacccaggccctactagtatggactggatttggcgcatccttttccttgtcggcgctgctaccggcgcgcattccgggccccagctccagctgcaagagtctggacctggcctggtcaagcctagcgagacactgagcctgacctgtaccgtgtccggcgatagcatcagcagcggcgattactactggggctggatcagacagcctcctggcaaaggactggaatggatcggccacatctactacagcggcgtgacctactacaaccccagcctgaagtccagagtgaccatcagcgtggacaccagccggaaccagttctccctgaagctgtctagcgtgacagccgccgataccgccgtgtactactgcaccagagaggacagcagcaactggcggagtagaggccagggaacactggtcacagttagctctggatccggcggaggcggaagtggaggcggaggatctggcggcggaggctctttcgaagacgtgcagctgcaggagagcggccccggcctggtgaagcccagccagagcctgagcctgacctgcaccgtgaccggctacagcatcaccagcgactacacctggaactggatcagacagttccccggcaacaagctggagtggatgggctacatcacctacagcggcagcaccagctacaaccccagcctgaagagcagaaacagcatcaccagagacaccagcaagaaccagttcttcctgcagctgaacagcgtgaccaccgaggacaccgccacctactactgcgccagactgggcagaagatacacaatggactactggggccagggcaccagcgtgaccgtgagcagcacgcgtgaggacctgaagaacgtgttcccacctgaggtggccgtgttcgagcctagcgaggccgagatcagccacacccagaaagccaccctcgtgtgcctggctaccggcttctaccccgaccatgtggaactgtcttggtgggtcaacggcaaagaggtgcacagcggcgtgtgtaccgacccccagccactgaaagaacagcccgccctgaacgacagccggtactgcctgagcagcagactgagagtgtccgccaccttctggcagaacccccggaaccacttcagatgccaggtgcagttctacggcctgagcgagaacgacgagtggacccaggacagagccaagcccgtgacccagatcgtgtctgccgaagcctggggcagagccgattgcggctttaccagcgagagctaccagcagggcgtgctgagcgccaccaacctgagcgtgatcggcttcagaatcctgctgctgaaagtggccggctttaacctgctgatgaccctgcggctgtggtccagc

SEQ ID NO: 5872 - DNA, 2694 bp, synthetic construct
  source 1..2694: mol_type = other DNA
atggccttaccagtgaccgccttgctcctgccgctggccttgctgctccacgccgccaggccggaagtgcagctggttgaatctggcggaggactggttcagcctggcggatctctgagactgtcttgtgccgccagcggcttcagcttcagcgacttttggatgagctgggtccgacaggcccctggcaaaggacttgaatgggtcgccacaatcagccaggccggcagcgagaaggactacgtggactctgtgaagggcagattcaccatcagccgggacaacgccaagaagtccctgtacctccagatgaacagcctgagagccgaggacaccgccgtgtactattgtgcctctggcgtgtacagcttcgactacagaggccagggcaccctggtcacagtctcttctggtaccggcggaggcggatctggcggcggaggtagcggtggcggaggatctgaattcgacgacatccagatgacccagagccccagcagcctgtctgccagcgtgggcgacagagtgaccatcacctgtagagccagccagagcatcagcagctacctgaactggtatcagcagaagcccggcaaggcccccaaactgctgatctacgacgccagcaacctggaaaccggcgtgcccagcagattttccggcagcggctctggcaccgacttcaccttcaccatcagctccctccagcccgaggacattgccacctactactgccagcagtacgacaacctgcccctgacctttggcggaggcaccaaggtggacatcaagagactcgagatccagaaccctgatcctgccgtgtaccagctgcgggatagcaagagcagcgacaagagcgtgtgtctgttcaccgacttcgacagccagaccaacgtgtcccagagcaaggactccgacgtgtacatcaccgataagtgcgtgctggacatgcggagcatggacttcaagagcaactccgccgtggcctggtccaacaagtccgatttcgcctgcgccaacgccttcaacaacagcattatccccgaggacacattcttcccaagccccgagagcagctgcgacgtgaagctggtggaaaagagcttcgagacagacaccaacctgaacttccagatcctgtacgagatcctgctgggcaaggccaccctgtacgccgtgctggtgtctgccctggtgctgatggctatggtcaagcggaaggacagccggggacgcgccaagagaagcggatctggcgtgaagcagaccctgaatttcgacctgctgaagctggctggcgacgtggaatccaacccaggccctactagtatggactggatttggcgcatccttttccttgtcggcgctgctaccggcgcgcattccgggccccagctccagctgcaagagtctggacctggcctggtcaagcctagcgagacactgagcctgacctgtaccgtgtccggcgatagcatcagcagcggcgattactactggggctggatcagacagcctcctggcaaaggactggaatggatcggccacatctactacagcggcgtgacctactacaaccccagcctgaagtccagagtgaccatcagcgtggacaccagccggaaccagttctccctgaagctgtctagcgtgacagccgccgataccgccgtgtactactgcaccagagaggacagcagcaactggcggagtagaggccagggaacactggtcacagttagctctggatccggcggaggcggaagtggaggcggaggatctggcggcggaggctctttcgaacaggtgcaactggtggaatctggcggcggagtggtgcagcctggcagaagcctgagactgagctgtgccgccagcggcttcacctttagcagctacgccatgcactgggtgcgccaggcccctggaaaaggcctggaatgggtggccgtgatctcctacgacggctccaacaagtattacgccgacagcgtgaagggccggttcaccatctccagagacaacagcaagaacaccctgtacctccagatgaacagcctgcgggccgaggacaccgccgtgtactattgtgccagggctcacaacagcagctcttggagcttcgactactggggccagggcaccctcgtgaccgtgtcatctacgcgtgaggacctgaagaacgtgttcccacctgaggtggccgtgttcgagcctagcgaggccgagatcagccacacccagaaagccaccctcgtgtgcctggctaccggcttctaccccgaccatgtggaactgtcttggtgggtcaacggcaaagaggtgcacagcggcgtgtgtaccgacccccagccactgaaagaacagcccgccctgaacgacagccggtactgcctgagcagcagactgagagtgtccgccaccttctggcagaacccccggaaccacttcagatgccaggtgcagttctacggcctgagcgagaacgacgagtggacccaggacagagccaagcccgtgacccagatcgtgtctgccgaagcctggggcagagccgattgcggctttaccagcgagagctaccagcagggcgtgctgagcgccaccaacctgagcgtgatcggcttcagaatcctgctgctgaaagtggccggctttaacctgctgatgaccctgcggctgtggtccagc

SEQ ID NO: 5873 - DNA, 2721 bp, synthetic construct
  source 1..2721: mol_type = other DNA
atggccttaccagtgaccgccttgctcctgccgctggccttgctgctccacgccgccaggccggaagtgcagctggttgaatctggcggaggactggttcagcctggcggatctctgagactgtcttgtgccgccagcggcttcagcttcagcgacttttggatgagctgggtccgacaggcccctggcaaaggacttgaatgggtcgccacaatcagccaggccggcagcgagaaggactacgtggactctgtgaagggcagattcaccatcagccgggacaacgccaagaagtccctgtacctccagatgaacagcctgagagccgaggacaccgccgtgtactattgtgcctctggcgtgtacagcttcgactacagaggccagggcaccctggtcacagtctcttctggtaccggcggaggcggatctggcggcggaggtagcggtggcggaggatctgaattcgacgacgtcgtgatgacccagagccctctgagcctgcctgtgtccctgggcgatcaggccagcatctcctgcagatccagccagagactggtgcacagcaacggcaacacctacctgcactggtatctgcagaagcccggccagagccccaagctgctgatctaccgggtgtccaacagattccccggcgtgcccgatagattcagcggctctggcagcggcaccgacttcaccctgaagatcagccgggtggaagccgaggacctgggcatctatttctgcagccagagcacccacgtgccctacacctttggcggaggcaccaagctggaaatcaagcggctcgagatccagaaccctgatcctgccgtgtaccagctgcgggatagcaagagcagcgacaagagcgtgtgtctgttcaccgacttcgacagccagaccaacgtgtcccagagcaaggactccgacgtgtacatcaccgataagtgcgtgctggacatgcggagcatggacttcaagagcaactccgccgtggcctggtccaacaagtccgatttcgcctgcgccaacgccttcaacaacagcattatccccgaggacacattcttcccaagccccgagagcagctgcgacgtgaagctggtggaaaagagcttcgagacagacaccaacctgaacttccagatcctgtacgagatcctgctgggcaaggccaccctgtacgccgtgctggtgtctgccctggtgctgatggctatggtcaagcggaaggacagccggggacgcgccaagagaagcggatctggcgtgaagcagaccctgaatttcgacctgctgaagctggctggcgacgtggaatccaacccaggccctactagtatggactggatttggcgcatccttttccttgtcggcgctgctaccggcgcgcattccgggccccagctccagctgcaagagtctggacctggcctggtcaagcctagcgagacactgagcctgacctgtaccgtgtccggcgatagcatcagcagcggcgattactactggggctggatcagacagcctcctggcaaaggactggaatggatcggccacatctactacagcggcgtgacctactacaaccccagcctgaagtccagagtgaccatcagcgtggacaccagccggaaccagttctccctgaagctgtctagcgtgacagccgccgataccgccgtgtactactgcaccagagaggacagcagcaactggcggagtagaggccagggaacactggtcacagttagctctggatccggcggaggcggaagtggaggcggaggatctggcggcggaggctctttcgaagaagtgcggctgcagcagtctggccccgacctgattaagcctggggccagcgtgaagatgagctgcaaggccagcggctacaccttcaccggctacgtgatgcactgggtcaagcagaggccaggccagggcctggaatggatcggcttcatcaacccctacaacgacgacatccagagcaacgagcggttccggggcaaggccaccctgaccagcgataagagcagcaccaccgcctacatggaactgagcagcctgacctccgaggacagcgccgtgtactactgtgctaggggagccggctacaacttcgacggggcctacagattcttcgacttttggggccagggcaccacactgaccgtgtcctctacgcgtgaggacctgaagaacgtgttcccacctgaggtggccgtgttcgagcctagcgaggccgagatcagccacacccagaaagccaccctcgtgtgcctggctaccggcttctaccccgaccatgtggaactgtcttggtgggtcaacggcaaagaggtgcacagcggcgtgtgtaccgacccccagccactgaaagaacagcccgccctgaacgacagccggtactgcctgagcagcagactgagagtgtccgccaccttctggcagaacccccggaaccacttcagatgccaggtgcagttctacggcctgagcgagaacgacgagtggacccaggacagagccaagcccgtgacccagatcgtgtctgccgaagcctggggcagagccgattgcggctttaccagcgagagctaccagcagggcgtgctgagcgccaccaacctgagcgtgatcggcttcagaatcctgctgctgaaagtggccggctttaacctgctgatgaccctgcggctgtggtccagc

SEQ ID NO: 5874 - DNA, 2694 bp, synthetic construct
  source 1..2694: mol_type = other DNA
atggccttaccagtgaccgccttgctcctgccgctggccttgctgctccacgccgccaggccggaagtgcagctggttgaatctggcggaggactggttcagcctggcggatctctgagactgtcttgtgccgccagcggcttcagcttcagcgacttttggatgagctgggtccgacaggcccctggcaaaggacttgaatgggtcgccacaatcagccaggccggcagcgagaaggactacgtggactctgtgaagggcagattcaccatcagccgggacaacgccaagaagtccctgtacctccagatgaacagcctgagagccgaggacaccgccgtgtactattgtgcctctggcgtgtacagcttcgactacagaggccagggcaccctggtcacagtctcttctggtaccggcggaggcggatctggcggcggaggtagcggtggcggaggatctgaattcgacagctacgagctgacccagcctcctagcgtgtccgtgtctcctggacagaccgccaccatctcttgcagcggcgatcaactgggcgggaagtacggccactggtatcagaagaagcccggccagagccccgtgctggtgctgtaccaggacagaaaacggcctgccggcatccccgagagattcagcggaagcagcagcggcaacaccatcaccctgaccatcagcggcacccaggccgtggatgaggccgactactactgccaggcttgggacaccaatctgggcggcgtgttcggcggaggcaccaaagtgacagtgctgggacagctcgagatccagaaccctgatcctgccgtgtaccagctgcgggatagcaagagcagcgacaagagcgtgtgtctgttcaccgacttcgacagccagaccaacgtgtcccagagcaaggactccgacgtgtacatcaccgataagtgcgtgctggacatgcggagcatggacttcaagagcaactccgccgtggcctggtccaacaagtccgatttcgcctgcgccaacgccttcaacaacagcattatccccgaggacacattcttcccaagccccgagagcagctgcgacgtgaagctggtggaaaagagcttcgagacagacaccaacctgaacttccagatcctgtacgagatcctgctgggcaaggccaccctgtacgccgtgctggtgtctgccctggtgctgatggctatggtcaagcggaaggacagccggggacgcgccaagagaagcggatctggcgtgaagcagaccctgaatttcgacctgctgaagctggctggcgacgtggaatccaacccaggccctactagtatggactggatttggcgcatccttttccttgtcggcgctgctaccggcgcgcattccgggccccagctccagctgcaagagtctggacctggcctggtcaagcctagcgagacactgagcctgacctgtaccgtgtccggcgatagcatcagcagcggcgattactactggggctggatcagacagcctcctggcaaaggactggaatggatcggccacatctactacagcggcgtgacctactacaaccccagcctgaagtccagagtgaccatcagcgtggacaccagccggaaccagttctccctgaagctgtctagcgtgacagccgccgataccgccgtgtactactgcaccagagaggacagcagcaactggcggagtagaggccagggaacactggtcacagttagctctggatccggcggaggcggaagtggaggcggaggatctggcggcggaggctctttcgaacaggtgcaactggtggaaagcggagccgaagtgaagaaacctggggccagcgtgaaggtgtcctgcaaggccagcggctacacctttaccggctactacatgcactgggtgcgccaggctccaggccagggactggaatggatgggccggatcaaccccaatagcggcggcaccaactacgcccagaaattccagggcagagtgaccatgaccagagacaccagcatcagcaccgcctacatggaactgagccggctgagaagcgacgacaccgccgtgtactactgcgccagccctagaggcagaggcagcgccttcgatatttggggccagggcacactcgtgaccgtgtcctctacgcgtgaggacctgaagaacgtgttcccacctgaggtggccgtgttcgagcctagcgaggccgagatcagccacacccagaaagccaccctcgtgtgcctggctaccggcttctaccccgaccatgtggaactgtcttggtgggtcaacggcaaagaggtgcacagcggcgtgtgtaccgacccccagccactgaaagaacagcccgccctgaacgacagccggtactgcctgagcagcagactgagagtgtccgccaccttctggcagaacccccggaaccacttcagatgccaggtgcagttctacggcctgagcgagaacgacgagtggacccaggacagagccaagcccgtgacccagatcgtgtctgccgaagcctggggcagagccgattgcggctttaccagcgagagctaccagcagggcgtgctgagcgccaccaacctgagcgtgatcggcttcagaatcctgctgctgaaagtggccggctttaacctgctgatgaccctgcggctgtggtccagc

SEQ ID NO: 5875 - DNA, 2703 bp, synthetic construct
  source 1..2703: mol_type = other DNA
atggccttaccagtgaccgccttgctcctgccgctggccttgctgctccacgccgccaggccggaagtgcagctggttgaatctggcggaggactggttcagcctggcggatctctgagactgtcttgtgccgccagcggcttcagcttcagcgacttttggatgagctgggtccgacaggcccctggcaaaggacttgaatgggtcgccacaatcagccaggccggcagcgagaaggactacgtggactctgtgaagggcagattcaccatcagccgggacaacgccaagaagtccctgtacctccagatgaacagcctgagagccgaggacaccgccgtgtactattgtgcctctggcgtgtacagcttcgactacagaggccagggcaccctggtcacagtctcttctggtaccggcggaggcggatctggcggcggaggtagcggtggcggaggatctgaattcgacaacttcatgctgacccagccccacagcgtgtccgagagccctggcaagaccgtgaccatctcctgcaccagaagcagcggctctatcgccagcaaatacgtgcagtggtatcagcagaggcccggcagcagccctaccaccgtgatctacgaggacaaccagaggcctagcggcgtgcccgatagattcagcggcagcatcgacaccagcagcaacagcgccagcctgaccatcagcggcctgagaacagaggacgaggccgactactactgccacagctacgacagcaacaaccactccgtgttcggcggaggcaccaaagtgacagtgctgggacagctcgagatccagaaccctgatcctgccgtgtaccagctgcgggatagcaagagcagcgacaagagcgtgtgtctgttcaccgacttcgacagccagaccaacgtgtcccagagcaaggactccgacgtgtacatcaccgataagtgcgtgctggacatgcggagcatggacttcaagagcaactccgccgtggcctggtccaacaagtccgatttcgcctgcgccaacgccttcaacaacagcattatccccgaggacacattcttcccaagccccgagagcagctgcgacgtgaagctggtggaaaagagcttcgagacagacaccaacctgaacttccagatcctgtacgagatcctgctgggcaaggccaccctgtacgccgtgctggtgtctgccctggtgctgatggctatggtcaagcggaaggacagccggggacgcgccaagagaagcggatctggcgtgaagcagaccctgaatttcgacctgctgaagctggctggcgacgtggaatccaacccaggccctactagtatggactggatttggcgcatccttttccttgtcggcgctgctaccggcgcgcattccgggccccagctccagctgcaagagtctggacctggcctggtcaagcctagcgagacactgagcctgacctgtaccgtgtccggcgatagcatcagcagcggcgattactactggggctggatcagacagcctcctggcaaaggactggaatggatcggccacatctactacagcggcgtgacctactacaaccccagcctgaagtccagagtgaccatcagcgtggacaccagccggaaccagttctccctgaagctgtctagcgtgacagccgccgataccgccgtgtactactgcaccagagaggacagcagcaactggcggagtagaggccagggaacactggtcacagttagctctggatccggcggaggcggaagtggaggcggaggatctggcggcggaggctctttcgaagaagtgcaactggtggaaagcgggggaggcgtggtgcagccaggcggatctctgagactgagctgtgccgccagcggcttcaccttcagcagctacgccatgagctgggtgcgccaggcccctggaaaaggcctggaatgggtgtccgccatctctggctctggcggcagcacctactacgccgatagcgtgaagggccggttcagcatcagccgggacaacagcaagaacaccctgtacctccagatgaacagcctgcgggccgaggacaccgccgtgtactactgtgccagaaccagaagctccggggccttcgacatctggggccagggaacactcgtgaccgtgtcctctacgcgtgaggacctgaagaacgtgttcccacctgaggtggccgtgttcgagcctagcgaggccgagatcagccacacccagaaagccaccctcgtgtgcctggctaccggcttctaccccgaccatgtggaactgtcttggtgggtcaacggcaaagaggtgcacagcggcgtgtgtaccgacccccagccactgaaagaacagcccgccctgaacgacagccggtactgcctgagcagcagactgagagtgtccgccaccttctggcagaacccccggaaccacttcagatgccaggtgcagttctacggcctgagcgagaacgacgagtggacccaggacagagccaagcccgtgacccagatcgtgtctgccgaagcctggggcagagccgattgcggctttaccagcgagagctaccagcagggcgtgctgagcgccaccaacctgagcgtgatcggcttcagaatcctgctgctgaaagtggccggctttaacctgctgatgaccctgcggctgtggtccagc

SEQ ID NO: 5876 - DNA, 2688 bp, synthetic construct
  source 1..2688: mol_type = other DNA
atggccttaccagtgaccgccttgctcctgccgctggccttgctgctccacgccgccaggccggaagtgcagctggttgaatctggcggaggactggttcagcctggcggatctctgagactgtcttgtgccgccagcggcttcagcttcagcgacttttggatgagctgggtccgacaggcccctggcaaaggacttgaatgggtcgccacaatcagccaggccggcagcgagaaggactacgtggactctgtgaagggcagattcaccatcagccgggacaacgccaagaagtccctgtacctccagatgaacagcctgagagccgaggacaccgccgtgtactattgtgcctctggcgtgtacagcttcgactacagaggccagggcaccctggtcacagtctcttctggtaccggcggaggcggatctggcggcggaggtagcggtggcggaggatctgaattcgacatccagatgaaccagagccccagcagcctgagcgccagcctgggcgataccatcaccatcacctgtcacgccagccagaacatcaacgtgtggctgagctggtatcagcagaagcccggcaacatccccaagctgctgatctacaaggccagcaacctgcacaccggcgtgcccagcagattttctggcagcggctctggcaccggcttcaccattaccatcagctccctccagcccgaggacattgccacctactactgccagcagggccagagctacccctggacatttggcggaggcaccaagctggaaatcaagagactcgagatccagaaccctgatcctgccgtgtaccagctgcgggatagcaagagcagcgacaagagcgtgtgtctgttcaccgacttcgacagccagaccaacgtgtcccagagcaaggactccgacgtgtacatcaccgataagtgcgtgctggacatgcggagcatggacttcaagagcaactccgccgtggcctggtccaacaagtccgatttcgcctgcgccaacgccttcaacaacagcattatccccgaggacacattcttcccaagccccgagagcagctgcgacgtgaagctggtggaaaagagcttcgagacagacaccaacctgaacttccagatcctgtacgagatcctgctgggcaaggccaccctgtacgccgtgctggtgtctgccctggtgctgatggctatggtcaagcggaaggacagccggggacgcgccaagagaagcggatctggcgtgaagcagaccctgaatttcgacctgctgaagctggctggcgacgtggaatccaacccaggccctactagtatggactggatttggcgcatccttttccttgtcggcgctgctaccggcgcgcattccgggccccagctccagctgcaagagtctggacctggcctggtcaagcctagcgagacactgagcctgacctgtaccgtgtccggcgatagcatcagcagcggcgattactactggggctggatcagacagcctcctggcaaaggactggaatggatcggccacatctactacagcggcgtgacctactacaaccccagcctgaagtccagagtgaccatcagcgtggacaccagccggaaccagttctccctgaagctgtctagcgtgacagccgccgataccgccgtgtactactgcaccagagaggacagcagcaactggcggagtagaggccagggaacactggtcacagttagctctggatccggcggaggcggaagtggaggcggaggatctggcggcggaggctctttcgaagaagtgcaactccagcagagcggcccagagcttgtgaagcctggcgcttccgtgaagattagctgcaaagccagcggctacagcttcaccggctacttcatgaactgggtcaagcagagccacggcaagagcctggagtacatcggcagattcaacccctacaacggcgagacactgtacaaccagaagttcaagggcaaggccaccctgaccgtggacaagagcagcagcaccgtgcacatggaactgctgagcgtgaccagcgaggacagcgccgtgtactactgtggcagaagcggcaacgacgacgctatggactattggggccagggcaccagcgtgaccgtgtctagtgctacgcgtgaggacctgaagaacgtgttcccacctgaggtggccgtgttcgagcctagcgaggccgagatcagccacacccagaaagccaccctcgtgtgcctggctaccggcttctaccccgaccatgtggaactgtcttggtgggtcaacggcaaagaggtgcacagcggcgtgtgtaccgacccccagccactgaaagaacagcccgccctgaacgacagccggtactgcctgagcagcagactgagagtgtccgccaccttctggcagaacccccggaaccacttcagatgccaggtgcagttctacggcctgagcgagaacgacgagtggacccaggacagagccaagcccgtgacccagatcgtgtctgccgaagcctggggcagagccgattgcggctttaccagcgagagctaccagcagggcgtgctgagcgccaccaacctgagcgtgatcggcttcagaatcctgctgctgaaagtggccggctttaacctgctgatgaccctgcggctgtggtccagc

SEQ ID NO: 5877 - DNA, 2691 bp, synthetic construct
  source 1..2691: mol_type = other DNA
atggccttaccagtgaccgccttgctcctgccgctggccttgctgctccacgccgccaggccggaagtgcagctggttgaatctggcggaggactggttcagcctggcggatctctgagactgtcttgtgccgccagcggcttcagcttcagcgacttttggatgagctgggtccgacaggcccctggcaaaggacttgaatgggtcgccacaatcagccaggccggcagcgagaaggactacgtggactctgtgaagggcagattcaccatcagccgggacaacgccaagaagtccctgtacctccagatgaacagcctgagagccgaggacaccgccgtgtactattgtgcctctggcgtgtacagcttcgactacagaggccagggcaccctggtcacagtctcttctggtaccggcggaggcggatctggcggcggaggtagcggtggcggaggatctgaattcgagatcgtgctgacacagagccctgccaccctgtctctgagccctggcgaaagagccaccctgagctgtagagccagccagagcgtgcggagctacctggcctggtatcagcagaagcctggacaggcccccagactgctgatctacgacgccagcaatcgggccacaggcatccccgccagattttctggctctggcagcggcaccgacttcaccctgacaatcagcagcctggaacccgaggacttcgccgtgtactactgccagcagcggagcaactggccccctacctttggacagggcaccaaggtggaaatcaagctcgagatccagaaccctgatcctgccgtgtaccagctgcgggatagcaagagcagcgacaagagcgtgtgtctgttcaccgacttcgacagccagaccaacgtgtcccagagcaaggactccgacgtgtacatcaccgataagtgcgtgctggacatgcggagcatggacttcaagagcaactccgccgtggcctggtccaacaagtccgatttcgcctgcgccaacgccttcaacaacagcattatccccgaggacacattcttcccaagccccgagagcagctgcgacgtgaagctggtggaaaagagcttcgagacagacaccaacctgaacttccagatcctgtacgagatcctgctgggcaaggccaccctgtacgccgtgctggtgtctgccctggtgctgatggctatggtcaagcggaaggacagccggggacgcgccaagagaagcggatctggcgtgaagcagaccctgaatttcgacctgctgaagctggctggcgacgtggaatccaacccaggccctactagtatggactggatttggcgcatccttttccttgtcggcgctgctaccggcgcgcattccgggccccagctccagctgcaagagtctggacctggcctggtcaagcctagcgagacactgagcctgacctgtaccgtgtccggcgatagcatcagcagcggcgattactactggggctggatcagacagcctcctggcaaaggactggaatggatcggccacatctactacagcggcgtgacctactacaaccccagcctgaagtccagagtgaccatcagcgtggacaccagccggaaccagttctccctgaagctgtctagcgtgacagccgccgataccgccgtgtactactgcaccagagaggacagcagcaactggcggagtagaggccagggaacactggtcacagttagctctggatccggcggaggcggaagtggaggcggaggatctggcggcggaggctctttcgaacaactccaggtgcaggaatctggccccggactcgtgaagcccagcgagacactgagcctgacctgtaccgtgtccggcggcagcatcagcaacagctacttctcctggggctggatcagacagccccctggcaagggcctggaatggatcggcagcttctactacggcgagaaaacctactacaaccccagcctgaagtccagagccaccatcagcatcgacaccagcaagagccagttctccctgaagctgagcagcgtgacagccgccgacaccgccgtgtattattgccccagaggccccaccatgatccggggcgtgatcgactcttggggccagggaacactcgtgaccgtgtcctctacgcgtgaggacctgaagaacgtgttcccacctgaggtggccgtgttcgagcctagcgaggccgagatcagccacacccagaaagccaccctcgtgtgcctggctaccggcttctaccccgaccatgtggaactgtcttggtgggtcaacggcaaagaggtgcacagcggcgtgtgtaccgacccccagccactgaaagaacagcccgccctgaacgacagccggtactgcctgagcagcagactgagagtgtccgccaccttctggcagaacccccggaaccacttcagatgccaggtgcagttctacggcctgagcgagaacgacgagtggacccaggacagagccaagcccgtgacccagatcgtgtctgccgaagcctggggcagagccgattgcggctttaccagcgagagctaccagcagggcgtgctgagcgccaccaacctgagcgtgatcggcttcagaatcctgctgctgaaagtggccggctttaacctgctgatgaccctgcggctgtggtccagc

SEQ ID NO: 5878 - DNA, 2718 bp, synthetic construct
  source 1..2718: mol_type = other DNA
atggccttaccagtgaccgccttgctcctgccgctggccttgctgctccacgccgccaggccggaagtgcagctggttgaatctggcggaggactggttcagcctggcggatctctgagactgtcttgtgccgccagcggcttcagcttcagcgacttttggatgagctgggtccgacaggcccctggcaaaggacttgaatgggtcgccacaatcagccaggccggcagcgagaaggactacgtggactctgtgaagggcagattcaccatcagccgggacaacgccaagaagtccctgtacctccagatgaacagcctgagagccgaggacaccgccgtgtactattgtgcctctggcgtgtacagcttcgactacagaggccagggcaccctggtcacagtctcttctggtaccggcggaggcggatctggcggcggaggtagcggtggcggaggatctgaattcgacatcgtgatgacccagacccccctgagcctgcctgtgacacctggcgagcctgccagcatctcctgcagaagcagcagaagcctgctggacagcgacgacggcaacacctacctggactggtatctgcagaaacccggccagagcccccaactgctgatctacaccctgagctacagagccagcggcgtgcccgatagattttccggctctggcagcggcaccgacttcaccctgaagatcagccgggtggaagccgaggacgtgggcgtgtactactgtatgcagcgggtggaatttcccatcaccttcggccagggcaccagactggaaatcaagagactcgagatccagaaccctgatcctgccgtgtaccagctgcgggatagcaagagcagcgacaagagcgtgtgtctgttcaccgacttcgacagccagaccaacgtgtcccagagcaaggactccgacgtgtacatcaccgataagtgcgtgctggacatgcggagcatggacttcaagagcaactccgccgtggcctggtccaacaagtccgatttcgcctgcgccaacgccttcaacaacagcattatccccgaggacacattcttcccaagccccgagagcagctgcgacgtgaagctggtggaaaagagcttcgagacagacaccaacctgaacttccagatcctgtacgagatcctgctgggcaaggccaccctgtacgccgtgctggtgtctgccctggtgctgatggctatggtcaagcggaaggacagccggggacgcgccaagagaagcggatctggcgtgaagcagaccctgaatttcgacctgctgaagctggctggcgacgtggaatccaacccaggccctactagtatggactggatttggcgcatccttttccttgtcggcgctgctaccggcgcgcattccgggccccagctccagctgcaagagtctggacctggcctggtcaagcctagcgagacactgagcctgacctgtaccgtgtccggcgatagcatcagcagcggcgattactactggggctggatcagacagcctcctggcaaaggactggaatggatcggccacatctactacagcggcgtgacctactacaaccccagcctgaagtccagagtgaccatcagcgtggacaccagccggaaccagttctccctgaagctgtctagcgtgacagccgccgataccgccgtgtactactgcaccagagaggacagcagcaactggcggagtagaggccagggaacactggtcacagttagctctggatccggcggaggcggaagtggaggcggaggatctggcggcggaggctctttcgaacaggtgcaactggtggaatctggcgggggagtggtgcagcctggcagatccctgagactgagctgtgccgccagcggcttcatcttcagcagatacggaatgcactgggtgcgccaggcccctggcaagggactgaaatgggtggccgtgatttggtacgacggcagcaacaagctgtacgccgacagcgtgaagggccggttcaccatcagcagagacaacagcaagaacaccctgtacctgcagatgaacagcctgcgggccgaggacaccgccgtgtactattgcgccagagactactacgacaacagccggcaccactggggcttcgactattggggccagggaacccttgtgaccgtgtcctctacgcgtgaggacctgaagaacgtgttcccacctgaggtggccgtgttcgagcctagcgaggccgagatcagccacacccagaaagccaccctcgtgtgcctggctaccggcttctaccccgaccatgtggaactgtcttggtgggtcaacggcaaagaggtgcacagcggcgtgtgtaccgacccccagccactgaaagaacagcccgccctgaacgacagccggtactgcctgagcagcagactgagagtgtccgccaccttctggcagaacccccggaaccacttcagatgccaggtgcagttctacggcctgagcgagaacgacgagtggacccaggacagagccaagcccgtgacccagatcgtgtctgccgaagcctggggcagagccgattgcggctttaccagcgagagctaccagcagggcgtgctgagcgccaccaacctgagcgtgatcggcttcagaatcctgctgctgaaagtggccggctttaacctgctgatgaccctgcggctgtggtccagc

SEQ ID NO: 5879 - DNA, 2688 bp, synthetic construct
  source 1..2688: mol_type = other DNA
atggccttaccagtgaccgccttgctcctgccgctggccttgctgctccacgccgccaggccggaagtgcagctggttgaatctggcggaggactggttcagcctggcggatctctgagactgtcttgtgccgccagcggcttcagcttcagcgacttttggatgagctgggtccgacaggcccctggcaaaggacttgaatgggtcgccacaatcagccaggccggcagcgagaaggactacgtggactctgtgaagggcagattcaccatcagccgggacaacgccaagaagtccctgtacctccagatgaacagcctgagagccgaggacaccgccgtgtactattgtgcctctggcgtgtacagcttcgactacagaggccagggcaccctggtcacagtctcttctggtaccggcggaggcggatctggcggcggaggtagcggtggcggaggatctgaattcgagatccagatgacccagagccccagcagcatgtctgccagcctgggcgacaccatcaccatcacatgccaggccacccaggacatcttcaagaacctgaactggtatcagcagaagcccggcaagccccccagcctgctgatctactatgccaccgaactggccgagggcgtgcccagcagattttctggcagcggcagcggctccgactacagcctgaccatcagcaacctggaaagcgaggacttcgccgcctactactgcctccagttcttcgagttcccattcaccttcggctccggcaccaagctggaaatgaagctcgagatccagaaccctgatcctgccgtgtaccagctgcgggatagcaagagcagcgacaagagcgtgtgtctgttcaccgacttcgacagccagaccaacgtgtcccagagcaaggactccgacgtgtacatcaccgataagtgcgtgctggacatgcggagcatggacttcaagagcaactccgccgtggcctggtccaacaagtccgatttcgcctgcgccaacgccttcaacaacagcattatccccgaggacacattcttcccaagccccgagagcagctgcgacgtgaagctggtggaaaagagcttcgagacagacaccaacctgaacttccagatcctgtacgagatcctgctgggcaaggccaccctgtacgccgtgctggtgtctgccctggtgctgatggctatggtcaagcggaaggacagccggggacgcgccaagagaagcggatctggcgtgaagcagaccctgaatttcgacctgctgaagctggctggcgacgtggaatccaacccaggccctactagtatggactggatttggcgcatccttttccttgtcggcgctgctaccggcgcgcattccgggccccagctccagctgcaagagtctggacctggcctggtcaagcctagcgagacactgagcctgacctgtaccgtgtccggcgatagcatcagcagcggcgattactactggggctggatcagacagcctcctggcaaaggactggaatggatcggccacatctactacagcggcgtgacctactacaaccccagcctgaagtccagagtgaccatcagcgtggacaccagccggaaccagttctccctgaagctgtctagcgtgacagccgccgataccgccgtgtactactgcaccagagaggacagcagcaactggcggagtagaggccagggaacactggtcacagttagctctggatccggcggaggcggaagtggaggcggaggatctggcggcggaggctctttcgaacaggtgcaactccagcagtctggcgctgagcttgtgcggcctggcacctctgtgaaggtgtcctgtaaagccagcggctacgtgttcaccaactactggatcgagtggatcaagcagcggccaggccagggcctggaatggatcggcgtgatgaatccaggcagcggcgagacaacctacaacgagaagttcaagggcaaggccaccctgaccgccgacaagagcagcagcacagcctacatgcaactgtcctccctgaccagcgtggacagcgccgtgtacttctgcgccagggaccacgaccgggactactacgctatggactactggggccagggcaccagcgtgaccgtgtcatctacgcgtgaggacctgaagaacgtgttcccacctgaggtggccgtgttcgagcctagcgaggccgagatcagccacacccagaaagccaccctcgtgtgcctggctaccggcttctaccccgaccatgtggaactgtcttggtgggtcaacggcaaagaggtgcacagcggcgtgtgtaccgacccccagccactgaaagaacagcccgccctgaacgacagccggtactgcctgagcagcagactgagagtgtccgccaccttctggcagaacccccggaaccacttcagatgccaggtgcagttctacggcctgagcgagaacgacgagtggacccaggacagagccaagcccgtgacccagatcgtgtctgccgaagcctggggcagagccgattgcggctttaccagcgagagctaccagcagggcgtgctgagcgccaccaacctgagcgtgatcggcttcagaatcctgctgctgaaagtggccggctttaacctgctgatgaccctgcggctgtggtccagc

SEQ ID NO: 5880 - DNA, 2679 bp, synthetic construct
  source 1..2679: mol_type = other DNA
atggccttaccagtgaccgccttgctcctgccgctggccttgctgctccacgccgccaggccggaagtgcagctggttgaatctggcggaggactggttcagcctggcggatctctgagactgtcttgtgccgccagcggcttcagcttcagcgacttttggatgagctgggtccgacaggcccctggcaaaggacttgaatgggtcgccacaatcagccaggccggcagcgagaaggactacgtggactctgtgaagggcagattcaccatcagccgggacaacgccaagaagtccctgtacctccagatgaacagcctgagagccgaggacaccgccgtgtactattgtgcctctggcgtgtacagcttcgactacagaggccagggcaccctggtcacagtctcttctggtaccggcggaggcggatctggcggcggaggtagcggtggcggaggatctgaattcgacatcctgctgacacagagccccgccatcctgtccgtgtctccaggcgagagagtgtcctttagctgccgggccagccagaacatcggcaccagcatccactggtatcagcagcggaccaacggcagccccagactgctgattaagtacgccagcgagtccgtgtccggcatccccagcagattttctggcagcggctccggcaccgacttcaccctgagcatcaacagcgtggaaagcgaggacattgccgactactactgccagcacaccaatagctggcccaccacctttggcggaggcaccaagctggaaatcaagagactcgagatccagaaccctgatcctgccgtgtaccagctgcgggatagcaagagcagcgacaagagcgtgtgtctgttcaccgacttcgacagccagaccaacgtgtcccagagcaaggactccgacgtgtacatcaccgataagtgcgtgctggacatgcggagcatggacttcaagagcaactccgccgtggcctggtccaacaagtccgatttcgcctgcgccaacgccttcaacaacagcattatccccgaggacacattcttcccaagccccgagagcagctgcgacgtgaagctggtggaaaagagcttcgagacagacaccaacctgaacttccagatcctgtacgagatcctgctgggcaaggccaccctgtacgccgtgctggtgtctgccctggtgctgatggctatggtcaagcggaaggacagccggggacgcgccaagagaagcggatctggcgtgaagcagaccctgaatttcgacctgctgaagctggctggcgacgtggaatccaacccaggccctactagtatggactggatttggcgcatccttttccttgtcggcgctgctaccggcgcgcattccgggccccagctccagctgcaagagtctggacctggcctggtcaagcctagcgagacactgagcctgacctgtaccgtgtccggcgatagcatcagcagcggcgattactactggggctggatcagacagcctcctggcaaaggactggaatggatcggccacatctactacagcggcgtgacctactacaaccccagcctgaagtccagagtgaccatcagcgtggacaccagccggaaccagttctccctgaagctgtctagcgtgacagccgccgataccgccgtgtactactgcaccagagaggacagcagcaactggcggagtagaggccagggaacactggtcacagttagctctggatccggcggaggcggaagtggaggcggaggatctggcggcggaggctctttcgaacaggtgcaactccagcagtccgacgccgagcttgtgaagcctggcgcttccgtgaagattagctgcaaggccagcggctacaccttcaccgaccacgccattcactgggtcaagcagaagcccgagcagggcctggaatggatcggctacttcagccccggcaacggcgacatcaagtacaacgagaagttcaagggcaaggccaccctgaccgccgacaagagcagcagcacagcctacatgcaactgaacagcctgaccagcgaggactccgccgtgtacttctgcaagcggagctacggcaactacgactactggggccagggcaccacactgaccgtgtctagtacgcgtgaggacctgaagaacgtgttcccacctgaggtggccgtgttcgagcctagcgaggccgagatcagccacacccagaaagccaccctcgtgtgcctggctaccggcttctaccccgaccatgtggaactgtcttggtgggtcaacggcaaagaggtgcacagcggcgtgtgtaccgacccccagccactgaaagaacagcccgccctgaacgacagccggtactgcctgagcagcagactgagagtgtccgccaccttctggcagaacccccggaaccacttcagatgccaggtgcagttctacggcctgagcgagaacgacgagtggacccaggacagagccaagcccgtgacccagatcgtgtctgccgaagcctggggcagagccgattgcggctttaccagcgagagctaccagcagggcgtgctgagcgccaccaacctgagcgtgatcggcttcagaatcctgctgctgaaagtggccggctttaacctgctgatgaccctgcggctgtggtccagc

SEQ ID NO: 5881 - DNA, 2694 bp, synthetic construct
  source 1..2694: mol_type = other DNA
atggccttaccagtgaccgccttgctcctgccgctggccttgctgctccacgccgccaggccggaagtgcagctggttgaatctggcggaggactggttcagcctggcggatctctgagactgtcttgtgccgccagcggcttcagcttcagcgacttttggatgagctgggtccgacaggcccctggcaaaggacttgaatgggtcgccacaatcagccaggccggcagcgagaaggactacgtggactctgtgaagggcagattcaccatcagccgggacaacgccaagaagtccctgtacctccagatgaacagcctgagagccgaggacaccgccgtgtactattgtgcctctggcgtgtacagcttcgactacagaggccagggcaccctggtcacagtctcttctggtaccggcggaggcggatctggcggcggaggtagcggtggcggaggatctgaattcgacatcgtgatgacccagagccccgatagcctggccgtgtctctgggagagagagccaccatcaactgcaagagcagccagagcctgctgaacagcggcgaccagaagaactacctgacctggtatcagcagaagcccggccagccccccaagctgctgatctactgggccagcaccagagaaagcggcgtgcccgatagattcagcggcagcggaagtggcaccgacttcaccctgaccatcagttctcttcaggccgaggacgtggccgtgtactactgccagaacgactacagctaccccctgaccttcggccagggcaccaaggtggaaatcaagctcgagatccagaaccctgatcctgccgtgtaccagctgcgggatagcaagagcagcgacaagagcgtgtgtctgttcaccgacttcgacagccagaccaacgtgtcccagagcaaggactccgacgtgtacatcaccgataagtgcgtgctggacatgcggagcatggacttcaagagcaactccgccgtggcctggtccaacaagtccgatttcgcctgcgccaacgccttcaacaacagcattatccccgaggacacattcttcccaagccccgagagcagctgcgacgtgaagctggtggaaaagagcttcgagacagacaccaacctgaacttccagatcctgtacgagatcctgctgggcaaggccaccctgtacgccgtgctggtgtctgccctggtgctgatggctatggtcaagcggaaggacagccggggacgcgccaagagaagcggatctggcgtgaagcagaccctgaatttcgacctgctgaagctggctggcgacgtggaatccaacccaggccctactagtatggactggatttggcgcatccttttccttgtcggcgctgctaccggcgcgcattccgggccccagctccagctgcaagagtctggacctggcctggtcaagcctagcgagacactgagcctgacctgtaccgtgtccggcgatagcatcagcagcggcgattactactggggctggatcagacagcctcctggcaaaggactggaatggatcggccacatctactacagcggcgtgacctactacaaccccagcctgaagtccagagtgaccatcagcgtggacaccagccggaaccagttctccctgaagctgtctagcgtgacagccgccgataccgccgtgtactactgcaccagagaggacagcagcaactggcggagtagaggccagggaacactggtcacagttagctctggatccggcggaggcggaagtggaggcggaggatctggcggcggaggctctttcgaacaggtgcagctggtgcagtctggggccgaagtgaagaaaaccggcagcagcgtgaaggtgtcctgcaaggccagcggctacacctttaccgaccacgccattcacgtgtggcggcaggctccaggacaggccctggaatggatgggccacttcagccccggcaacaccgacatcaagtacaacgacaagttcaagggcagagtgaccctgaccgtggaccgcagcatgagcaccgcctacatggaactgagcagcctgcggagcgaggacaccgccatgtactattgcaagaccagcaccttctttttcgactactggggccagggaacaatggtcaccgtgtccagcacgcgtgaggacctgaagaacgtgttcccacctgaggtggccgtgttcgagcctagcgaggccgagatcagccacacccagaaagccaccctcgtgtgcctggctaccggcttctaccccgaccatgtggaactgtcttggtgggtcaacggcaaagaggtgcacagcggcgtgtgtaccgacccccagccactgaaagaacagcccgccctgaacgacagccggtactgcctgagcagcagactgagagtgtccgccaccttctggcagaacccccggaaccacttcagatgccaggtgcagttctacggcctgagcgagaacgacgagtggacccaggacagagccaagcccgtgacccagatcgtgtctgccgaagcctggggcagagccgattgcggctttaccagcgagagctaccagcagggcgtgctgagcgccaccaacctgagcgtgatcggcttcagaatcctgctgctgaaagtggccggctttaacctgctgatgaccctgcggctgtggtccagc

SEQ ID NO: 5882 - DNA, 2691 bp, synthetic construct
  source 1..2691: mol_type = other DNA
atggccttaccagtgaccgccttgctcctgccgctggccttgctgctccacgccgccaggccggaagtgcagctggttgaatctggcggaggactggttcagcctggcggatctctgagactgtcttgtgccgccagcggcttcagcttcagcgacttttggatgagctgggtccgacaggcccctggcaaaggacttgaatgggtcgccacaatcagccaggccggcagcgagaaggactacgtggactctgtgaagggcagattcaccatcagccgggacaacgccaagaagtccctgtacctccagatgaacagcctgagagccgaggacaccgccgtgtactattgtgcctctggcgtgtacagcttcgactacagaggccagggcaccctggtcacagtctcttctggtaccggcggaggcggatctggcggcggaggtagcggtggcggaggatctgaattcgacatccagatgacccagagccccagcagcctgtctgccagcgtgggcgacagagtgaccatcacatgcaaggccagccaggacgtgtccattgccgtggcctggtatcagcagaagcccggcaaggcccccaaggtgctgatctacagcgccagctacagatacaccggcgtgcccgacagattcagcggctctggcagcggcaccgacttcaccttcaccatcagctccctccagcccgaggatattgccgtgtactactgccagcagcactacatcacccccctgacctttggcggaggcaccaaggtggaaatcaagctcgagatccagaaccctgatcctgccgtgtaccagctgcgggatagcaagagcagcgacaagagcgtgtgtctgttcaccgacttcgacagccagaccaacgtgtcccagagcaaggactccgacgtgtacatcaccgataagtgcgtgctggacatgcggagcatggacttcaagagcaactccgccgtggcctggtccaacaagtccgatttcgcctgcgccaacgccttcaacaacagcattatccccgaggacacattcttcccaagccccgagagcagctgcgacgtgaagctggtggaaaagagcttcgagacagacaccaacctgaacttccagatcctgtacgagatcctgctgggcaaggccaccctgtacgccgtgctggtgtctgccctggtgctgatggctatggtcaagcggaaggacagccggggacgcgccaagagaagcggatctggcgtgaagcagaccctgaatttcgacctgctgaagctggctggcgacgtggaatccaacccaggccctactagtatggactggatttggcgcatccttttccttgtcggcgctgctaccggcgcgcattccgggccccagctccagctgcaagagtctggacctggcctggtcaagcctagcgagacactgagcctgacctgtaccgtgtccggcgatagcatcagcagcggcgattactactggggctggatcagacagcctcctggcaaaggactggaatggatcggccacatctactacagcggcgtgacctactacaaccccagcctgaagtccagagtgaccatcagcgtggacaccagccggaaccagttctccctgaagctgtctagcgtgacagccgccgataccgccgtgtactactgcaccagagaggacagcagcaactggcggagtagaggccagggaacactggtcacagttagctctggatccggcggaggcggaagtggaggcggaggatctggcggcggaggctctttcgaacagatccaactggtgcagagcggccacgaagtgaagaaacctggggccagcgtgaaggtgtcctgcaaagccagcggctacacctttaccaactacggcatgaactgggtgcgccaggcccctggacagggcctggaatggatgggctggatcaacaccaagaccggcgagcccacctacgccgaagagttcaagggcagattcgtgttcagcctggaaaccagcgcctccaccgcctacctccagatcagctctctgaaggccgaggacaccgccatgtacttttgcggcagaggcggctacggcagcagctactggtacttcgatgtgtggggccagggcaccaccgtgaccgtgtcatctacgcgtgaggacctgaagaacgtgttcccacctgaggtggccgtgttcgagcctagcgaggccgagatcagccacacccagaaagccaccctcgtgtgcctggctaccggcttctaccccgaccatgtggaactgtcttggtgggtcaacggcaaagaggtgcacagcggcgtgtgtaccgacccccagccactgaaagaacagcccgccctgaacgacagccggtactgcctgagcagcagactgagagtgtccgccaccttctggcagaacccccggaaccacttcagatgccaggtgcagttctacggcctgagcgagaacgacgagtggacccaggacagagccaagcccgtgacccagatcgtgtctgccgaagcctggggcagagccgattgcggctttaccagcgagagctaccagcagggcgtgctgagcgccaccaacctgagcgtgatcggcttcagaatcctgctgctgaaagtggccggctttaacctgctgatgaccctgcggctgtggtccagc

SEQ ID NO: 5883 - DNA, 2697 bp, synthetic construct
  source 1..2697: mol_type = other DNA
atggccttaccagtgaccgccttgctcctgccgctggccttgctgctccacgccgccaggccggaagtgcagctggttgaatctggcggaggactggttcagcctggcggatctctgagactgtcttgtgccgccagcggcttcagcttcagcgacttttggatgagctgggtccgacaggcccctggcaaaggacttgaatgggtcgccacaatcagccaggccggcagcgagaaggactacgtggactctgtgaagggcagattcaccatcagccgggacaacgccaagaagtccctgtacctccagatgaacagcctgagagccgaggacaccgccgtgtactattgtgcctctggcgtgtacagcttcgactacagaggccagggcaccctggtcacagtctcttctggtaccggcggaggcggatctggcggcggaggtagcggtggcggaggatctgaattcgacatcgtgatgacccagagccccgatagcctggccgtgtctctgggagagagagccaccatcaactgccgggccagcaagagcgtgtccaccagcggctacagctacatgcactggtatcagcagaagcccggccagccccccaagctgctgatctacctggcctccaacctggaaagcggcgtgcccgatagattcagcggcagcggctctggcaccgacttcaccctgaccatcagttctcttcaggccgaggacgtggccgtgtactactgccagcacagcagagagctgccctacaccttcggccagggcaccaagctggaaatcaagctcgagatccagaaccctgatcctgccgtgtaccagctgcgggatagcaagagcagcgacaagagcgtgtgtctgttcaccgacttcgacagccagaccaacgtgtcccagagcaaggactccgacgtgtacatcaccgataagtgcgtgctggacatgcggagcatggacttcaagagcaactccgccgtggcctggtccaacaagtccgatttcgcctgcgccaacgccttcaacaacagcattatccccgaggacacattcttcccaagccccgagagcagctgcgacgtgaagctggtggaaaagagcttcgagacagacaccaacctgaacttccagatcctgtacgagatcctgctgggcaaggccaccctgtacgccgtgctggtgtctgccctggtgctgatggctatggtcaagcggaaggacagccggggacgcgccaagagaagcggatctggcgtgaagcagaccctgaatttcgacctgctgaagctggctggcgacgtggaatccaacccaggccctactagtatggactggatttggcgcatccttttccttgtcggcgctgctaccggcgcgcattccgggccccagctccagctgcaagagtctggacctggcctggtcaagcctagcgagacactgagcctgacctgtaccgtgtccggcgatagcatcagcagcggcgattactactggggctggatcagacagcctcctggcaaaggactggaatggatcggccacatctactacagcggcgtgacctactacaaccccagcctgaagtccagagtgaccatcagcgtggacaccagccggaaccagttctccctgaagctgtctagcgtgacagccgccgataccgccgtgtactactgcaccagagaggacagcagcaactggcggagtagaggccagggaacactggtcacagttagctctggatccggcggaggcggaagtggaggcggaggatctggcggcggaggctctttcgaacaggtgcaactccaggaatctggccctggccttgtgaagcccagcgagacactgagcctgacctgtaccgtgtccggcggcagcatcagctcttacggcgtgcactggattcggcagcctccaggcaagggcctggaatggatcggcgtgatctggacctccggcgtgaccgactacaacagcgccctgatgggcagagtgaccatctccgtggacaccagcaagaaccagttcagcctgaagctgagcagcgtgacagccgccgataccgccgtgtattattgcgccagagatggcgactacgaccgctacacaatggactactggggccagggaacccttgtgaccgtgtcctctacgcgtgaggacctgaagaacgtgttcccacctgaggtggccgtgttcgagcctagcgaggccgagatcagccacacccagaaagccaccctcgtgtgcctggctaccggcttctaccccgaccatgtggaactgtcttggtgggtcaacggcaaagaggtgcacagcggcgtgtgtaccgacccccagccactgaaagaacagcccgccctgaacgacagccggtactgcctgagcagcagactgagagtgtccgccaccttctggcagaacccccggaaccacttcagatgccaggtgcagttctacggcctgagcgagaacgacgagtggacccaggacagagccaagcccgtgacccagatcgtgtctgccgaagcctggggcagagccgattgcggctttaccagcgagagctaccagcagggcgtgctgagcgccaccaacctgagcgtgatcggcttcagaatcctgctgctgaaagtggccggctttaacctgctgatgaccctgcggctgtggtccagc

SEQ ID NO: 5884 - DNA, 2697 bp, synthetic construct
  source 1..2697: mol_type = other DNA
atggccttaccagtgaccgccttgctcctgccgctggccttgctgctccacgccgccaggccggaagtgcagctggttgaatctggcggaggactggttcagcctggcggatctctgagactgtcttgtgccgccagcggcttcagcttcagcgacttttggatgagctgggtccgacaggcccctggcaaaggacttgaatgggtcgccacaatcagccaggccggcagcgagaaggactacgtggactctgtgaagggcagattcaccatcagccgggacaacgccaagaagtccctgtacctccagatgaacagcctgagagccgaggacaccgccgtgtactattgtgcctctggcgtgtacagcttcgactacagaggccagggcaccctggtcacagtctcttctggtaccggcggaggcggatctggcggcggaggtagcggtggcggaggatctgaattcgacatccagatgacccagagccccagcagcctgtctgccagcgtgggcgacagagtgaccatcacctgtagagccagccagagcatcggcaccagcctgcactggtatcagcagaagcctggcaaggcccccaagctgctgattaagttcgccagcagactgcagagcggcgtgcccagcagattttctggcagcggctccggcaccgacttcaccctgacaatcagctccctgcagcccgaggacttcgccacctactactgccagcagagccccggcttccctccaacctttggacagggcaccaagctggaaatcaagcggctcgagatccagaaccctgatcctgccgtgtaccagctgcgggatagcaagagcagcgacaagagcgtgtgtctgttcaccgacttcgacagccagaccaacgtgtcccagagcaaggactccgacgtgtacatcaccgataagtgcgtgctggacatgcggagcatggacttcaagagcaactccgccgtggcctggtccaacaagtccgatttcgcctgcgccaacgccttcaacaacagcattatccccgaggacacattcttcccaagccccgagagcagctgcgacgtgaagctggtggaaaagagcttcgagacagacaccaacctgaacttccagatcctgtacgagatcctgctgggcaaggccaccctgtacgccgtgctggtgtctgccctggtgctgatggctatggtcaagcggaaggacagccggggacgcgccaagagaagcggatctggcgtgaagcagaccctgaatttcgacctgctgaagctggctggcgacgtggaatccaacccaggccctactagtatggactggatttggcgcatccttttccttgtcggcgctgctaccggcgcgcattccgggccccagctccagctgcaagagtctggacctggcctggtcaagcctagcgagacactgagcctgacctgtaccgtgtccggcgatagcatcagcagcggcgattactactggggctggatcagacagcctcctggcaaaggactggaatggatcggccacatctactacagcggcgtgacctactacaaccccagcctgaagtccagagtgaccatcagcgtggacaccagccggaaccagttctccctgaagctgtctagcgtgacagccgccgataccgccgtgtactactgcaccagagaggacagcagcaactggcggagtagaggccagggaacactggtcacagttagctctggatccggcggaggcggaagtggaggcggaggatctggcggcggaggctctttcgaacaggtgcaactggtggaatctggcggcggacttgtgaagccaggcggcagcctgagactgagctgtgccgccagcggcttcagcatcaccaccagcggctactactggacctggatcagacagttccccggcaagggcctggaatggatgggctacatcggctacaacagcaagacctactacaaccccgccctgaagtcccggatcaccatcagcagagacaacgccaagaacagcctgtacctgcagatgaactccctgagagccgaggataccgccgtgtactactgcgccagatccctgtacggcggctacaaggacgccttcgatagctggggccagggaacccttgtgaccgtgtctagcacgcgtgaggacctgaagaacgtgttcccacctgaggtggccgtgttcgagcctagcgaggccgagatcagccacacccagaaagccaccctcgtgtgcctggctaccggcttctaccccgaccatgtggaactgtcttggtgggtcaacggcaaagaggtgcacagcggcgtgtgtaccgacccccagccactgaaagaacagcccgccctgaacgacagccggtactgcctgagcagcagactgagagtgtccgccaccttctggcagaacccccggaaccacttcagatgccaggtgcagttctacggcctgagcgagaacgacgagtggacccaggacagagccaagcccgtgacccagatcgtgtctgccgaagcctggggcagagccgattgcggctttaccagcgagagctaccagcagggcgtgctgagcgccaccaacctgagcgtgatcggcttcagaatcctgctgctgaaagtggccggctttaacctgctgatgaccctgcggctgtggtccagc

SEQ ID NO: 5885 - DNA, 2712 bp, synthetic construct
  source 1..2712: mol_type = other DNA
atggccttaccagtgaccgccttgctcctgccgctggccttgctgctccacgccgccaggccggaagtgcagctggttgaatctggcggaggactggttcagcctggcggatctctgagactgtcttgtgccgccagcggcttcagcttcagcgacttttggatgagctgggtccgacaggcccctggcaaaggacttgaatgggtcgccacaatcagccaggccggcagcgagaaggactacgtggactctgtgaagggcagattcaccatcagccgggacaacgccaagaagtccctgtacctccagatgaacagcctgagagccgaggacaccgccgtgtactattgtgcctctggcgtgtacagcttcgactacagaggccagggcaccctggtcacagtctcttctggtaccggcggaggcggatctggcggcggaggtagcggtggcggaggatctgaattcgacgagatcgtgctgacccagagccctctgagcctgcctgtgacacctggcgagcctgccagcatctcctgtagaagcagccagagcctgctgcacagcatcggctacaactacctggactggtatctccagaagcccggccagagcccccaactgctgatctacctgggcagcaacagagccagcggcgtgcccgatagattttccggcagcggctccggcaccgacttcaccctgaagatcagccgggtggaagccgaggacgtgggcgtgtactactgtatgcaggccctccagacccccctgacctttggcggaggcaccaaggtggaaatcaagcggctcgagatccagaaccctgatcctgccgtgtaccagctgcgggatagcaagagcagcgacaagagcgtgtgtctgttcaccgacttcgacagccagaccaacgtgtcccagagcaaggactccgacgtgtacatcaccgataagtgcgtgctggacatgcggagcatggacttcaagagcaactccgccgtggcctggtccaacaagtccgatttcgcctgcgccaacgccttcaacaacagcattatccccgaggacacattcttcccaagccccgagagcagctgcgacgtgaagctggtggaaaagagcttcgagacagacaccaacctgaacttccagatcctgtacgagatcctgctgggcaaggccaccctgtacgccgtgctggtgtctgccctggtgctgatggctatggtcaagcggaaggacagccggggacgcgccaagagaagcggatctggcgtgaagcagaccctgaatttcgacctgctgaagctggctggcgacgtggaatccaacccaggccctactagtatggactggatttggcgcatccttttccttgtcggcgctgctaccggcgcgcattccgggccccagctccagctgcaagagtctggacctggcctggtcaagcctagcgagacactgagcctgacctgtaccgtgtccggcgatagcatcagcagcggcgattactactggggctggatcagacagcctcctggcaaaggactggaatggatcggccacatctactacagcggcgtgacctactacaaccccagcctgaagtccagagtgaccatcagcgtggacaccagccggaaccagttctccctgaagctgtctagcgtgacagccgccgataccgccgtgtactactgcaccagagaggacagcagcaactggcggagtagaggccagggaacactggtcacagttagctctggatccggcggaggcggaagtggaggcggaggatctggcggcggaggctctttcgaagaagtgcaactggtggaaagcggaggcggcgtggtgcagcctggaagaagcctgagactgagctgtgccgccagcggcttcaccttccggtcctacggaatgcactgggtgcgccaggcccctggcaaaggactggaatgggtggccgtgatctcctacgacggctccaacaagtactacaccgacagcgtgaacggcagattcaccatcagcagagacaacagcaagaacaccctgtacctccagatgaacagcctgcgggccgaggacaccgccgtgtactattgtgctagaggcggaggctactacgagacaagcggccctgattactggggccagggcacactcgtgaccgtgtctagtacgcgtgaggacctgaagaacgtgttcccacctgaggtggccgtgttcgagcctagcgaggccgagatcagccacacccagaaagccaccctcgtgtgcctggctaccggcttctaccccgaccatgtggaactgtcttggtgggtcaacggcaaagaggtgcacagcggcgtgtgtaccgacccccagccactgaaagaacagcccgccctgaacgacagccggtactgcctgagcagcagactgagagtgtccgccaccttctggcagaacccccggaaccacttcagatgccaggtgcagttctacggcctgagcgagaacgacgagtggacccaggacagagccaagcccgtgacccagatcgtgtctgccgaagcctggggcagagccgattgcggctttaccagcgagagctaccagcagggcgtgctgagcgccaccaacctgagcgtgatcggcttcagaatcctgctgctgaaagtggccggctttaacctgctgatgaccctgcggctgtggtccagc

SEQ ID NO: 5886 - DNA, 2706 bp, synthetic construct
  source 1..2706: mol_type = other DNA
atggccttaccagtgaccgccttgctcctgccgctggccttgctgctccacgccgccaggccggaagtgcagctggttgaatctggcggaggactggttcagcctggcggatctctgagactgtcttgtgccgccagcggcttcagcttcagcgacttttggatgagctgggtccgacaggcccctggcaaaggacttgaatgggtcgccacaatcagccaggccggcagcgagaaggactacgtggactctgtgaagggcagattcaccatcagccgggacaacgccaagaagtccctgtacctccagatgaacagcctgagagccgaggacaccgccgtgtactattgtgcctctggcgtgtacagcttcgactacagaggccagggcaccctggtcacagtctcttctggtaccggcggaggcggatctggcggcggaggtagcggtggcggaggatctgaattcgacgacgtcgtgatgacccagagccctctgagcctgcctgtgacacctggcgagcctgccagcatctcctgtagaagcagccagagcctgctgcacagcatcggctacaactacctgcactggtttctccagaagcccggccagagcccccaactgctgatctacctgggcagcaacagagccagcggcgtgcccgatagattttccggcagcggctccggcaccgacttcaccctgaagatcagccgggtggaagccgaggacgtgggcgtgtactactgtatgcaggccctccagacccctcccacctttggacagggcaccagactggaaatcaagcggctcgagatccagaaccctgatcctgccgtgtaccagctgcgggatagcaagagcagcgacaagagcgtgtgtctgttcaccgacttcgacagccagaccaacgtgtcccagagcaaggactccgacgtgtacatcaccgataagtgcgtgctggacatgcggagcatggacttcaagagcaactccgccgtggcctggtccaacaagtccgatttcgcctgcgccaacgccttcaacaacagcattatccccgaggacacattcttcccaagccccgagagcagctgcgacgtgaagctggtggaaaagagcttcgagacagacaccaacctgaacttccagatcctgtacgagatcctgctgggcaaggccaccctgtacgccgtgctggtgtctgccctggtgctgatggctatggtcaagcggaaggacagccggggacgcgccaagagaagcggatctggcgtgaagcagaccctgaatttcgacctgctgaagctggctggcgacgtggaatccaacccaggccctactagtatggactggatttggcgcatccttttccttgtcggcgctgctaccggcgcgcattccgggccccagctccagctgcaagagtctggacctggcctggtcaagcctagcgagacactgagcctgacctgtaccgtgtccggcgatagcatcagcagcggcgattactactggggctggatcagacagcctcctggcaaaggactggaatggatcggccacatctactacagcggcgtgacctactacaaccccagcctgaagtccagagtgaccatcagcgtggacaccagccggaaccagttctccctgaagctgtctagcgtgacagccgccgataccgccgtgtactactgcaccagagaggacagcagcaactggcggagtagaggccagggaacactggtcacagttagctctggatccggcggaggcggaagtggaggcggaggatctggcggcggaggctctttcgaacaactccaactccaggaaagcggccctggcctcgtgaagcctagcggcacactgagcctgacatgtgccgtgtctggcggcagcatcagcagcagcaactggtggtcttgggtgcgccagcctcctggcaagggcctggaatggatcggcgaaatctaccacagcggcagcaccaactacaaccccagcctgaagtccagagtgaccatcagcgtggacaagagcaagaaccagttctccctgaagctgagcagcgtgacagccgccgataccgccgtgtactattgcgtgggcagcccctacggcgactacgtgctggattattggggccagggcaccctcgtgaccgtgtctagtacgcgtgaggacctgaagaacgtgttcccacctgaggtggccgtgttcgagcctagcgaggccgagatcagccacacccagaaagccaccctcgtgtgcctggctaccggcttctaccccgaccatgtggaactgtcttggtgggtcaacggcaaagaggtgcacagcggcgtgtgtaccgacccccagccactgaaagaacagcccgccctgaacgacagccggtactgcctgagcagcagactgagagtgtccgccaccttctggcagaacccccggaaccacttcagatgccaggtgcagttctacggcctgagcgagaacgacgagtggacccaggacagagccaagcccgtgacccagatcgtgtctgccgaagcctggggcagagccgattgcggctttaccagcgagagctaccagcagggcgtgctgagcgccaccaacctgagcgtgatcggcttcagaatcctgctgctgaaagtggccggctttaacctgctgatgaccctgcggctgtggtccagc

SEQ ID NO: 5887 - DNA, 2700 bp, synthetic construct
  source 1..2700: mol_type = other DNA
atggccttaccagtgaccgccttgctcctgccgctggccttgctgctccacgccgccaggccggaagtgcagctggttgaatctggcggaggactggttcagcctggcggatctctgagactgtcttgtgccgccagcggcttcagcttcagcgacttttggatgagctgggtccgacaggcccctggcaaaggacttgaatgggtcgccacaatcagccaggccggcagcgagaaggactacgtggactctgtgaagggcagattcaccatcagccgggacaacgccaagaagtccctgtacctccagatgaacagcctgagagccgaggacaccgccgtgtactattgtgcctctggcgtgtacagcttcgactacagaggccagggcaccctggtcacagtctcttctggtaccggcggaggcggatctggcggcggaggtagcggtggcggaggatctgaattcgacgagatcgtgctgacacagagccctggcaccctgagcctgtctctgggagagagagccacactgagctgtcgggccagccagtctatcagcagcagcttcctggcctggtatcagcagaagcccggccaggcccctaagctgctgatctacgccgccagcacaagagccaccggcatccccgatagattcagcggctctggcagcggcaccgacttcaccctgaccatcagcagactggaacccgaggacttcgccgtgtactactgccagcagtacggcagaagcctgagcttcggcggaggcaccaaggtggaagtgaagctcgagatccagaaccctgatcctgccgtgtaccagctgcgggatagcaagagcagcgacaagagcgtgtgtctgttcaccgacttcgacagccagaccaacgtgtcccagagcaaggactccgacgtgtacatcaccgataagtgcgtgctggacatgcggagcatggacttcaagagcaactccgccgtggcctggtccaacaagtccgatttcgcctgcgccaacgccttcaacaacagcattatccccgaggacacattcttcccaagccccgagagcagctgcgacgtgaagctggtggaaaagagcttcgagacagacaccaacctgaacttccagatcctgtacgagatcctgctgggcaaggccaccctgtacgccgtgctggtgtctgccctggtgctgatggctatggtcaagcggaaggacagccggggacgcgccaagagaagcggatctggcgtgaagcagaccctgaatttcgacctgctgaagctggctggcgacgtggaatccaacccaggccctactagtatggactggatttggcgcatccttttccttgtcggcgctgctaccggcgcgcattccgggccccagctccagctgcaagagtctggacctggcctggtcaagcctagcgagacactgagcctgacctgtaccgtgtccggcgatagcatcagcagcggcgattactactggggctggatcagacagcctcctggcaaaggactggaatggatcggccacatctactacagcggcgtgacctactacaaccccagcctgaagtccagagtgaccatcagcgtggacaccagccggaaccagttctccctgaagctgtctagcgtgacagccgccgataccgccgtgtactactgcaccagagaggacagcagcaactggcggagtagaggccagggaacactggtcacagttagctctggatccggcggaggcggaagtggaggcggaggatctggcggcggaggctctttcgaacaggtgcaactccagcagtctggccccggactcgtgaagcctagccagacactgagcctgacctgcgccatcagcggcgatagcgtgtccggcaatagcgccacctggaactggatcagacagagcccatctcggggcctggaatggctgggccggacctactaccgcagcaagtggaaccacgactacgccgagagcgtgaagtcccggatcaccatcaaccccgacaccagcaagaaccagttctccttgcaactgaacagcgtgacccccgaggacacagccgtgtattattgcgccagaggcgacagcagctcttggtacgccttcgactattggggccagggcaccctcgtgaccgtgtctagtacgcgtgaggacctgaagaacgtgttcccacctgaggtggccgtgttcgagcctagcgaggccgagatcagccacacccagaaagccaccctcgtgtgcctggctaccggcttctaccccgaccatgtggaactgtcttggtgggtcaacggcaaagaggtgcacagcggcgtgtgtaccgacccccagccactgaaagaacagcccgccctgaacgacagccggtactgcctgagcagcagactgagagtgtccgccaccttctggcagaacccccggaaccacttcagatgccaggtgcagttctacggcctgagcgagaacgacgagtggacccaggacagagccaagcccgtgacccagatcgtgtctgccgaagcctggggcagagccgattgcggctttaccagcgagagctaccagcagggcgtgctgagcgccaccaacctgagcgtgatcggcttcagaatcctgctgctgaaagtggccggctttaacctgctgatgaccctgcggctgtggtccagc

SEQ ID NO: 5888 - DNA, 2697 bp, synthetic construct
  source 1..2697: mol_type = other DNA
atggccttaccagtgaccgccttgctcctgccgctggccttgctgctccacgccgccaggccggaagtgcagctggttgaatctggcggaggactggttcagcctggcggatctctgagactgtcttgtgccgccagcggcttcagcttcagcgacttttggatgagctgggtccgacaggcccctggcaaaggacttgaatgggtcgccacaatcagccaggccggcagcgagaaggactacgtggactctgtgaagggcagattcaccatcagccgggacaacgccaagaagtccctgtacctccagatgaacagcctgagagccgaggacaccgccgtgtactattgtgcctctggcgtgtacagcttcgactacagaggccagggcaccctggtcacagtctcttctggtaccggcggaggcggatctggcggcggaggtagcggtggcggaggatctgaattcgaccagagcgtcgtgacacagcctcctagcgtgtcagtggcccctggcaagaccgccagaatcacctgtggccggaacaacatcggcagcaagagcgtgcactggtatcagcagaagcccggccaggctcctgtgctggtggtgtacgacgacagcgacagacccagcggcatccccgagagattcagcggcagcaactccggcaataccgccaccctgaccatcagcagagtggaagccggcgacgaggccgactactactgccaagtgtgggacagcagcagcgatcacgtggtgtttggcggaggcaccaagctgacagtgctgggtctcgagatccagaaccctgatcctgccgtgtaccagctgcgggatagcaagagcagcgacaagagcgtgtgtctgttcaccgacttcgacagccagaccaacgtgtcccagagcaaggactccgacgtgtacatcaccgataagtgcgtgctggacatgcggagcatggacttcaagagcaactccgccgtggcctggtccaacaagtccgatttcgcctgcgccaacgccttcaacaacagcattatccccgaggacacattcttcccaagccccgagagcagctgcgacgtgaagctggtggaaaagagcttcgagacagacaccaacctgaacttccagatcctgtacgagatcctgctgggcaaggccaccctgtacgccgtgctggtgtctgccctggtgctgatggctatggtcaagcggaaggacagccggggacgcgccaagagaagcggatctggcgtgaagcagaccctgaatttcgacctgctgaagctggctggcgacgtggaatccaacccaggccctactagtatggactggatttggcgcatccttttccttgtcggcgctgctaccggcgcgcattccgggccccagctccagctgcaagagtctggacctggcctggtcaagcctagcgagacactgagcctgacctgtaccgtgtccggcgatagcatcagcagcggcgattactactggggctggatcagacagcctcctggcaaaggactggaatggatcggccacatctactacagcggcgtgacctactacaaccccagcctgaagtccagagtgaccatcagcgtggacaccagccggaaccagttctccctgaagctgtctagcgtgacagccgccgataccgccgtgtactactgcaccagagaggacagcagcaactggcggagtagaggccagggaacactggtcacagttagctctggatccggcggaggcggaagtggaggcggaggatctggcggcggaggctctttcgaagtgcaactggtgcagtctggcggaggggtcatgcggcctggcggatctctgagactgtcttgtgccgccagcggcttcaccttcgacgactacggcatgagctgggtgcgccaggcccctggaaaaggcctggaatgggtgtccggcatcaactggaatggcggcagcaccggctacgccgattctgtgcggggcagattcaccatcagccgggacaacgccaagaacagcctgtacctgcagatgaactccctgcgggccgaggacaccgccctgtactattgcgccagagagcggggctacggctaccacgaccctcacgattattggggccagggcacccttgttaccgtgtcctctacgcgtgaggacctgaagaacgtgttcccacctgaggtggccgtgttcgagcctagcgaggccgagatcagccacacccagaaagccaccctcgtgtgcctggctaccggcttctaccccgaccatgtggaactgtcttggtgggtcaacggcaaagaggtgcacagcggcgtgtgtaccgacccccagccactgaaagaacagcccgccctgaacgacagccggtactgcctgagcagcagactgagagtgtccgccaccttctggcagaacccccggaaccacttcagatgccaggtgcagttctacggcctgagcgagaacgacgagtggacccaggacagagccaagcccgtgacccagatcgtgtctgccgaagcctggggcagagccgattgcggctttaccagcgagagctaccagcagggcgtgctgagcgccaccaacctgagcgtgatcggcttcagaatcctgctgctgaaagtggccggctttaacctgctgatgaccctgcggctgtggtccagc

SEQ ID NO: 5889 - DNA, 2736 bp, synthetic construct
  source 1..2736: mol_type = other DNA
atggccttaccagtgaccgccttgctcctgccgctggccttgctgctccacgccgccaggccggaagtgcagctggttgaatctggcggaggactggttcagcctggcggatctctgagactgtcttgtgccgccagcggcttcagcttcagcgacttttggatgagctgggtccgacaggcccctggcaaaggacttgaatgggtcgccacaatcagccaggccggcagcgagaaggactacgtggactctgtgaagggcagattcaccatcagccgggacaacgccaagaagtccctgtacctccagatgaacagcctgagagccgaggacaccgccgtgtactattgtgcctctggcgtgtacagcttcgactacagaggccagggcaccctggtcacagtctcttctggtaccggcggaggcggatctggcggcggaggtagcggtggcggaggatctgaattcgaacagaaactcatcagtgaagaagacctggaattccaggctgtcgtgacacagcctcctagcgcctctggcacaccaggccagagagtgaccatctcctgtagcggcagcagcagcaacatcggcagcaacaccgtgaactggtatcagcaggtgcccggcaccgctcccaagctgctgatctacagcaacaaccagcggcccagcggcgtgcccgatagattttctggcagcaagagcggcaccagcgccagcctggctatctctggactccagtccgaggacgaggccgactactattgcgccgcctgggacgatagcctgaacggctgggtgttcggcggaggcaccaagctgacagtgctgctcgagatccagaaccctgatcctgccgtgtaccagctgcgggatagcaagagcagcgacaagagcgtgtgtctgttcaccgacttcgacagccagaccaacgtgtcccagagcaaggactccgacgtgtacatcaccgataagtgcgtgctggacatgcggagcatggacttcaagagcaactccgccgtggcctggtccaacaagtccgatttcgcctgcgccaacgccttcaacaacagcattatccccgaggacacattcttcccaagccccgagagcagctgcgacgtgaagctggtggaaaagagcttcgagacagacaccaacctgaacttccagatcctgtacgagatcctgctgggcaaggccaccctgtacgccgtgctggtgtctgccctggtgctgatggctatggtcaagcggaaggacagccggggacgcgccaagagaagcggatctggcgtgaagcagaccctgaatttcgacctgctgaagctggctggcgacgtggaatccaacccaggccctactagtatggactggatttggcgcatccttttccttgtcggcgctgctaccggcgcgcattccgggccccagctccagctgcaagagtctggacctggcctggtcaagcctagcgagacactgagcctgacctgtaccgtgtccggcgatagcatcagcagcggcgattactactggggctggatcagacagcctcctggcaaaggactggaatggatcggccacatctactacagcggcgtgacctactacaaccccagcctgaagtccagagtgaccatcagcgtggacaccagccggaaccagttctccctgaagctgtctagcgtgacagccgccgataccgccgtgtactactgcaccagagaggacagcagcaactggcggagtagaggccagggaacactggtcacagttagctctggatccggcggaggcggaagtggaggcggaggatctggcggcggaggctctttcgaacagatgcaactggtgcagagcggagccgaagtgaaagagcctggcgagagcctgcggatctcctgcaagggcagcggctacagcttcaccaatttctggatctcttgggtgcgccagatgcccggcaagggcctggaatggatgggcagagtggaccccggctactcctacagcacctacagccctagcttccagggccacgtgaccatcagcgccgacaagagcaccagcaccgcctacctccagtggaacagcctgaaggccagcgacaccgccatgtactactgcgccagagtgcagtacagcggctattacgattggttcgacccctggggccagggcacactcgtgacagtgtcaagcacgcgtgaggacctgaagaacgtgttcccacctgaggtggccgtgttcgagcctagcgaggccgagatcagccacacccagaaagccaccctcgtgtgcctggctaccggcttctaccccgaccatgtggaactgtcttggtgggtcaacggcaaagaggtgcacagcggcgtgtgtaccgacccccagccactgaaagaacagcccgccctgaacgacagccggtactgcctgagcagcagactgagagtgtccgccaccttctggcagaacccccggaaccacttcagatgccaggtgcagttctacggcctgagcgagaacgacgagtggacccaggacagagccaagcccgtgacccagatcgtgtctgccgaagcctggggcagagccgattgcggctttaccagcgagagctaccagcagggcgtgctgagcgccaccaacctgagcgtgatcggcttcagaatcctgctgctgaaagtggccggctttaacctgctgatgaccctgcggctgtggtccagc

SEQ ID NO: 5890 - DNA, 2718 bp, synthetic construct
  source 1..2718: mol_type = other DNA
atggccttaccagtgaccgccttgctcctgccgctggccttgctgctccacgccgccaggccggaagtgcagctggttgaatctggcggaggactggttcagcctggcggatctctgagactgtcttgtgccgccagcggcttcagcttcagcgacttttggatgagctgggtccgacaggcccctggcaaaggacttgaatgggtcgccacaatcagccaggccggcagcgagaaggactacgtggactctgtgaagggcagattcaccatcagccgggacaacgccaagaagtccctgtacctccagatgaacagcctgagagccgaggacaccgccgtgtactattgtgcctctggcgtgtacagcttcgactacagaggccagggcaccctggtcacagtctcttctggtaccggcggaggcggatctggcggcggaggtagcggtggcggaggatctgaattcgaacagaaactcatcagtgaagaagacctggaattcgacatccagatgacccagagccccagcacactgagcgccagcgtgggcgacagagtgaccatcacctgtcgggccagccagaacatcaacaagtggctggcctggtatcagcagaggcccggaaaagccccccagctgctgatctacaaggccagcagcctggaaagcggcgtgcccagcagattttctggcagcggctctggcaccgagtacaccctgaccatcagctccctccagcccgacgacttcgccacctactactgccagcagtacaacagctacgccaccttcggccagggcaccaaggtggaaatcaagagactcgagatccagaaccctgatcctgccgtgtaccagctgcgggatagcaagagcagcgacaagagcgtgtgtctgttcaccgacttcgacagccagaccaacgtgtcccagagcaaggactccgacgtgtacatcaccgataagtgcgtgctggacatgcggagcatggacttcaagagcaactccgccgtggcctggtccaacaagtccgatttcgcctgcgccaacgccttcaacaacagcattatccccgaggacacattcttcccaagccccgagagcagctgcgacgtgaagctggtggaaaagagcttcgagacagacaccaacctgaacttccagatcctgtacgagatcctgctgggcaaggccaccctgtacgccgtgctggtgtctgccctggtgctgatggctatggtcaagcggaaggacagccggggacgcgccaagagaagcggatctggcgtgaagcagaccctgaatttcgacctgctgaagctggctggcgacgtggaatccaacccaggccctactagtatggactggatttggcgcatccttttccttgtcggcgctgctaccggcgcgcattccgggccccagctccagctgcaagagtctggacctggcctggtcaagcctagcgagacactgagcctgacctgtaccgtgtccggcgatagcatcagcagcggcgattactactggggctggatcagacagcctcctggcaaaggactggaatggatcggccacatctactacagcggcgtgacctactacaaccccagcctgaagtccagagtgaccatcagcgtggacaccagccggaaccagttctccctgaagctgtctagcgtgacagccgccgataccgccgtgtactactgcaccagagaggacagcagcaactggcggagtagaggccagggaacactggtcacagttagctctggatccggcggaggcggaagtggaggcggaggatctggcggcggaggctctttcgaacaggtgcagctggtgcagtctggggccgaagtgaagaagcctggcgagagcctgaagatcagctgcaagggctccggctacaacttctctaacaagtggatcggctgggtgcgccagctgcctggcagaggactggaatggatcgccatcatctaccccggctacagcgacatcacctacagccccagcttccagggccgcgtgacaatcagcgccgacaccagcatcaacaccgcctacctgcactggcacagcctgaaggccagcgacaccgccatgtactactgcgtgcggcatacagccctggctggcttcgattattggggcctgggcaccctcgtgaccgtgtctagtacgcgtgaggacctgaagaacgtgttcccacctgaggtggccgtgttcgagcctagcgaggccgagatcagccacacccagaaagccaccctcgtgtgcctggctaccggcttctaccccgaccatgtggaactgtcttggtgggtcaacggcaaagaggtgcacagcggcgtgtgtaccgacccccagccactgaaagaacagcccgccctgaacgacagccggtactgcctgagcagcagactgagagtgtccgccaccttctggcagaacccccggaaccacttcagatgccaggtgcagttctacggcctgagcgagaacgacgagtggacccaggacagagccaagcccgtgacccagatcgtgtctgccgaagcctggggcagagccgattgcggctttaccagcgagagctaccagcagggcgtgctgagcgccaccaacctgagcgtgatcggcttcagaatcctgctgctgaaagtggccggctttaacctgctgatgaccctgcggctgtggtccagc

SEQ ID NO: 5891 - DNA, 2694 bp, synthetic construct
  source 1..2694: mol_type = other DNA
atggccttaccagtgaccgccttgctcctgccgctggccttgctgctccacgccgccaggccggaagtgcagctggttgaatctggcggaggactggttcagcctggcggatctctgagactgtcttgtgccgccagcggcttcagcttcagcgacttttggatgagctgggtccgacaggcccctggcaaaggacttgaatgggtcgccacaatcagccaggccggcagcgagaaggactacgtggactctgtgaagggcagattcaccatcagccgggacaacgccaagaagtccctgtacctccagatgaacagcctgagagccgaggacaccgccgtgtactattgtgcctctggcgtgtacagcttcgactacagaggccagggcaccctggtcacagtctcttctggtaccggcggaggcggatctggcggcggaggtagcggtggcggaggatctgaattcgacatcgtgctgacacagagccctgcttctctggccgtgtctctgggacagagagccaccatcagctgtagagccagcgagagcgtggacaactacggcaacaccttcatgcactggtatcagcagaagcccggccagcctcctaagctgctgatctacagagccagcaacctggaaagcggcatccccgccagattttctggcagcggcagcagaaccgacttcaccctgaccatcaatcccgtggaagccgacgacgtggcaacctactactgccagcagagcaacgaggaccctcctacatttggagccggcaccaagctggaactgaaactcgagatccagaaccctgatcctgccgtgtaccagctgcgggatagcaagagcagcgacaagagcgtgtgtctgttcaccgacttcgacagccagaccaacgtgtcccagagcaaggactccgacgtgtacatcaccgataagtgcgtgctggacatgcggagcatggacttcaagagcaactccgccgtggcctggtccaacaagtccgatttcgcctgcgccaacgccttcaacaacagcattatccccgaggacacattcttcccaagccccgagagcagctgcgacgtgaagctggtggaaaagagcttcgagacagacaccaacctgaacttccagatcctgtacgagatcctgctgggcaaggccaccctgtacgccgtgctggtgtctgccctggtgctgatggctatggtcaagcggaaggacagccggggacgcgccaagagaagcggatctggcgtgaagcagaccctgaatttcgacctgctgaagctggctggcgacgtggaatccaacccaggccctactagtatggactggatttggcgcatccttttccttgtcggcgctgctaccggcgcgcattccgggccccagctccagctgcaagagtctggacctggcctggtcaagcctagcgagacactgagcctgacctgtaccgtgtccggcgatagcatcagcagcggcgattactactggggctggatcagacagcctcctggcaaaggactggaatggatcggccacatctactacagcggcgtgacctactacaaccccagcctgaagtccagagtgaccatcagcgtggacaccagccggaaccagttctccctgaagctgtctagcgtgacagccgccgataccgccgtgtactactgcaccagagaggacagcagcaactggcggagtagaggccagggaacactggtcacagttagctctggatccggcggaggcggaagtggaggcggaggatctggcggcggaggctctttcgaacagattcagctggtgcagtctggccccgagctgaagaaacctggcgagacagtgaagatcagctgcaaggccagcggctacatcttcaccaattacggcatgaactgggtcaagcaggcccctggcaagagcttcaagtggatgggctggatcaacacctacaccggcgagagcacatacagcgccgacttcaagggcagattcgccttcagcctggaaaccagcgccagcacagcctacctgcacatcaacgacctgaagaacgaggacaccgccacctacttttgcgccagaagcggcggctacgaccctatggattattggggccagggcaccagcgtgaccgtttcttctacgcgtgaggacctgaagaacgtgttcccacctgaggtggccgtgttcgagcctagcgaggccgagatcagccacacccagaaagccaccctcgtgtgcctggctaccggcttctaccccgaccatgtggaactgtcttggtgggtcaacggcaaagaggtgcacagcggcgtgtgtaccgacccccagccactgaaagaacagcccgccctgaacgacagccggtactgcctgagcagcagactgagagtgtccgccaccttctggcagaacccccggaaccacttcagatgccaggtgcagttctacggcctgagcgagaacgacgagtggacccaggacagagccaagcccgtgacccagatcgtgtctgccgaagcctggggcagagccgattgcggctttaccagcgagagctaccagcagggcgtgctgagcgccaccaacctgagcgtgatcggcttcagaatcctgctgctgaaagtggccggctttaacctgctgatgaccctgcggctgtggtccagc

SEQ ID NO: 5892 - DNA, 2691 bp, synthetic construct
  source 1..2691: mol_type = other DNA
atggccttaccagtgaccgccttgctcctgccgctggccttgctgctccacgccgccaggccggaagtgcagctggttgaatctggcggaggactggttcagcctggcggatctctgagactgtcttgtgccgccagcggcttcagcttcagcgacttttggatgagctgggtccgacaggcccctggcaaaggacttgaatgggtcgccacaatcagccaggccggcagcgagaaggactacgtggactctgtgaagggcagattcaccatcagccgggacaacgccaagaagtccctgtacctccagatgaacagcctgagagccgaggacaccgccgtgtactattgtgcctctggcgtgtacagcttcgactacagaggccagggcaccctggtcacagtctcttctggtaccggcggaggcggatctggcggcggaggtagcggtggcggaggatctgaattcgacgagatcgtgctgacacagagccctggcaccctgagcctgtctccaggcgaaagagccacactgagctgtcgggccagccagagcgtgtccaatacctacctggcctggtatcaccagaggcccggacaggctccccggctgctgatctatggcgcttctagcagagccaccggcatccccgatagattcagcggctctggcagcggcaccgacttcgccctgacaatcagctccctggaacccgaggacttcgccgtgtactactgccagcagtacagcaactcctggaccttcggccagggcaccaaggtggaaatcaagagactcgagatccagaaccctgatcctgccgtgtaccagctgcgggatagcaagagcagcgacaagagcgtgtgtctgttcaccgacttcgacagccagaccaacgtgtcccagagcaaggactccgacgtgtacatcaccgataagtgcgtgctggacatgcggagcatggacttcaagagcaactccgccgtggcctggtccaacaagtccgatttcgcctgcgccaacgccttcaacaacagcattatccccgaggacacattcttcccaagccccgagagcagctgcgacgtgaagctggtggaaaagagcttcgagacagacaccaacctgaacttccagatcctgtacgagatcctgctgggcaaggccaccctgtacgccgtgctggtgtctgccctggtgctgatggctatggtcaagcggaaggacagccggggacgcgccaagagaagcggatctggcgtgaagcagaccctgaatttcgacctgctgaagctggctggcgacgtggaatccaacccaggccctactagtatggactggatttggcgcatccttttccttgtcggcgctgctaccggcgcgcattccgggccccagctccagctgcaagagtctggacctggcctggtcaagcctagcgagacactgagcctgacctgtaccgtgtccggcgatagcatcagcagcggcgattactactggggctggatcagacagcctcctggcaaaggactggaatggatcggccacatctactacagcggcgtgacctactacaaccccagcctgaagtccagagtgaccatcagcgtggacaccagccggaaccagttctccctgaagctgtctagcgtgacagccgccgataccgccgtgtactactgcaccagagaggacagcagcaactggcggagtagaggccagggaacactggtcacagttagctctggatccggcggaggcggaagtggaggcggaggatctggcggcggaggctctttcgaacaggtgcaactggtggaatctggcgggggagtggtgcagcctggcagaagcctgagactgtcttgtgccgccagcggcttcaccttcagcagctacgacatgcactgggtgcgccaggcccctggcaaaggactggaatgggtggccgtgatctcctacgacggcaccaacgagtattacgccgacagcgtgaagggccggttcaccatctccagagacaccagcaagaacaccctgtacctccagatgaacagcctgcgggccgaggacacagccgtgtattattgcgccagagagcggtacttcgactggtccttcgactactggggccagggaaccctggtgtccgtgtctagtacgcgtgaggacctgaagaacgtgttcccacctgaggtggccgtgttcgagcctagcgaggccgagatcagccacacccagaaagccaccctcgtgtgcctggctaccggcttctaccccgaccatgtggaactgtcttggtgggtcaacggcaaagaggtgcacagcggcgtgtgtaccgacccccagccactgaaagaacagcccgccctgaacgacagccggtactgcctgagcagcagactgagagtgtccgccaccttctggcagaacccccggaaccacttcagatgccaggtgcagttctacggcctgagcgagaacgacgagtggacccaggacagagccaagcccgtgacccagatcgtgtctgccgaagcctggggcagagccgattgcggctttaccagcgagagctaccagcagggcgtgctgagcgccaccaacctgagcgtgatcggcttcagaatcctgctgctgaaagtggccggctttaacctgctgatgaccctgcggctgtggtccagc

SEQ ID NO: 5893 - DNA, 2688 bp, synthetic construct
  source 1..2688: mol_type = other DNA
atggccttaccagtgaccgccttgctcctgccgctggccttgctgctccacgccgccaggccggaagtgcagctggttgaatctggcggaggactggttcagcctggcggatctctgagactgtcttgtgccgccagcggcttcagcttcagcgacttttggatgagctgggtccgacaggcccctggcaaaggacttgaatgggtcgccacaatcagccaggccggcagcgagaaggactacgtggactctgtgaagggcagattcaccatcagccgggacaacgccaagaagtccctgtacctccagatgaacagcctgagagccgaggacaccgccgtgtactattgtgcctctggcgtgtacagcttcgactacagaggccagggcaccctggtcacagtctcttctggtaccggcggaggcggatctggcggcggaggtagcggtggcggaggatctgaattcgacgagctgacacaggaccctgctgtgtctgttgccctgggccagacagtgcggattacctgtcaaggcgacagcctgagaagcaactacgccaactggtatcagcagaagcccggacaggctcccgtgctggttatctacggccagaacaacagacccagcggcatccccgatagattcagcggctctagctctggcaataccgccagcctgacaatcactggcgctcaggctgccgatgaggccgactactactgcgatagcagagtgtccaccggcaatcacgtggtgtttggcggcggaacaaagctgacagtgctcggacaactcgagatccagaaccctgatcctgccgtgtaccagctgcgggatagcaagagcagcgacaagagcgtgtgtctgttcaccgacttcgacagccagaccaacgtgtcccagagcaaggactccgacgtgtacatcaccgataagtgcgtgctggacatgcggagcatggacttcaagagcaactccgccgtggcctggtccaacaagtccgatttcgcctgcgccaacgccttcaacaacagcattatccccgaggacacattcttcccaagccccgagagcagctgcgacgtgaagctggtggaaaagagcttcgagacagacaccaacctgaacttccagatcctgtacgagatcctgctgggcaaggccaccctgtacgccgtgctggtgtctgccctggtgctgatggctatggtcaagcggaaggacagccggggacgcgccaagagaagcggatctggcgtgaagcagaccctgaatttcgacctgctgaagctggctggcgacgtggaatccaacccaggccctactagtatggactggatttggcgcatccttttccttgtcggcgctgctaccggcgcgcattccgggccccagctccagctgcaagagtctggacctggcctggtcaagcctagcgagacactgagcctgacctgtaccgtgtccggcgatagcatcagcagcggcgattactactggggctggatcagacagcctcctggcaaaggactggaatggatcggccacatctactacagcggcgtgacctactacaaccccagcctgaagtccagagtgaccatcagcgtggacaccagccggaaccagttctccctgaagctgtctagcgtgacagccgccgataccgccgtgtactactgcaccagagaggacagcagcaactggcggagtagaggccagggaacactggtcacagttagctctggatccggcggaggcggaagtggaggcggaggatctggcggcggaggctctttcgaagaagttcagctggtgcagagcggagccgaagtgaagaaacctggggcctctgtgaaggtgtcctgcaaggcttccggctacacctttaccagctacgccatgcactgggtccgacaggcacctggacaacggcttgaatggatgggctggatcaacgccggcaacggcaacaccaagtacagccagaaattccagggccgcgtgaccatcaccagagatacaagcgccagcaccgcctacatggaactgtctagcctgagatccgaggacaccgccgtgtactactgtgccagagacatcagctacggcagcttcgactattggggccagggcacactggtcaccgttagctctacgcgtgaggacctgaagaacgtgttcccacctgaggtggccgtgttcgagcctagcgaggccgagatcagccacacccagaaagccaccctcgtgtgcctggctaccggcttctaccccgaccatgtggaactgtcttggtgggtcaacggcaaagaggtgcacagcggcgtgtgtaccgacccccagccactgaaagaacagcccgccctgaacgacagccggtactgcctgagcagcagactgagagtgtccgccaccttctggcagaacccccggaaccacttcagatgccaggtgcagttctacggcctgagcgagaacgacgagtggacccaggacagagccaagcccgtgacccagatcgtgtctgccgaagcctggggcagagccgattgcggctttaccagcgagagctaccagcagggcgtgctgagcgccaccaacctgagcgtgatcggcttcagaatcctgctgctgaaagtggccggctttaacctgctgatgaccctgcggctgtggtccagc

SEQ ID NO: 5894 - DNA, 2694 bp, synthetic construct
  source 1..2694: mol_type = other DNA
atggccttaccagtgaccgccttgctcctgccgctggccttgctgctccacgccgccaggccggaagtgcagctggttgaatctggcggaggactggttcagcctggcggatctctgagactgtcttgtgccgccagcggcttcagcttcagcgacttttggatgagctgggtccgacaggcccctggcaaaggacttgaatgggtcgccacaatcagccaggccggcagcgagaaggactacgtggactctgtgaagggcagattcaccatcagccgggacaacgccaagaagtccctgtacctccagatgaacagcctgagagccgaggacaccgccgtgtactattgtgcctctggcgtgtacagcttcgactacagaggccagggcaccctggtcacagtctcttctggtaccggcggaggcggatctggcggcggaggtagcggtggcggaggatctgaattcgacgacatcgtgctgacacagacaccagccacactgagcgtgacacctggcgattctgtgtccctgagctgtagagccagccagagcatcagcaacaacctgcactggtatcagcagaagtcccacgagagccccagactgctgattaagaacgccagccagtctatcagcggcatccccagcaagtttagcggctctggcagcggcaccgacttcaccctgagaatcaacagcgtggaaaccgaggacttcgggatgtacttctgccagcagagcaatagctggccctacacatttggctccggcaccaagctggaaatcaaactcgagatccagaaccctgatcctgccgtgtaccagctgcgggatagcaagagcagcgacaagagcgtgtgtctgttcaccgacttcgacagccagaccaacgtgtcccagagcaaggactccgacgtgtacatcaccgataagtgcgtgctggacatgcggagcatggacttcaagagcaactccgccgtggcctggtccaacaagtccgatttcgcctgcgccaacgccttcaacaacagcattatccccgaggacacattcttcccaagccccgagagcagctgcgacgtgaagctggtggaaaagagcttcgagacagacaccaacctgaacttccagatcctgtacgagatcctgctgggcaaggccaccctgtacgccgtgctggtgtctgccctggtgctgatggctatggtcaagcggaaggacagccggggacgcgccaagagaagcggatctggcgtgaagcagaccctgaatttcgacctgctgaagctggctggcgacgtggaatccaacccaggccctactagtatggactggatttggcgcatccttttccttgtcggcgctgctaccggcgcgcattccgggccccagctccagctgcaagagtctggacctggcctggtcaagcctagcgagacactgagcctgacctgtaccgtgtccggcgatagcatcagcagcggcgattactactggggctggatcagacagcctcctggcaaaggactggaatggatcggccacatctactacagcggcgtgacctactacaaccccagcctgaagtccagagtgaccatcagcgtggacaccagccggaaccagttctccctgaagctgtctagcgtgacagccgccgataccgccgtgtactactgcaccagagaggacagcagcaactggcggagtagaggccagggaacactggtcacagttagctctggatccggcggaggcggaagtggaggcggaggatctggcggcggaggctctttcgaacaagtgaagctgcaacagagcggacccgagctggttaagccaggcgcttccgtgaagattagctgcaaggccagcggctacagcttcaccggctactacatgcactgggtcaagcagagccacggcaacatcctggactggatcggctacatctacccctacaacggcgtgtccagctacaaccagaagttcaagggcaaagccactctgaccgtggacaagagcagcagcaccgcctacatggaactgagaagcctgaccagcgaggacagcgccgtgtactattgtgccagagagcggggcctgtaccagctcagagcaatggattattggggccagggcaccagcgtgaccgtttcttctacgcgtgaggacctgaagaacgtgttcccacctgaggtggccgtgttcgagcctagcgaggccgagatcagccacacccagaaagccaccctcgtgtgcctggctaccggcttctaccccgaccatgtggaactgtcttggtgggtcaacggcaaagaggtgcacagcggcgtgtgtaccgacccccagccactgaaagaacagcccgccctgaacgacagccggtactgcctgagcagcagactgagagtgtccgccaccttctggcagaacccccggaaccacttcagatgccaggtgcagttctacggcctgagcgagaacgacgagtggacccaggacagagccaagcccgtgacccagatcgtgtctgccgaagcctggggcagagccgattgcggctttaccagcgagagctaccagcagggcgtgctgagcgccaccaacctgagcgtgatcggcttcagaatcctgctgctgaaagtggccggctttaacctgctgatgaccctgcggctgtggtccagc

SEQ ID NO: 5895 - DNA, 2667 bp, synthetic construct
  source 1..2667: mol_type = other DNA
atggccttaccagtgaccgccttgctcctgccgctggccttgctgctccacgccgccaggccggaagtgcagctggttgaatctggcggaggactggttcagcctggcggatctctgagactgtcttgtgccgccagcggcttcagcttcagcgacttttggatgagctgggtccgacaggcccctggcaaaggacttgaatgggtcgccacaatcagccaggccggcagcgagaaggactacgtggactctgtgaagggcagattcaccatcagccgggacaacgccaagaagtccctgtacctccagatgaacagcctgagagccgaggacaccgccgtgtactattgtgcctctggcgtgtacagcttcgactacagaggccagggcaccctggtcacagtctcttctggtaccggcggaggcggatctggcggcggaggtagcggtggcggaggatctgaattcgacgacatcgtgatgacacagacccctgccatcatgagcgcctctccaggccagaaagtgaccatcacatgtagcgccagcagcagcgtgaactacatgcactggtatcagcagaagctgggcagcagccccaagctgtggatctacgataccagcaaactggcccctggcgtgccagccagattttctggttctggcagcggcaccagctacagcctgacaatcagcagcatggaagccgaggatgccgccagctacttctgccatcagtggtctagctacccctacacctttggctccggcaccaagctggaaatcaaactcgagatccagaaccctgatcctgccgtgtaccagctgcgggatagcaagagcagcgacaagagcgtgtgtctgttcaccgacttcgacagccagaccaacgtgtcccagagcaaggactccgacgtgtacatcaccgataagtgcgtgctggacatgcggagcatggacttcaagagcaactccgccgtggcctggtccaacaagtccgatttcgcctgcgccaacgccttcaacaacagcattatccccgaggacacattcttcccaagccccgagagcagctgcgacgtgaagctggtggaaaagagcttcgagacagacaccaacctgaacttccagatcctgtacgagatcctgctgggcaaggccaccctgtacgccgtgctggtgtctgccctggtgctgatggctatggtcaagcggaaggacagccggggacgcgccaagagaagcggatctggcgtgaagcagaccctgaatttcgacctgctgaagctggctggcgacgtggaatccaacccaggccctactagtatggactggatttggcgcatccttttccttgtcggcgctgctaccggcgcgcattccgggccccagctccagctgcaagagtctggacctggcctggtcaagcctagcgagacactgagcctgacctgtaccgtgtccggcgatagcatcagcagcggcgattactactggggctggatcagacagcctcctggcaaaggactggaatggatcggccacatctactacagcggcgtgacctactacaaccccagcctgaagtccagagtgaccatcagcgtggacaccagccggaaccagttctccctgaagctgtctagcgtgacagccgccgataccgccgtgtactactgcaccagagaggacagcagcaactggcggagtagaggccagggaacactggtcacagttagctctggatccggcggaggcggaagtggaggcggaggatctggcggcggaggctctttcgaagaagttcagctccaagagtctggccccgacctggtcaagcctagccaaagcctgagcctgacctgtaccgtgaccggctacagcatcacaagcggctatggatggcactggatcagacagttccccggcaacaaactggaatggatgggctacatccactacagcggcagcaccacctacaatcccagcctgaagtcccggatcagcatcagcagagacaccagcaagaaccagttcttcctgcaactgaacagcgtgaccaccgaggacaccgccacctactattgtgctcggagcctgagatattggggccagggcacaaccctgaccgtgtcatctacgcgtgaggacctgaagaacgtgttcccacctgaggtggccgtgttcgagcctagcgaggccgagatcagccacacccagaaagccaccctcgtgtgcctggctaccggcttctaccccgaccatgtggaactgtcttggtgggtcaacggcaaagaggtgcacagcggcgtgtgtaccgacccccagccactgaaagaacagcccgccctgaacgacagccggtactgcctgagcagcagactgagagtgtccgccaccttctggcagaacccccggaaccacttcagatgccaggtgcagttctacggcctgagcgagaacgacgagtggacccaggacagagccaagcccgtgacccagatcgtgtctgccgaagcctggggcagagccgattgcggctttaccagcgagagctaccagcagggcgtgctgagcgccaccaacctgagcgtgatcggcttcagaatcctgctgctgaaagtggccggctttaacctgctgatgaccctgcggctgtggtccagc

SEQ ID NO: 5896 - DNA, 2676 bp, synthetic construct
  source 1..2676: mol_type = other DNA
atggccttaccagtgaccgccttgctcctgccgctggccttgctgctccacgccgccaggccggaagtgcagctggttgaatctggcggaggactggttcagcctggcggatctctgagactgtcttgtgccgccagcggcttcagcttcagcgacttttggatgagctgggtccgacaggcccctggcaaaggacttgaatgggtcgccacaatcagccaggccggcagcgagaaggactacgtggactctgtgaagggcagattcaccatcagccgggacaacgccaagaagtccctgtacctccagatgaacagcctgagagccgaggacaccgccgtgtactattgtgcctctggcgtgtacagcttcgactacagaggccagggcaccctggtcacagtctcttctggtaccggcggaggcggatctggcggcggaggtagcggtggcggaggatctgaattcgacgacatccagatgacacagagccctagcagcctgtctgccagcgtgggagacagagtgaccatcacctgtagcgccaccagcagcatcagctacatgcactggtatcagcagaagcccggcaaggcccctaaaggctggatctacgataccagcaaactggcccacggcgtgcccagcagattttctggttctggcagcggcaccgacttcaccctgacaatatctagcctccagcctgaggacttcgccacctactactgccaccagagaagaagctaccccttcaccttcggccagggcaccaaggtggaaatcaaactcgagatccagaaccctgatcctgccgtgtaccagctgcgggatagcaagagcagcgacaagagcgtgtgtctgttcaccgacttcgacagccagaccaacgtgtcccagagcaaggactccgacgtgtacatcaccgataagtgcgtgctggacatgcggagcatggacttcaagagcaactccgccgtggcctggtccaacaagtccgatttcgcctgcgccaacgccttcaacaacagcattatccccgaggacacattcttcccaagccccgagagcagctgcgacgtgaagctggtggaaaagagcttcgagacagacaccaacctgaacttccagatcctgtacgagatcctgctgggcaaggccaccctgtacgccgtgctggtgtctgccctggtgctgatggctatggtcaagcggaaggacagccggggacgcgccaagagaagcggatctggcgtgaagcagaccctgaatttcgacctgctgaagctggctggcgacgtggaatccaacccaggccctactagtatggactggatttggcgcatccttttccttgtcggcgctgctaccggcgcgcattccgggccccagctccagctgcaagagtctggacctggcctggtcaagcctagcgagacactgagcctgacctgtaccgtgtccggcgatagcatcagcagcggcgattactactggggctggatcagacagcctcctggcaaaggactggaatggatcggccacatctactacagcggcgtgacctactacaaccccagcctgaagtccagagtgaccatcagcgtggacaccagccggaaccagttctccctgaagctgtctagcgtgacagccgccgataccgccgtgtactactgcaccagagaggacagcagcaactggcggagtagaggccagggaacactggtcacagttagctctggatccggcggaggcggaagtggaggcggaggatctggcggcggaggctctttcgaagaagtgcaactggttcagagcggagccgaagtgaagaaacctggggcctctgtgaaggtgtcctgcaaggcttccggctacacctttaccaatttctggattcactgggtccgacaggctccaggccaaggactggaatggatcggagagatcgaccccagcgacagctacaccaactacaaccagaaattcaaaggccgggtcaccatcaccagagacaccagcacaagcaccgcctacctggaactgagcagcctgagaagcgaggacaccgccgtgtactactgcgccagggaaatcaccaccgtggattattggggccagggaaccctggtcaccgtgtcatctacgcgtgaggacctgaagaacgtgttcccacctgaggtggccgtgttcgagcctagcgaggccgagatcagccacacccagaaagccaccctcgtgtgcctggctaccggcttctaccccgaccatgtggaactgtcttggtgggtcaacggcaaagaggtgcacagcggcgtgtgtaccgacccccagccactgaaagaacagcccgccctgaacgacagccggtactgcctgagcagcagactgagagtgtccgccaccttctggcagaacccccggaaccacttcagatgccaggtgcagttctacggcctgagcgagaacgacgagtggacccaggacagagccaagcccgtgacccagatcgtgtctgccgaagcctggggcagagccgattgcggctttaccagcgagagctaccagcagggcgtgctgagcgccaccaacctgagcgtgatcggcttcagaatcctgctgctgaaagtggccggctttaacctgctgatgaccctgcggctgtggtccagc

SEQ ID NO: 5897 - DNA, 2697 bp, synthetic construct
  source 1..2697: mol_type = other DNA
atggccttaccagtgaccgccttgctcctgccgctggccttgctgctccacgccgccaggccggaagtgcagctggttgaatctggcggaggactggttcagcctggcggatctctgagactgtcttgtgccgccagcggcttcagcttcagcgacttttggatgagctgggtccgacaggcccctggcaaaggacttgaatgggtcgccacaatcagccaggccggcagcgagaaggactacgtggactctgtgaagggcagattcaccatcagccgggacaacgccaagaagtccctgtacctccagatgaacagcctgagagccgaggacaccgccgtgtactattgtgcctctggcgtgtacagcttcgactacagaggccagggcaccctggtcacagtctcttctggtaccggcggaggcggatctggcggcggaggtagcggtggcggaggatctgaattcgacgacatccagatgacacagagccctagcagcctgtctgccagcgtgggagacagagtgaccatcacatgcaaggccagccagggcttcaacaaatacgtggcctggtatcagcagaagcccggcaaggctcctaagctgctgatctactacaccagcacactccagcctggcgtgcccagcagattttctggctctggcagcggcagagactacaccctgacaatatccagcctccagccagaggacttcgccacctactactgtctccagtacggcaacctgctgtacgcctttggacagggcaccaaggtggaaatcaagagactcgagatccagaaccctgatcctgccgtgtaccagctgcgggatagcaagagcagcgacaagagcgtgtgtctgttcaccgacttcgacagccagaccaacgtgtcccagagcaaggactccgacgtgtacatcaccgataagtgcgtgctggacatgcggagcatggacttcaagagcaactccgccgtggcctggtccaacaagtccgatttcgcctgcgccaacgccttcaacaacagcattatccccgaggacacattcttcccaagccccgagagcagctgcgacgtgaagctggtggaaaagagcttcgagacagacaccaacctgaacttccagatcctgtacgagatcctgctgggcaaggccaccctgtacgccgtgctggtgtctgccctggtgctgatggctatggtcaagcggaaggacagccggggacgcgccaagagaagcggatctggcgtgaagcagaccctgaatttcgacctgctgaagctggctggcgacgtggaatccaacccaggccctactagtatggactggatttggcgcatccttttccttgtcggcgctgctaccggcgcgcattccgggccccagctccagctgcaagagtctggacctggcctggtcaagcctagcgagacactgagcctgacctgtaccgtgtccggcgatagcatcagcagcggcgattactactggggctggatcagacagcctcctggcaaaggactggaatggatcggccacatctactacagcggcgtgacctactacaaccccagcctgaagtccagagtgaccatcagcgtggacaccagccggaaccagttctccctgaagctgtctagcgtgacagccgccgataccgccgtgtactactgcaccagagaggacagcagcaactggcggagtagaggccagggaacactggtcacagttagctctggatccggcggaggcggaagtggaggcggaggatctggcggcggaggctctttcgaagaagttcagcttgtgcagagcggagccgaagtgaagaaacctggggcctctgtgaaggtgtcctgcaaagccagcggctacacctttaccagctactggatcggctgggtccgacaggctcctggacaaggactggaatggatcggcgacatctatcccggcggaggctacaccaactacaacgagaagttcaagggccgcgtgacaatcaccagagacacctctacaagcaccgcctacctggaactgagcagcctgagaagcgaggacaccgccgtgtactactgcgccagactggatggcagcagctacagaggcgctatggattcttggggccagggcacactggtcaccgtttcttctacgcgtgaggacctgaagaacgtgttcccacctgaggtggccgtgttcgagcctagcgaggccgagatcagccacacccagaaagccaccctcgtgtgcctggctaccggcttctaccccgaccatgtggaactgtcttggtgggtcaacggcaaagaggtgcacagcggcgtgtgtaccgacccccagccactgaaagaacagcccgccctgaacgacagccggtactgcctgagcagcagactgagagtgtccgccaccttctggcagaacccccggaaccacttcagatgccaggtgcagttctacggcctgagcgagaacgacgagtggacccaggacagagccaagcccgtgacccagatcgtgtctgccgaagcctggggcagagccgattgcggctttaccagcgagagctaccagcagggcgtgctgagcgccaccaacctgagcgtgatcggcttcagaatcctgctgctgaaagtggccggctttaacctgctgatgaccctgcggctgtggtccagc

SEQ ID NO: 5898 - DNA, 2685 bp, synthetic construct
  source 1..2685: mol_type = other DNA
atggccttaccagtgaccgccttgctcctgccgctggccttgctgctccacgccgccaggccggaagtgcagctggttgaatctggcggaggactggttcagcctggcggatctctgagactgtcttgtgccgccagcggcttcagcttcagcgacttttggatgagctgggtccgacaggcccctggcaaaggacttgaatgggtcgccacaatcagccaggccggcagcgagaaggactacgtggactctgtgaagggcagattcaccatcagccgggacaacgccaagaagtccctgtacctccagatgaacagcctgagagccgaggacaccgccgtgtactattgtgcctctggcgtgtacagcttcgactacagaggccagggcaccctggtcacagtctcttctggtaccggcggaggcggatctggcggcggaggtagcggtggcggaggatctgaattcgacgacatccagatgacacagagccctagcagcctgtctgccagcgtgggagacagagtgaccatcacctgtagagccagccaggacatccggtactacctgaactggtatcagcagaagcccggcaaggcccctaagctgctgatctatgtggcctccagcctccagagcggagtgccttctagattttctggcagcggctccggcaccgagtttaccctgacagtgtctagcttgcagcccgaggacttcgccacctactactgcctgcaagtgtacagcacccctcggacctttggacagggcaccaaggtggaaatcaaactcgagatccagaaccctgatcctgccgtgtaccagctgcgggatagcaagagcagcgacaagagcgtgtgtctgttcaccgacttcgacagccagaccaacgtgtcccagagcaaggactccgacgtgtacatcaccgataagtgcgtgctggacatgcggagcatggacttcaagagcaactccgccgtggcctggtccaacaagtccgatttcgcctgcgccaacgccttcaacaacagcattatccccgaggacacattcttcccaagccccgagagcagctgcgacgtgaagctggtggaaaagagcttcgagacagacaccaacctgaacttccagatcctgtacgagatcctgctgggcaaggccaccctgtacgccgtgctggtgtctgccctggtgctgatggctatggtcaagcggaaggacagccggggacgcgccaagagaagcggatctggcgtgaagcagaccctgaatttcgacctgctgaagctggctggcgacgtggaatccaacccaggccctactagtatggactggatttggcgcatccttttccttgtcggcgctgctaccggcgcgcattccgggccccagctccagctgcaagagtctggacctggcctggtcaagcctagcgagacactgagcctgacctgtaccgtgtccggcgatagcatcagcagcggcgattactactggggctggatcagacagcctcctggcaaaggactggaatggatcggccacatctactacagcggcgtgacctactacaaccccagcctgaagtccagagtgaccatcagcgtggacaccagccggaaccagttctccctgaagctgtctagcgtgacagccgccgataccgccgtgtactactgcaccagagaggacagcagcaactggcggagtagaggccagggaacactggtcacagttagctctggatccggcggaggcggaagtggaggcggaggatctggcggcggaggctctttcgaagaagtgcagcttgttgaatctggcggcggactggctaagcctggcggatctctgagactgtcttgtgccgccagcggcttccggttcaccttcaacaactactacatggactgggtccgacaggcccctggacaaggacttgaatgggtgtccagaatcagcagcagcggcgaccctacttggtacgccgattctgtgaagggcagattcaccatcagcagagagaacgccaagaacaccctgttcctccagatgaactccctgagagccgaggacaccgccgtgtactattgtgcctctctgaccaccggcagcgattcttggggacagggcgtgctggttaccgtgtcatctacgcgtgaggacctgaagaacgtgttcccacctgaggtggccgtgttcgagcctagcgaggccgagatcagccacacccagaaagccaccctcgtgtgcctggctaccggcttctaccccgaccatgtggaactgtcttggtgggtcaacggcaaagaggtgcacagcggcgtgtgtaccgacccccagccactgaaagaacagcccgccctgaacgacagccggtactgcctgagcagcagactgagagtgtccgccaccttctggcagaacccccggaaccacttcagatgccaggtgcagttctacggcctgagcgagaacgacgagtggacccaggacagagccaagcccgtgacccagatcgtgtctgccgaagcctggggcagagccgattgcggctttaccagcgagagctaccagcagggcgtgctgagcgccaccaacctgagcgtgatcggcttcagaatcctgctgctgaaagtggccggctttaacctgctgatgaccctgcggctgtggtccagc

SEQ ID NO: 5899 - DNA, 2685 bp, synthetic construct
  source 1..2685: mol_type = other DNA
atggccttaccagtgaccgccttgctcctgccgctggccttgctgctccacgccgccaggccggaagtgcagctggttgaatctggcggaggactggttcagcctggcggatctctgagactgtcttgtgccgccagcggcttcagcttcagcgacttttggatgagctgggtccgacaggcccctggcaaaggacttgaatgggtcgccacaatcagccaggccggcagcgagaaggactacgtggactctgtgaagggcagattcaccatcagccgggacaacgccaagaagtccctgtacctccagatgaacagcctgagagccgaggacaccgccgtgtactattgtgcctctggcgtgtacagcttcgactacagaggccagggcaccctggtcacagtctcttctggtaccggcggaggcggatctggcggcggaggtagcggtggcggaggatctgaattcgagatcgtgatgacacagagccccgccacactgagtgtgtctccaggcgaaagagccacactgtcctgtagagccagccagagcgtgtccagaaacctggcctggtatcagcagaagcctggacaggctccccggctgttgatctacggcgcttctacaagagccaccggcattcccgccagattttctggctctggcagcggcaccgagttcaccctgacaatcggaagcctccagagcgaggacttcgccgtgtactactgccagcagtacaagacctggcctcggacctttggacagggcaccaacgtggaaatcaaactcgagatccagaaccctgatcctgccgtgtaccagctgcgggatagcaagagcagcgacaagagcgtgtgtctgttcaccgacttcgacagccagaccaacgtgtcccagagcaaggactccgacgtgtacatcaccgataagtgcgtgctggacatgcggagcatggacttcaagagcaactccgccgtggcctggtccaacaagtccgatttcgcctgcgccaacgccttcaacaacagcattatccccgaggacacattcttcccaagccccgagagcagctgcgacgtgaagctggtggaaaagagcttcgagacagacaccaacctgaacttccagatcctgtacgagatcctgctgggcaaggccaccctgtacgccgtgctggtgtctgccctggtgctgatggctatggtcaagcggaaggacagccggggacgcgccaagagaagcggatctggcgtgaagcagaccctgaatttcgacctgctgaagctggctggcgacgtggaatccaacccaggccctactagtatggactggatttggcgcatccttttccttgtcggcgctgctaccggcgcgcattccgggccccagctccagctgcaagagtctggacctggcctggtcaagcctagcgagacactgagcctgacctgtaccgtgtccggcgatagcatcagcagcggcgattactactggggctggatcagacagcctcctggcaaaggactggaatggatcggccacatctactacagcggcgtgacctactacaaccccagcctgaagtccagagtgaccatcagcgtggacaccagccggaaccagttctccctgaagctgtctagcgtgacagccgccgataccgccgtgtactactgcaccagagaggacagcagcaactggcggagtagaggccagggaacactggtcacagttagctctggatccggcggaggcggaagtggaggcggaggatctggcggcggaggctctttcgaacaagttcagctgcaacaatggggagccggcctgctgaagcctagcgaaacactgtctctgacctgcgccgtgttcggcggctctttcagcggctactactggtcctggatcagacagcctcctggcaaaggactggaatggatcggcgagatcaaccaccggggcaacaccaacgacaaccccagcctgaaaagcagagtgaccatcagcgtggacaccagcaagaaccagttcgccctgaagctgagcagcgtgacagccgctgataccgccgtgtattattgcgccagagagcggggctacacctacggcaatttcgatcactggggccagggcaccctggtcacagtttcttctacgcgtgaggacctgaagaacgtgttcccacctgaggtggccgtgttcgagcctagcgaggccgagatcagccacacccagaaagccaccctcgtgtgcctggctaccggcttctaccccgaccatgtggaactgtcttggtgggtcaacggcaaagaggtgcacagcggcgtgtgtaccgacccccagccactgaaagaacagcccgccctgaacgacagccggtactgcctgagcagcagactgagagtgtccgccaccttctggcagaacccccggaaccacttcagatgccaggtgcagttctacggcctgagcgagaacgacgagtggacccaggacagagccaagcccgtgacccagatcgtgtctgccgaagcctggggcagagccgattgcggctttaccagcgagagctaccagcagggcgtgctgagcgccaccaacctgagcgtgatcggcttcagaatcctgctgctgaaagtggccggctttaacctgctgatgaccctgcggctgtggtccagc

SEQ ID NO: 5900 - DNA, 2688 bp, synthetic construct
  source 1..2688: mol_type = other DNA
atggccttaccagtgaccgccttgctcctgccgctggccttgctgctccacgccgccaggccggaagtgcagctggttgaatctggcggaggactggttcagcctggcggatctctgagactgtcttgtgccgccagcggcttcagcttcagcgacttttggatgagctgggtccgacaggcccctggcaaaggacttgaatgggtcgccacaatcagccaggccggcagcgagaaggactacgtggactctgtgaagggcagattcaccatcagccgggacaacgccaagaagtccctgtacctccagatgaacagcctgagagccgaggacaccgccgtgtactattgtgcctctggcgtgtacagcttcgactacagaggccagggcaccctggtcacagtctcttctggtaccggcggaggcggatctggcggcggaggtagcggtggcggaggatctgaattcgagatcgtgatgacccctagcagcgccacactgagtgtgtctccaggcgaaagagccacactgtcctgtagagccagccagagcgtgtccagaaacctggcctggtatcagcagaagcctggacaggctccccggctgttgatctacggcgcttctacaagagccaccggcattcccgccagattttctggctctggcagcggcaccgagttcaccctgacaatctctagcctccagagcgaggacttcgccgtgtactactgccaccagtacagcaactggatgtgcagcttcggccagggcaccaagctggaaatcaaactcgagatccagaaccctgatcctgccgtgtaccagctgcgggatagcaagagcagcgacaagagcgtgtgtctgttcaccgacttcgacagccagaccaacgtgtcccagagcaaggactccgacgtgtacatcaccgataagtgcgtgctggacatgcggagcatggacttcaagagcaactccgccgtggcctggtccaacaagtccgatttcgcctgcgccaacgccttcaacaacagcattatccccgaggacacattcttcccaagccccgagagcagctgcgacgtgaagctggtggaaaagagcttcgagacagacaccaacctgaacttccagatcctgtacgagatcctgctgggcaaggccaccctgtacgccgtgctggtgtctgccctggtgctgatggctatggtcaagcggaaggacagccggggacgcgccaagagaagcggatctggcgtgaagcagaccctgaatttcgacctgctgaagctggctggcgacgtggaatccaacccaggccctactagtatggactggatttggcgcatccttttccttgtcggcgctgctaccggcgcgcattccgggccccagctccagctgcaagagtctggacctggcctggtcaagcctagcgagacactgagcctgacctgtaccgtgtccggcgatagcatcagcagcggcgattactactggggctggatcagacagcctcctggcaaaggactggaatggatcggccacatctactacagcggcgtgacctactacaaccccagcctgaagtccagagtgaccatcagcgtggacaccagccggaaccagttctccctgaagctgtctagcgtgacagccgccgataccgccgtgtactactgcaccagagaggacagcagcaactggcggagtagaggccagggaacactggtcacagttagctctggatccggcggaggcggaagtggaggcggaggatctggcggcggaggctctttcgaagaagttcagctccttgagtcaggtggcggcctggttcaacctggcggatctctgagactgagctgtgccgccagcggcttcacctttagcagatacgccatgaactgggtccgacaggcccctggcaaaggactggaatgggtgtccggcatctctggaagcggcggcagaacctactacgccgattctgtgaagggcagattcaccatcagccgggacaacagcaagaacaccctgtacctccagatgaacagcctgagagccgaggacacagccgtgtattattgcgccaaggaccgggacttttggagcggcccttttgactattggggccagggaaccctggtcaccgttagctctacgcgtgaggacctgaagaacgtgttcccacctgaggtggccgtgttcgagcctagcgaggccgagatcagccacacccagaaagccaccctcgtgtgcctggctaccggcttctaccccgaccatgtggaactgtcttggtgggtcaacggcaaagaggtgcacagcggcgtgtgtaccgacccccagccactgaaagaacagcccgccctgaacgacagccggtactgcctgagcagcagactgagagtgtccgccaccttctggcagaacccccggaaccacttcagatgccaggtgcagttctacggcctgagcgagaacgacgagtggacccaggacagagccaagcccgtgacccagatcgtgtctgccgaagcctggggcagagccgattgcggctttaccagcgagagctaccagcagggcgtgctgagcgccaccaacctgagcgtgatcggcttcagaatcctgctgctgaaagtggccggctttaacctgctgatgaccctgcggctgtggtccagc

SEQ ID NO: 5901 - DNA, 2703 bp, synthetic construct
  source 1..2703: mol_type = other DNA
atggccttaccagtgaccgccttgctcctgccgctggccttgctgctccacgccgccaggccggaagtgcagctggttgaatctggcggaggactggttcagcctggcggatctctgagactgtcttgtgccgccagcggcttcagcttcagcgacttttggatgagctgggtccgacaggcccctggcaaaggacttgaatgggtcgccacaatcagccaggccggcagcgagaaggactacgtggactctgtgaagggcagattcaccatcagccgggacaacgccaagaagtccctgtacctccagatgaacagcctgagagccgaggacaccgccgtgtactattgtgcctctggcgtgtacagcttcgactacagaggccagggcaccctggtcacagtctcttctggtaccggcggaggcggatctggcggcggaggtagcggtggcggaggatctgaattcgacatccagatgacccagagccccagcagcctgtctgccagcgtgggcgacagagtgaccatcacatgcaaggccagcaagaacatcagaagctacctggcctggtatcagcagaagcccggcaaggcccccaagctgctgatctacagcggcagcacactgcacagcggcgtgcccagcagattttccggctctggcagcggcaccgacttcaccctgaccatctctagcctccagcccgaggacttcgccacctactactgccagcagcaccacgagtaccccctgacattcggccagggcaccaaggtggaaatcaagagactcgagatccagaaccctgatcctgccgtgtaccagctgcgggatagcaagagcagcgacaagagcgtgtgtctgttcaccgacttcgacagccagaccaacgtgtcccagagcaaggactccgacgtgtacatcaccgataagtgcgtgctggacatgcggagcatggacttcaagagcaactccgccgtggcctggtccaacaagtccgatttcgcctgcgccaacgccttcaacaacagcattatccccgaggacacattcttcccaagccccgagagcagctgcgacgtgaagctggtggaaaagagcttcgagacagacaccaacctgaacttccagatcctgtacgagatcctgctgggcaaggccaccctgtacgccgtgctggtgtctgccctggtgctgatggctatggtcaagcggaaggacagccggggacgcgccaagagaagcggatctggcgtgaagcagaccctgaatttcgacctgctgaagctggctggcgacgtggaatccaacccaggccctactagtatggactggatttggcgcatccttttccttgtcggcgctgctaccggcgcgcattccgggccccagctccagctgcaagagtctggacctggcctggtcaagcctagcgagacactgagcctgacctgtaccgtgtccggcgatagcatcagcagcggcgattactactggggctggatcagacagcctcctggcaaaggactggaatggatcggccacatctactacagcggcgtgacctactacaaccccagcctgaagtccagagtgaccatcagcgtggacaccagccggaaccagttctccctgaagctgtctagcgtgacagccgccgataccgccgtgtactactgcaccagagaggacagcagcaactggcggagtagaggccagggaacactggtcacagttagctctggatccggcggaggcggaagtggaggcggaggatctggcggcggaggctctttcgaacaggtgcaactccaggaatctggccccggactcgtgaagcccagcgagacactgagcctgacctgtaccgtgtccggctacaccatcaccagcggctacgactggtcctggatcagacagcctcctggcaagggcctggaatggatcggctacatcaactacggcggctccaccaactacaagcccagcctgggaagccgcgtgacaatcagcgtggacacctccaagaaccagttcagcctgaagctgagcagcgtgacagccgccgataccgccgtgtactactgcgcccggtacaacgagtacaagagctacatctacgattggtacttcgacttctggggccagggaaccctcgtgaccgtgtctagtacgcgtgaggacctgaagaacgtgttcccacctgaggtggccgtgttcgagcctagcgaggccgagatcagccacacccagaaagccaccctcgtgtgcctggctaccggcttctaccccgaccatgtggaactgtcttggtgggtcaacggcaaagaggtgcacagcggcgtgtgtaccgacccccagccactgaaagaacagcccgccctgaacgacagccggtactgcctgagcagcagactgagagtgtccgccaccttctggcagaacccccggaaccacttcagatgccaggtgcagttctacggcctgagcgagaacgacgagtggacccaggacagagccaagcccgtgacccagatcgtgtctgccgaagcctggggcagagccgattgcggctttaccagcgagagctaccagcagggcgtgctgagcgccaccaacctgagcgtgatcggcttcagaatcctgctgctgaaagtggccggctttaacctgctgatgaccctgcggctgtggtccagc

SEQ ID NO: 5902 - DNA, 2709 bp, synthetic construct
  source 1..2709: mol_type = other DNA
atggccttaccagtgaccgccttgctcctgccgctggccttgctgctccacgccgccaggccggaagtgcagctggttgaatctggcggaggactggttcagcctggcggatctctgagactgtcttgtgccgccagcggcttcagcttcagcgacttttggatgagctgggtccgacaggcccctggcaaaggacttgaatgggtcgccacaatcagccaggccggcagcgagaaggactacgtggactctgtgaagggcagattcaccatcagccgggacaacgccaagaagtccctgtacctccagatgaacagcctgagagccgaggacaccgccgtgtactattgtgcctctggcgtgtacagcttcgactacagaggccagggcaccctggtcacagtctcttctggtaccggcggaggcggatctggcggcggaggtagcggtggcggaggatctgaattccagtctgtggtcacacagcctccatccgtgtctgctgcccctggacagaaagtgaccatctcctgtagcggcagcagcagcaacatcggcaacaactacgtgtcctggtatcagcagctccccggcacagctcccaaactgctgatctacgacaacaacaagcggcccagcggcatccccgatagattttctggcagcaagagcggcaccagcgccacactgggaattaccggacttcagacaggcgacgaggccgactactactgtggcacatgggatggcagcctgtacaccatgcttttcggcggaggcaccaagctgacagtgcttctcgagatccagaaccctgatcctgccgtgtaccagctgcgggatagcaagagcagcgacaagagcgtgtgtctgttcaccgacttcgacagccagaccaacgtgtcccagagcaaggactccgacgtgtacatcaccgataagtgcgtgctggacatgcggagcatggacttcaagagcaactccgccgtggcctggtccaacaagtccgatttcgcctgcgccaacgccttcaacaacagcattatccccgaggacacattcttcccaagccccgagagcagctgcgacgtgaagctggtggaaaagagcttcgagacagacaccaacctgaacttccagatcctgtacgagatcctgctgggcaaggccaccctgtacgccgtgctggtgtctgccctggtgctgatggctatggtcaagcggaaggacagccggggacgcgccaagagaagcggatctggcgtgaagcagaccctgaatttcgacctgctgaagctggctggcgacgtggaatccaacccaggccctactagtatggactggatttggcgcatccttttccttgtcggcgctgctaccggcgcgcattccgggccccagctccagctgcaagagtctggacctggcctggtcaagcctagcgagacactgagcctgacctgtaccgtgtccggcgatagcatcagcagcggcgattactactggggctggatcagacagcctcctggcaaaggactggaatggatcggccacatctactacagcggcgtgacctactacaaccccagcctgaagtccagagtgaccatcagcgtggacaccagccggaaccagttctccctgaagctgtctagcgtgacagccgccgataccgccgtgtactactgcaccagagaggacagcagcaactggcggagtagaggccagggaacactggtcacagttagctctggatccggcggaggcggaagtggaggcggaggatctggcggcggaggctctttcgaagaagtgcaactggtggaatctggcggcggactggttaagcctggcggatctctgagactgtcttgtgccgccagcggcttcaccttcagcaatgcctggatgagctgggttcgacaggcccctggaaaaggactggaatgggtcggattcatccggtccaaagcctacggcggcaccacagaatatgccgcctctgtgaagggcagattcaccatcagccgggacgacagcaagtctatcgcctacctccagatgaacaacctgaaaaccgaggacaccgccgtgtactactgcgccagagatggcctgtacagcagctcttggtacgacagcgattactggggccagggcacactggtcacagtgtcatctacgcgtgaggacctgaagaacgtgttcccacctgaggtggccgtgttcgagcctagcgaggccgagatcagccacacccagaaagccaccctcgtgtgcctggctaccggcttctaccccgaccatgtggaactgtcttggtgggtcaacggcaaagaggtgcacagcggcgtgtgtaccgacccccagccactgaaagaacagcccgccctgaacgacagccggtactgcctgagcagcagactgagagtgtccgccaccttctggcagaacccccggaaccacttcagatgccaggtgcagttctacggcctgagcgagaacgacgagtggacccaggacagagccaagcccgtgacccagatcgtgtctgccgaagcctggggcagagccgattgcggctttaccagcgagagctaccagcagggcgtgctgagcgccaccaacctgagcgtgatcggcttcagaatcctgctgctgaaagtggccggctttaacctgctgatgaccctgcggctgtggtccagc

SEQ ID NO: 5903 - DNA, 2724 bp, synthetic construct
  source 1..2724: mol_type = other DNA
atggccttaccagtgaccgccttgctcctgccgctggccttgctgctccacgccgccaggccggaagtgcagctggttgaatctggcggaggactggttcagcctggcggatctctgagactgtcttgtgccgccagcggcttcagcttcagcgacttttggatgagctgggtccgacaggcccctggcaaaggacttgaatgggtcgccacaatcagccaggccggcagcgagaaggactacgtggactctgtgaagggcagattcaccatcagccgggacaacgccaagaagtccctgtacctccagatgaacagcctgagagccgaggacaccgccgtgtactattgtgcctctggcgtgtacagcttcgactacagaggccagggcaccctggtcacagtctcttctggtaccggcggaggcggatctggcggcggaggtagcggtggcggaggatctgaattccagtctgtgctgacacagcctcctagtgtgtctggcgctcctggacagagagtgaccatctcttgtaccggcagcagcagcaatatcggagccggctatgacgtgcactggtatcagcagctccctggcacagcccctaaactgctgatcttcggcaacagcaacagacccagcggcgtgcccgatagattcagcggctttaagagcggcacaagcgccagcctggctatcactggactgcaagccgaggacgaggccgactacttctgccagagctacgatagcagcctgagcggcagcggagtgtttggcacaggcaccaaagtgacagtgcttggcctcgagatccagaaccctgatcctgccgtgtaccagctgcgggatagcaagagcagcgacaagagcgtgtgtctgttcaccgacttcgacagccagaccaacgtgtcccagagcaaggactccgacgtgtacatcaccgataagtgcgtgctggacatgcggagcatggacttcaagagcaactccgccgtggcctggtccaacaagtccgatttcgcctgcgccaacgccttcaacaacagcattatccccgaggacacattcttcccaagccccgagagcagctgcgacgtgaagctggtggaaaagagcttcgagacagacaccaacctgaacttccagatcctgtacgagatcctgctgggcaaggccaccctgtacgccgtgctggtgtctgccctggtgctgatggctatggtcaagcggaaggacagccggggacgcgccaagagaagcggatctggcgtgaagcagaccctgaatttcgacctgctgaagctggctggcgacgtggaatccaacccaggccctactagtatggactggatttggcgcatccttttccttgtcggcgctgctaccggcgcgcattccgggccccagctccagctgcaagagtctggacctggcctggtcaagcctagcgagacactgagcctgacctgtaccgtgtccggcgatagcatcagcagcggcgattactactggggctggatcagacagcctcctggcaaaggactggaatggatcggccacatctactacagcggcgtgacctactacaaccccagcctgaagtccagagtgaccatcagcgtggacaccagccggaaccagttctccctgaagctgtctagcgtgacagccgccgataccgccgtgtactactgcaccagagaggacagcagcaactggcggagtagaggccagggaacactggtcacagttagctctggatccggcggaggcggaagtggaggcggaggatctggcggcggaggctctttcgaacaaatgcaactggttcaaagcggcggtggcctggtgcaacctggaagaagtctgagactgagctgtgccgccagcggcttcaccttcgatgattacgccatgcactgggtccgacaggcccctggaaaaggactggaatgggtgtccggcatctcctggaatagcggctctatcggctacgccgacagcgtgaagggcagattcaccatcagccgggacaacgccaagaacagcctgtacctccagatgaactccctgagagccgaggatacagccctgtactactgcgccaaggacatccacagcggcagctactacggcctgctgtactacgctatggacgtgtggggccagggcacaaccgtgacagtttcttctacgcgtgaggacctgaagaacgtgttcccacctgaggtggccgtgttcgagcctagcgaggccgagatcagccacacccagaaagccaccctcgtgtgcctggctaccggcttctaccccgaccatgtggaactgtcttggtgggtcaacggcaaagaggtgcacagcggcgtgtgtaccgacccccagccactgaaagaacagcccgccctgaacgacagccggtactgcctgagcagcagactgagagtgtccgccaccttctggcagaacccccggaaccacttcagatgccaggtgcagttctacggcctgagcgagaacgacgagtggacccaggacagagccaagcccgtgacccagatcgtgtctgccgaagcctggggcagagccgattgcggctttaccagcgagagctaccagcagggcgtgctgagcgccaccaacctgagcgtgatcggcttcagaatcctgctgctgaaagtggccggctttaacctgctgatgaccctgcggctgtggtccagc

SEQ ID NO: 5904 - DNA, 2724 bp, synthetic construct
  source 1..2724: mol_type = other DNA
atggccttaccagtgaccgccttgctcctgccgctggccttgctgctccacgccgccaggccggaagtgcagctggttgaatctggcggaggactggttcagcctggcggatctctgagactgtcttgtgccgccagcggcttcagcttcagcgacttttggatgagctgggtccgacaggcccctggcaaaggacttgaatgggtcgccacaatcagccaggccggcagcgagaaggactacgtggactctgtgaagggcagattcaccatcagccgggacaacgccaagaagtccctgtacctccagatgaacagcctgagagccgaggacaccgccgtgtactattgtgcctctggcgtgtacagcttcgactacagaggccagggcaccctggtcacagtctcttctggtaccggcggaggcggatctggcggcggaggtagcggtggcggaggatctgaattcctgcctgttctgacacagcctccatctgcctctggcacacctggacagagagtgaccatcagctgtagcggcagaagcagcaacatcggcagcaacagcgtgaactggtacagacagcttcctggcgctgcccctaagctgctgatctacagcaacaaccagcggcctcctggcgtgccagtcagattttctggcagcaagagcggcacaagcgccagcctggctatttctggactccagtctgaggacgaggccacctactactgtgccacctgggacgacaacctgaacgtgcactacgtgttcggcaccggcaccaaagtgacagtgcttggaagtagactcgagatccagaaccctgatcctgccgtgtaccagctgcgggatagcaagagcagcgacaagagcgtgtgtctgttcaccgacttcgacagccagaccaacgtgtcccagagcaaggactccgacgtgtacatcaccgataagtgcgtgctggacatgcggagcatggacttcaagagcaactccgccgtggcctggtccaacaagtccgatttcgcctgcgccaacgccttcaacaacagcattatccccgaggacacattcttcccaagccccgagagcagctgcgacgtgaagctggtggaaaagagcttcgagacagacaccaacctgaacttccagatcctgtacgagatcctgctgggcaaggccaccctgtacgccgtgctggtgtctgccctggtgctgatggctatggtcaagcggaaggacagccggggacgcgccaagagaagcggatctggcgtgaagcagaccctgaatttcgacctgctgaagctggctggcgacgtggaatccaacccaggccctactagtatggactggatttggcgcatccttttccttgtcggcgctgctaccggcgcgcattccgggccccagctccagctgcaagagtctggacctggcctggtcaagcctagcgagacactgagcctgacctgtaccgtgtccggcgatagcatcagcagcggcgattactactggggctggatcagacagcctcctggcaaaggactggaatggatcggccacatctactacagcggcgtgacctactacaaccccagcctgaagtccagagtgaccatcagcgtggacaccagccggaaccagttctccctgaagctgtctagcgtgacagccgccgataccgccgtgtactactgcaccagagaggacagcagcaactggcggagtagaggccagggaacactggtcacagttagctctggatccggcggaggcggaagtggaggcggaggatctggcggcggaggctctttcgaacttgaaatggctcaggtgcagctggtgcagagcggagccgaagtgaagaaacctggcagcagcgtgaaggtgtcctgcaaagcttctggcggcaccttcagcagctacgccatctcttgggttcgacaggcccctggacaaggactggaatggatgggcagaatcatccccatcctgggaatcgccaactacgcccagaaattccagggcagagtgacaatcaccgccgacaagagcaccagcaccgcctacatggaactgagcagcctgagaagcgaggacaccgccgtgtactattgtgcaagaggcggctactacagccacgacatgtggagcgaagattggggccagggcacactggtcacagtgtcatctacgcgtgaggacctgaagaacgtgttcccacctgaggtggccgtgttcgagcctagcgaggccgagatcagccacacccagaaagccaccctcgtgtgcctggctaccggcttctaccccgaccatgtggaactgtcttggtgggtcaacggcaaagaggtgcacagcggcgtgtgtaccgacccccagccactgaaagaacagcccgccctgaacgacagccggtactgcctgagcagcagactgagagtgtccgccaccttctggcagaacccccggaaccacttcagatgccaggtgcagttctacggcctgagcgagaacgacgagtggacccaggacagagccaagcccgtgacccagatcgtgtctgccgaagcctggggcagagccgattgcggctttaccagcgagagctaccagcagggcgtgctgagcgccaccaacctgagcgtgatcggcttcagaatcctgctgctgaaagtggccggctttaacctgctgatgaccctgcggctgtggtccagc

SEQ ID NO: 5905 - DNA, 2706 bp, synthetic construct
  source 1..2706: mol_type = other DNA
atggccttaccagtgaccgccttgctcctgccgctggccttgctgctccacgccgccaggccggaagtgcagctggttgaatctggcggaggactggttcagcctggcggatctctgagactgtcttgtgccgccagcggcttcagcttcagcgacttttggatgagctgggtccgacaggcccctggcaaaggacttgaatgggtcgccacaatcagccaggccggcagcgagaaggactacgtggactctgtgaagggcagattcaccatcagccgggacaacgccaagaagtccctgtacctccagatgaacagcctgagagccgaggacaccgccgtgtactattgtgcctctggcgtgtacagcttcgactacagaggccagggcaccctggtcacagtctcttctggtaccggcggaggcggatctggcggcggaggtagcggtggcggaggatctgaattcgacttcgtgatgacacagagccctgatagcctggccgtgtctctcggcgagcgagtgaccatgagctgcaagtctagccagagcctgctgaacagcggcaaccagaagaactacctgacctggtatcagcagaagcccggccagcctcctaagctgctgatctactgggccagcaccagagaaagcggcgtgcccgatagattttctggctctggcagcggcaccgacttcaccctgacaatttctagcctgcaagccgaggacgtggccgtgtactactgccagaacgactacagctacccctacaccttcggccagggcaccaagctggaaatcaaactcgagatccagaaccctgatcctgccgtgtaccagctgcgggatagcaagagcagcgacaagagcgtgtgtctgttcaccgacttcgacagccagaccaacgtgtcccagagcaaggactccgacgtgtacatcaccgataagtgcgtgctggacatgcggagcatggacttcaagagcaactccgccgtggcctggtccaacaagtccgatttcgcctgcgccaacgccttcaacaacagcattatccccgaggacacattcttcccaagccccgagagcagctgcgacgtgaagctggtggaaaagagcttcgagacagacaccaacctgaacttccagatcctgtacgagatcctgctgggcaaggccaccctgtacgccgtgctggtgtctgccctggtgctgatggctatggtcaagcggaaggacagccggggacgcgccaagagaagcggatctggcgtgaagcagaccctgaatttcgacctgctgaagctggctggcgacgtggaatccaacccaggccctactagtatggactggatttggcgcatccttttccttgtcggcgctgctaccggcgcgcattccgggccccagctccagctgcaagagtctggacctggcctggtcaagcctagcgagacactgagcctgacctgtaccgtgtccggcgatagcatcagcagcggcgattactactggggctggatcagacagcctcctggcaaaggactggaatggatcggccacatctactacagcggcgtgacctactacaaccccagcctgaagtccagagtgaccatcagcgtggacaccagccggaaccagttctccctgaagctgtctagcgtgacagccgccgataccgccgtgtactactgcaccagagaggacagcagcaactggcggagtagaggccagggaacactggtcacagttagctctggatccggcggaggcggaagtggaggcggaggatctggcggcggaggctctttcgaagaagtgcaactggttcagagcggagccgagctgaagaaacctggggccagcgtgaaggtgtcctgtaaagccagcggctacacctttaccgactactacatgaaatgggtccgacaggccccaggccagggactcgaatggatcggcgatattatccccagcaacggggccaccttctacaaccagaaattcaagggccgcgtgaccatcaccgtggacaagagcacaagcaccgcctacatggaactgagcagcctgagaagcgaggacaccgccgtgtattattgcgccagaagccatctgctgcgggccagttggttcgcctattggggacagggaaccctggtcaccgttagctctacgcgtgaggacctgaagaacgtgttcccacctgaggtggccgtgttcgagcctagcgaggccgagatcagccacacccagaaagccaccctcgtgtgcctggctaccggcttctaccccgaccatgtggaactgtcttggtgggtcaacggcaaagaggtgcacagcggcgtgtgtaccgacccccagccactgaaagaacagcccgccctgaacgacagccggtactgcctgagcagcagactgagagtgtccgccaccttctggcagaacccccggaaccacttcagatgccaggtgcagttctacggcctgagcgagaacgacgagtggacccaggacagagccaagcccgtgacccagatcgtgtctgccgaagcctggggcagagccgattgcggctttaccagcgagagctaccagcagggcgtgctgagcgccaccaacctgagcgtgatcggcttcagaatcctgctgctgaaagtggccggctttaacctgctgatgaccctgcggctgtggtccagc

SEQ ID NO: 5906 - DNA, 2706 bp, synthetic construct
  source 1..2706: mol_type = other DNA
atggccttaccagtgaccgccttgctcctgccgctggccttgctgctccacgccgccaggccggaagtgcagctggttgaatctggcggaggactggttcagcctggcggatctctgagactgtcttgtgccgccagcggcttcagcttcagcgacttttggatgagctgggtccgacaggcccctggcaaaggacttgaatgggtcgccacaatcagccaggccggcagcgagaaggactacgtggactctgtgaagggcagattcaccatcagccgggacaacgccaagaagtccctgtacctccagatgaacagcctgagagccgaggacaccgccgtgtactattgtgcctctggcgtgtacagcttcgactacagaggccagggcaccctggtcacagtctcttctggtaccggcggaggcggatctggcggcggaggtagcggtggcggaggatctgaattcgacttcgtgatgacacagagccctgatagcctggccgtgtctctcggcgagcgagtgaccatgagctgcaagtctagccagagcctgctgaacagcggcaaccagaagaactacctgacctggtatcagcagaagcccggccagcctcctaagctgctgatctactgggccagcaccagagaaagcggcgtgcccgatagattttctggctctggcagcggcaccgacttcaccctgacaatttctagcctgcaagccgaggacgtggccgtgtactactgccagaacgactacagctacccctacaccttcggccagggcaccaagctggaaatcaaactcgagatccagaaccctgatcctgccgtgtaccagctgcgggatagcaagagcagcgacaagagcgtgtgtctgttcaccgacttcgacagccagaccaacgtgtcccagagcaaggactccgacgtgtacatcaccgataagtgcgtgctggacatgcggagcatggacttcaagagcaactccgccgtggcctggtccaacaagtccgatttcgcctgcgccaacgccttcaacaacagcattatccccgaggacacattcttcccaagccccgagagcagctgcgacgtgaagctggtggaaaagagcttcgagacagacaccaacctgaacttccagatcctgtacgagatcctgctgggcaaggccaccctgtacgccgtgctggtgtctgccctggtgctgatggctatggtcaagcggaaggacagccggggacgcgccaagagaagcggatctggcgtgaagcagaccctgaatttcgacctgctgaagctggctggcgacgtggaatccaacccaggccctactagtatggactggatttggcgcatccttttccttgtcggcgctgctaccggcgcgcattccgggccccagctccagctgcaagagtctggacctggcctggtcaagcctagcgagacactgagcctgacctgtaccgtgtccggcgatagcatcagcagcggcgattactactggggctggatcagacagcctcctggcaaaggactggaatggatcggccacatctactacagcggcgtgacctactacaaccccagcctgaagtccagagtgaccatcagcgtggacaccagccggaaccagttctccctgaagctgtctagcgtgacagccgccgataccgccgtgtactactgcaccagagaggacagcagcaactggcggagtagaggccagggaacactggtcacagttagctctggatccggcggaggcggaagtggaggcggaggatctggcggcggaggctctttcgaacaagtgcaactggttcagagcggagccgagctgaagaaacctggggccagcgtgaaggtgtcctgtaaagccagcggctacacctttaccgactactacatgaaatgggtccgacaggccccaggccagggactcgaatggatcggcgatattatccccagcaacggggccaccttctacaaccagaaattcaagggccgcgtgaccatcaccgtggacaagagcacaagcaccgcctacatggaactgagcagcctgagaagcgaggacaccgccgtgtattattgcgccagaagccatctgctgcgggccagttggttcgcctattggggacagggaaccctggtcaccgttagctctacgcgtgaggacctgaagaacgtgttcccacctgaggtggccgtgttcgagcctagcgaggccgagatcagccacacccagaaagccaccctcgtgtgcctggctaccggcttctaccccgaccatgtggaactgtcttggtgggtcaacggcaaagaggtgcacagcggcgtgtgtaccgacccccagccactgaaagaacagcccgccctgaacgacagccggtactgcctgagcagcagactgagagtgtccgccaccttctggcagaacccccggaaccacttcagatgccaggtgcagttctacggcctgagcgagaacgacgagtggacccaggacagagccaagcccgtgacccagatcgtgtctgccgaagcctggggcagagccgattgcggctttaccagcgagagctaccagcagggcgtgctgagcgccaccaacctgagcgtgatcggcttcagaatcctgctgctgaaagtggccggctttaacctgctgatgaccctgcggctgtggtccagc

SEQ ID NO: 5907 - DNA, 2676 bp, synthetic construct
  source 1..2676: mol_type = other DNA
atggccttaccagtgaccgccttgctcctgccgctggccttgctgctccacgccgccaggccggaagtgcagctggttgaatctggcggaggactggttcagcctggcggatctctgagactgtcttgtgccgccagcggcttcagcttcagcgacttttggatgagctgggtccgacaggcccctggcaaaggacttgaatgggtcgccacaatcagccaggccggcagcgagaaggactacgtggactctgtgaagggcagattcaccatcagccgggacaacgccaagaagtccctgtacctccagatgaacagcctgagagccgaggacaccgccgtgtactattgtgcctctggcgtgtacagcttcgactacagaggccagggcaccctggtcacagtctcttctggtaccggcggaggcggatctggcggcggaggtagcggtggcggaggatctgaattcgacgtgcagatcacacagagccctagctacctggctgcctctcctggcgagacaatcaccatcaactgtcgggccagcaagagcatcagcaaggacctggcctggtatcaagagaagcccggcaagaccaacaagctgctgatctacagcggcagcacactccagtctggcatccccagcagattttccggctctggcagcggcaccgatttcaccctgaccataagcagcctggaacctgaggacttcgccatgtactactgccagcagcacaacaagtacccctacacctttggcggaggcaccaagctggaaatcaagagactcgagatccagaaccctgatcctgccgtgtaccagctgcgggatagcaagagcagcgacaagagcgtgtgtctgttcaccgacttcgacagccagaccaacgtgtcccagagcaaggactccgacgtgtacatcaccgataagtgcgtgctggacatgcggagcatggacttcaagagcaactccgccgtggcctggtccaacaagtccgatttcgcctgcgccaacgccttcaacaacagcattatccccgaggacacattcttcccaagccccgagagcagctgcgacgtgaagctggtggaaaagagcttcgagacagacaccaacctgaacttccagatcctgtacgagatcctgctgggcaaggccaccctgtacgccgtgctggtgtctgccctggtgctgatggctatggtcaagcggaaggacagccggggacgcgccaagagaagcggatctggcgtgaagcagaccctgaatttcgacctgctgaagctggctggcgacgtggaatccaacccaggccctactagtatggactggatttggcgcatccttttccttgtcggcgctgctaccggcgcgcattccgggccccagctccagctgcaagagtctggacctggcctggtcaagcctagcgagacactgagcctgacctgtaccgtgtccggcgatagcatcagcagcggcgattactactggggctggatcagacagcctcctggcaaaggactggaatggatcggccacatctactacagcggcgtgacctactacaaccccagcctgaagtccagagtgaccatcagcgtggacaccagccggaaccagttctccctgaagctgtctagcgtgacagccgccgataccgccgtgtactactgcaccagagaggacagcagcaactggcggagtagaggccagggaacactggtcacagttagctctggatccggcggaggcggaagtggaggcggaggatctggcggcggaggctctttcgaacaagttcaactgcaacagcctggggccgagcttgttagacctggcgcttctgtgaagctgagctgcaaggccagcggctacaccttcaccagctactggatgaactgggtcaagcagcggcctgaccagggcctcgaatggatcggcagaatcgacccctacgacagcgagacacactacaaccagaagttcaaggacaaggccatcctgaccgtggacaagagcagctccaccgcctacatgcaactgagcagcctgacctctgaggatagcgccgtgtactattgcgccagaggcaactgggacgactattggggccagggcacaaccctgacagtgtctagtacgcgtgaggacctgaagaacgtgttcccacctgaggtggccgtgttcgagcctagcgaggccgagatcagccacacccagaaagccaccctcgtgtgcctggctaccggcttctaccccgaccatgtggaactgtcttggtgggtcaacggcaaagaggtgcacagcggcgtgtgtaccgacccccagccactgaaagaacagcccgccctgaacgacagccggtactgcctgagcagcagactgagagtgtccgccaccttctggcagaacccccggaaccacttcagatgccaggtgcagttctacggcctgagcgagaacgacgagtggacccaggacagagccaagcccgtgacccagatcgtgtctgccgaagcctggggcagagccgattgcggctttaccagcgagagctaccagcagggcgtgctgagcgccaccaacctgagcgtgatcggcttcagaatcctgctgctgaaagtggccggctttaacctgctgatgaccctgcggctgtggtccagc

SEQ ID NO: 5908 - DNA, 2682 bp, synthetic construct
  source 1..2682: mol_type = other DNA
atggccttaccagtgaccgccttgctcctgccgctggccttgctgctccacgccgccaggccggaagtgcagctggttgaatctggcggaggactggttcagcctggcggatctctgagactgtcttgtgccgccagcggcttcagcttcagcgacttttggatgagctgggtccgacaggcccctggcaaaggacttgaatgggtcgccacaatcagccaggccggcagcgagaaggactacgtggactctgtgaagggcagattcaccatcagccgggacaacgccaagaagtccctgtacctccagatgaacagcctgagagccgaggacaccgccgtgtactattgtgcctctggcgtgtacagcttcgactacagaggccagggcaccctggtcacagtctcttctggtaccggcggaggcggatctggcggcggaggtagcggtggcggaggatctgaattcgagatcgtgctgacacagagccctaccagcatgacagcctctccaggcgagcaagtgaccatcacctgtagagccagcagcagcatcaactacatgcactggtatcagcagaagcctggcgcaagccccagaccttggatctacgagacaagcaagctggcctccggcgtgcccgatagattttctggatctgccagcggcaccagctacagcctgaccatcaacaacatggaagccgaggacgccgccacctactactgccagcagtggaattacccctcctggacctttggcggaggcaccaagctggaacttaaactcgagatccagaaccctgatcctgccgtgtaccagctgcgggatagcaagagcagcgacaagagcgtgtgtctgttcaccgacttcgacagccagaccaacgtgtcccagagcaaggactccgacgtgtacatcaccgataagtgcgtgctggacatgcggagcatggacttcaagagcaactccgccgtggcctggtccaacaagtccgatttcgcctgcgccaacgccttcaacaacagcattatccccgaggacacattcttcccaagccccgagagcagctgcgacgtgaagctggtggaaaagagcttcgagacagacaccaacctgaacttccagatcctgtacgagatcctgctgggcaaggccaccctgtacgccgtgctggtgtctgccctggtgctgatggctatggtcaagcggaaggacagccggggacgcgccaagagaagcggatctggcgtgaagcagaccctgaatttcgacctgctgaagctggctggcgacgtggaatccaacccaggccctactagtatggactggatttggcgcatccttttccttgtcggcgctgctaccggcgcgcattccgggccccagctccagctgcaagagtctggacctggcctggtcaagcctagcgagacactgagcctgacctgtaccgtgtccggcgatagcatcagcagcggcgattactactggggctggatcagacagcctcctggcaaaggactggaatggatcggccacatctactacagcggcgtgacctactacaaccccagcctgaagtccagagtgaccatcagcgtggacaccagccggaaccagttctccctgaagctgtctagcgtgacagccgccgataccgccgtgtactactgcaccagagaggacagcagcaactggcggagtagaggccagggaacactggtcacagttagctctggatccggcggaggcggaagtggaggcggaggatctggcggcggaggctctttcgaagaagtgcagctcgttgagtctggtggcggactggttcagcctggaagaagcctgaagctgagctgtgccgccagcggcttcaccttcagcgactacaatatggcctgggtccgacaggcccctaagaaaggactggaatgggtcgccaccatcctgtacgatggcggcagaacctactaccggggcagcgtgaagggcagattcaccatcagcagagacaacgccaagagcaccctgtacctgcggatggactctctgagaagcgaggataccgccacatattactgtgccacacacagccggggcaccgactactttgattattggggccagggcgtgatggttaccgtgtctagtacgcgtgaggacctgaagaacgtgttcccacctgaggtggccgtgttcgagcctagcgaggccgagatcagccacacccagaaagccaccctcgtgtgcctggctaccggcttctaccccgaccatgtggaactgtcttggtgggtcaacggcaaagaggtgcacagcggcgtgtgtaccgacccccagccactgaaagaacagcccgccctgaacgacagccggtactgcctgagcagcagactgagagtgtccgccaccttctggcagaacccccggaaccacttcagatgccaggtgcagttctacggcctgagcgagaacgacgagtggacccaggacagagccaagcccgtgacccagatcgtgtctgccgaagcctggggcagagccgattgcggctttaccagcgagagctaccagcagggcgtgctgagcgccaccaacctgagcgtgatcggcttcagaatcctgctgctgaaagtggccggctttaacctgctgatgaccctgcggctgtggtccagc

SEQ ID NO: 5909 - DNA, 2709 bp, synthetic construct
  source 1..2709: mol_type = other DNA
atggccttaccagtgaccgccttgctcctgccgctggccttgctgctccacgccgccaggccggaagtgcagctggttgaatctggcggaggactggttcagcctggcggatctctgagactgtcttgtgccgccagcggcttcagcttcagcgacttttggatgagctgggtccgacaggcccctggcaaaggacttgaatgggtcgccacaatcagccaggccggcagcgagaaggactacgtggactctgtgaagggcagattcaccatcagccgggacaacgccaagaagtccctgtacctccagatgaacagcctgagagccgaggacaccgccgtgtactattgtgcctctggcgtgtacagcttcgactacagaggccagggcaccctggtcacagtctcttctggtaccggcggaggcggatctggcggcggaggtagcggtggcggaggatctgaattcgacatcgtgatgacacagagcccttctagcctggccgtgtctgagggcgagacagtgaccatcaactgcaagagcagccagagcttcctgtctagcggcgacggcaagaattacgtggcctggtatcagtacaagcccggacagagccccaagctgctgatctactgggccagcacaagacagagcggcgtgcccgatagattcatcggctctggcagcggcaccgacttcaccctgacaatctctacagtgcaggccgaggacctggctatctactactgccagcagtattacgacacccctctgacctttggctccggcaccaagctggaaatcaaactcgagatccagaaccctgatcctgccgtgtaccagctgcgggatagcaagagcagcgacaagagcgtgtgtctgttcaccgacttcgacagccagaccaacgtgtcccagagcaaggactccgacgtgtacatcaccgataagtgcgtgctggacatgcggagcatggacttcaagagcaactccgccgtggcctggtccaacaagtccgatttcgcctgcgccaacgccttcaacaacagcattatccccgaggacacattcttcccaagccccgagagcagctgcgacgtgaagctggtggaaaagagcttcgagacagacaccaacctgaacttccagatcctgtacgagatcctgctgggcaaggccaccctgtacgccgtgctggtgtctgccctggtgctgatggctatggtcaagcggaaggacagccggggacgcgccaagagaagcggatctggcgtgaagcagaccctgaatttcgacctgctgaagctggctggcgacgtggaatccaacccaggccctactagtatggactggatttggcgcatccttttccttgtcggcgctgctaccggcgcgcattccgggccccagctccagctgcaagagtctggacctggcctggtcaagcctagcgagacactgagcctgacctgtaccgtgtccggcgatagcatcagcagcggcgattactactggggctggatcagacagcctcctggcaaaggactggaatggatcggccacatctactacagcggcgtgacctactacaaccccagcctgaagtccagagtgaccatcagcgtggacaccagccggaaccagttctccctgaagctgtctagcgtgacagccgccgataccgccgtgtactactgcaccagagaggacagcagcaactggcggagtagaggccagggaacactggtcacagttagctctggatccggcggaggcggaagtggaggcggaggatctggcggcggaggctctttcgaagaagtgaagctgcaagagtctggccccagcctggtgcagagtagccaaacactgagcctgacctgtaccgtgtccggctttagcctgaccagctaccacatccactgggtccgacagacccctggcaaaggactggaatggatgggcgtgatgtggagcgacggcgacaccagctataacagcgccctgaagtcccggctgagcatcagcagagatacaagccagagccaggtgttcctgaagatgaacagcctccagaccgaggacaccgccacctactattgtgccagaggctactacagcagctacctgtacctttggttcgcctattggggccagggcaccctggttacagtcagctctacgcgtgaggacctgaagaacgtgttcccacctgaggtggccgtgttcgagcctagcgaggccgagatcagccacacccagaaagccaccctcgtgtgcctggctaccggcttctaccccgaccatgtggaactgtcttggtgggtcaacggcaaagaggtgcacagcggcgtgtgtaccgacccccagccactgaaagaacagcccgccctgaacgacagccggtactgcctgagcagcagactgagagtgtccgccaccttctggcagaacccccggaaccacttcagatgccaggtgcagttctacggcctgagcgagaacgacgagtggacccaggacagagccaagcccgtgacccagatcgtgtctgccgaagcctggggcagagccgattgcggctttaccagcgagagctaccagcagggcgtgctgagcgccaccaacctgagcgtgatcggcttcagaatcctgctgctgaaagtggccggctttaacctgctgatgaccctgcggctgtggtccagc

SEQ ID NO: 5910 - DNA, 2721 bp, synthetic construct
  source 1..2721: mol_type = other DNA
atggccttaccagtgaccgccttgctcctgccgctggccttgctgctccacgccgccaggccggaagtgcagctggttgaatctggcggaggactggttcagcctggcggatctctgagactgtcttgtgccgccagcggcttcagcttcagcgacttttggatgagctgggtccgacaggcccctggcaaaggacttgaatgggtcgccacaatcagccaggccggcagcgagaaggactacgtggactctgtgaagggcagattcaccatcagccgggacaacgccaagaagtccctgtacctccagatgaacagcctgagagccgaggacaccgccgtgtactattgtgcctctggcgtgtacagcttcgactacagaggccagggcaccctggtcacagtctcttctggtaccggcggaggcggatctggcggcggaggtagcggtggcggaggatctgaattcgacgtgctgatgacccagacacctgtgtctctgccagtgtctctcggaggccaggtgtccatctcctgtagaagcagccagagcctggtgcactccgacggcgatacctacctgcactggtatctccagaagcctggacagagccctcagctcctgatctaccgggtgtccaacagattcagcggcgtgcccgatagattttccggcagcggctctggcaccgacttcaccctgaagatcagcagagtggaacccgaggacctgggcctgtactactgtctccagaccacacacttcccaccttggacctttggcggaggcaccaagctggaaatgaaactcgagatccagaaccctgatcctgccgtgtaccagctgcgggatagcaagagcagcgacaagagcgtgtgtctgttcaccgacttcgacagccagaccaacgtgtcccagagcaaggactccgacgtgtacatcaccgataagtgcgtgctggacatgcggagcatggacttcaagagcaactccgccgtggcctggtccaacaagtccgatttcgcctgcgccaacgccttcaacaacagcattatccccgaggacacattcttcccaagccccgagagcagctgcgacgtgaagctggtggaaaagagcttcgagacagacaccaacctgaacttccagatcctgtacgagatcctgctgggcaaggccaccctgtacgccgtgctggtgtctgccctggtgctgatggctatggtcaagcggaaggacagccggggacgcgccaagagaagcggatctggcgtgaagcagaccctgaatttcgacctgctgaagctggctggcgacgtggaatccaacccaggccctactagtatggactggatttggcgcatccttttccttgtcggcgctgctaccggcgcgcattccgggccccagctccagctgcaagagtctggacctggcctggtcaagcctagcgagacactgagcctgacctgtaccgtgtccggcgatagcatcagcagcggcgattactactggggctggatcagacagcctcctggcaaaggactggaatggatcggccacatctactacagcggcgtgacctactacaaccccagcctgaagtccagagtgaccatcagcgtggacaccagccggaaccagttctccctgaagctgtctagcgtgacagccgccgataccgccgtgtactactgcaccagagaggacagcagcaactggcggagtagaggccagggaacactggtcacagttagctctggatccggcggaggcggaagtggaggcggaggatctggcggcggaggctctttcgaacaggttcagctccagcagtctggacccgagcttagaaggccaggatctagcgtcagactgagctgcaaggccagcggctaccggatcaaggacttcctgatccactggattaagaacagacccgagcacggcctggaatggatcggatggattgaccctgaggacggcgagactaagtacgcccagaagttccagaccaaggccacactgaccgccgacacctctagcaacaccgcctacatgcaactgagcagcctgaccagcgaggacaccgccacctacttttgtgctagatggggcgacgtgtactacggcctgatgagaggccatgtgatggatgcctggggccagggaacaagcgtgacagtctcttctacgcgtgaggacctgaagaacgtgttcccacctgaggtggccgtgttcgagcctagcgaggccgagatcagccacacccagaaagccaccctcgtgtgcctggctaccggcttctaccccgaccatgtggaactgtcttggtgggtcaacggcaaagaggtgcacagcggcgtgtgtaccgacccccagccactgaaagaacagcccgccctgaacgacagccggtactgcctgagcagcagactgagagtgtccgccaccttctggcagaacccccggaaccacttcagatgccaggtgcagttctacggcctgagcgagaacgacgagtggacccaggacagagccaagcccgtgacccagatcgtgtctgccgaagcctggggcagagccgattgcggctttaccagcgagagctaccagcagggcgtgctgagcgccaccaacctgagcgtgatcggcttcagaatcctgctgctgaaagtggccggctttaacctgctgatgaccctgcggctgtggtccagc

SEQ ID NO: 5911 - DNA, 2706 bp, synthetic construct
  source 1..2706: mol_type = other DNA
atggccttaccagtgaccgccttgctcctgccgctggccttgctgctccacgccgccaggccggaagtgcagctggttgaatctggcggaggactggttcagcctggcggatctctgagactgtcttgtgccgccagcggcttcagcttcagcgacttttggatgagctgggtccgacaggcccctggcaaaggacttgaatgggtcgccacaatcagccaggccggcagcgagaaggactacgtggactctgtgaagggcagattcaccatcagccgggacaacgccaagaagtccctgtacctccagatgaacagcctgagagccgaggacaccgccgtgtactattgtgcctctggcgtgtacagcttcgactacagaggccagggcaccctggtcacagtctcttctggtaccggcggaggcggatctggcggcggaggtagcggtggcggaggatctgaattcgacatcgtgatgacacagagccccgccacactgtcactgtctccaggcgaaagagccacactgagctgtcggagcagcaagagcctccagaacgtgaacggcaacacctacctgtactggttccagcagaagcccggccagtctcctcagctcctgatctacagaatgagcaacctgaacagcggcgtgcccgacagattttctggcagcggaagcggcaccgagttcaccctgaccataagcagcctggaacctgaggacttcgccgtgtactactgtatgcagcacctggaataccccatcaccttcggagccggcaccaagctggaaatcaaactcgagatccagaaccctgatcctgccgtgtaccagctgcgggatagcaagagcagcgacaagagcgtgtgtctgttcaccgacttcgacagccagaccaacgtgtcccagagcaaggactccgacgtgtacatcaccgataagtgcgtgctggacatgcggagcatggacttcaagagcaactccgccgtggcctggtccaacaagtccgatttcgcctgcgccaacgccttcaacaacagcattatccccgaggacacattcttcccaagccccgagagcagctgcgacgtgaagctggtggaaaagagcttcgagacagacaccaacctgaacttccagatcctgtacgagatcctgctgggcaaggccaccctgtacgccgtgctggtgtctgccctggtgctgatggctatggtcaagcggaaggacagccggggacgcgccaagagaagcggatctggcgtgaagcagaccctgaatttcgacctgctgaagctggctggcgacgtggaatccaacccaggccctactagtatggactggatttggcgcatccttttccttgtcggcgctgctaccggcgcgcattccgggccccagctccagctgcaagagtctggacctggcctggtcaagcctagcgagacactgagcctgacctgtaccgtgtccggcgatagcatcagcagcggcgattactactggggctggatcagacagcctcctggcaaaggactggaatggatcggccacatctactacagcggcgtgacctactacaaccccagcctgaagtccagagtgaccatcagcgtggacaccagccggaaccagttctccctgaagctgtctagcgtgacagccgccgataccgccgtgtactactgcaccagagaggacagcagcaactggcggagtagaggccagggaacactggtcacagttagctctggatccggcggaggcggaagtggaggcggaggatctggcggcggaggctctttcgaagaagtgcaactggttgaatctggcggcggactggttaagcctggcggatctctgaagctgagctgtgccgccagcggctacacctttaccagctacgtgatgcactgggtccgacaggcccctggcaaaggacttgagtggatcggctacatcaacccctacaacgatggcaccaagtacaacgagaagttccagggcagagtgaccatcagctccgacaagagcatcagcaccgcctacatggaactgagcagcctgagaagcgaggataccgccatgtactattgcgccagaggcacctactactacggcaccagagtgttcgactactggggccagggaaccctggtcacagtctcttctacgcgtgaggacctgaagaacgtgttcccacctgaggtggccgtgttcgagcctagcgaggccgagatcagccacacccagaaagccaccctcgtgtgcctggctaccggcttctaccccgaccatgtggaactgtcttggtgggtcaacggcaaagaggtgcacagcggcgtgtgtaccgacccccagccactgaaagaacagcccgccctgaacgacagccggtactgcctgagcagcagactgagagtgtccgccaccttctggcagaacccccggaaccacttcagatgccaggtgcagttctacggcctgagcgagaacgacgagtggacccaggacagagccaagcccgtgacccagatcgtgtctgccgaagcctggggcagagccgattgcggctttaccagcgagagctaccagcagggcgtgctgagcgccaccaacctgagcgtgatcggcttcagaatcctgctgctgaaagtggccggctttaacctgctgatgaccctgcggctgtggtccagc

SEQ ID NO: 5912 - DNA, 2694 bp, synthetic construct
  source 1..2694: mol_type = other DNA
atggccttaccagtgaccgccttgctcctgccgctggccttgctgctccacgccgccaggccggaagtgcagctggttgaatctggcggaggactggttcagcctggcggatctctgagactgtcttgtgccgccagcggcttcagcttcagcgacttttggatgagctgggtccgacaggcccctggcaaaggacttgaatgggtcgccacaatcagccaggccggcagcgagaaggactacgtggactctgtgaagggcagattcaccatcagccgggacaacgccaagaagtccctgtacctccagatgaacagcctgagagccgaggacaccgccgtgtactattgtgcctctggcgtgtacagcttcgactacagaggccagggcaccctggtcacagtctcttctggtaccggcggaggcggatctggcggcggaggtagcggtggcggaggatctgaattcgacatccagatgacacagagccctagcagcctgtctgccagcgtgggagacagagtgaccatcacatgcaaggccagcgaccacatcaacaactggctggcctggtatcagcagaagcctggacaggcccctaagctgctgatctacggcgctaccacactggaaacaggcgtgcccagcagattttctggcagcggctctggcaccgactacaccctgacaatatccagcctccagcctgaggacttcgccacctactactgtcagcagagctggaacaccccttggacattcggccagggcaccaagctggaaatcaagagactcgagatccagaaccctgatcctgccgtgtaccagctgcgggatagcaagagcagcgacaagagcgtgtgtctgttcaccgacttcgacagccagaccaacgtgtcccagagcaaggactccgacgtgtacatcaccgataagtgcgtgctggacatgcggagcatggacttcaagagcaactccgccgtggcctggtccaacaagtccgatttcgcctgcgccaacgccttcaacaacagcattatccccgaggacacattcttcccaagccccgagagcagctgcgacgtgaagctggtggaaaagagcttcgagacagacaccaacctgaacttccagatcctgtacgagatcctgctgggcaaggccaccctgtacgccgtgctggtgtctgccctggtgctgatggctatggtcaagcggaaggacagccggggacgcgccaagagaagcggatctggcgtgaagcagaccctgaatttcgacctgctgaagctggctggcgacgtggaatccaacccaggccctactagtatggactggatttggcgcatccttttccttgtcggcgctgctaccggcgcgcattccgggccccagctccagctgcaagagtctggacctggcctggtcaagcctagcgagacactgagcctgacctgtaccgtgtccggcgatagcatcagcagcggcgattactactggggctggatcagacagcctcctggcaaaggactggaatggatcggccacatctactacagcggcgtgacctactacaaccccagcctgaagtccagagtgaccatcagcgtggacaccagccggaaccagttctccctgaagctgtctagcgtgacagccgccgataccgccgtgtactactgcaccagagaggacagcagcaactggcggagtagaggccagggaacactggtcacagttagctctggatccggcggaggcggaagtggaggcggaggatctggcggcggaggctctttcgaacaagttcagcttcaacagcctggcgctgagctggtcaaacctggcgcttctgtgaagatgagctgcaaagccagcggctacgccttcagcagctactggatcaactggatgaagcagaaacccggccagggactcgaatggatcggccaaatctatcccggcgacggcgacaccaactacaacggcaagttcaagggcagagccacactgaccgccgatacctctagcagcacagcctacatgcagctgagcagcctgaccagcgaagatagcgccgtgtacttctgtgcccggtccatcacaacagtcgtgggctgcgctatggactattggggccagggaacaagcgtgaccgtgtctagtacgcgtgaggacctgaagaacgtgttcccacctgaggtggccgtgttcgagcctagcgaggccgagatcagccacacccagaaagccaccctcgtgtgcctggctaccggcttctaccccgaccatgtggaactgtcttggtgggtcaacggcaaagaggtgcacagcggcgtgtgtaccgacccccagccactgaaagaacagcccgccctgaacgacagccggtactgcctgagcagcagactgagagtgtccgccaccttctggcagaacccccggaaccacttcagatgccaggtgcagttctacggcctgagcgagaacgacgagtggacccaggacagagccaagcccgtgacccagatcgtgtctgccgaagcctggggcagagccgattgcggctttaccagcgagagctaccagcagggcgtgctgagcgccaccaacctgagcgtgatcggcttcagaatcctgctgctgaaagtggccggctttaacctgctgatgaccctgcggctgtggtccagc

SEQ ID NO: 5913 - DNA, 2700 bp, synthetic construct
  source 1..2700: mol_type = other DNA
atggccttaccagtgaccgccttgctcctgccgctggccttgctgctccacgccgccaggccggaagtgcagctggttgaatctggcggaggactggttcagcctggcggatctctgagactgtcttgtgccgccagcggcttcagcttcagcgacttttggatgagctgggtccgacaggcccctggcaaaggacttgaatgggtcgccacaatcagccaggccggcagcgagaaggactacgtggactctgtgaagggcagattcaccatcagccgggacaacgccaagaagtccctgtacctccagatgaacagcctgagagccgaggacaccgccgtgtactattgtgcctctggcgtgtacagcttcgactacagaggccagggcaccctggtcacagtctcttctggtaccggcggaggcggatctggcggcggaggtagcggtggcggaggatctgaattccagatcgtgctgtctcagtctcctgccatcctgagcgcttccccaggcgagaaagtgaccatgacctgtagagccagcagcagcgtgtcctacatgcactggtatcagcagaagcccggcagcagccctaagccttggatctacgccaccagcaatctggcctctggcgtgccagccagattttctggctctggcagcggcaccagctacagcttcacaatcagcagagtggaagccgaggacgccgccacctactattgtcagcagtggaccttcaatcctcctaccttcggcggaggcacccggctggaaatcaaaagaacagtggctgctctcgagatccagaaccctgatcctgccgtgtaccagctgcgggatagcaagagcagcgacaagagcgtgtgtctgttcaccgacttcgacagccagaccaacgtgtcccagagcaaggactccgacgtgtacatcaccgataagtgcgtgctggacatgcggagcatggacttcaagagcaactccgccgtggcctggtccaacaagtccgatttcgcctgcgccaacgccttcaacaacagcattatccccgaggacacattcttcccaagccccgagagcagctgcgacgtgaagctggtggaaaagagcttcgagacagacaccaacctgaacttccagatcctgtacgagatcctgctgggcaaggccaccctgtacgccgtgctggtgtctgccctggtgctgatggctatggtcaagcggaaggacagccggggacgcgccaagagaagcggatctggcgtgaagcagaccctgaatttcgacctgctgaagctggctggcgacgtggaatccaacccaggccctactagtatggactggatttggcgcatccttttccttgtcggcgctgctaccggcgcgcattccgggccccagctccagctgcaagagtctggacctggcctggtcaagcctagcgagacactgagcctgacctgtaccgtgtccggcgatagcatcagcagcggcgattactactggggctggatcagacagcctcctggcaaaggactggaatggatcggccacatctactacagcggcgtgacctactacaaccccagcctgaagtccagagtgaccatcagcgtggacaccagccggaaccagttctccctgaagctgtctagcgtgacagccgccgataccgccgtgtactactgcaccagagaggacagcagcaactggcggagtagaggccagggaacactggtcacagttagctctggatccggcggaggcggaagtggaggcggaggatctggcggcggaggctctttcgaacaggcttatctgcaacagagcggagccgaactcgtcagacctggcgcttctgtgaagatgagctgcaaggccagcggctacaccttcaccagctataatatgcactgggtcaagcagacccctcggcagggactcgaatggatcggcggaatctatcccggcaacggcgacacctcctacaaccagaagttcaagggcaaagccacactgaccgtgggcaagagcagcagcaccgcctatatgcagctcagcagcctgaccagcgaggacagcgccgtgtacttctgcgccagatacgactacaactacgctatggactactggggccagggcaccagcgtgacagttagctctgccagcacgcgtgaggacctgaagaacgtgttcccacctgaggtggccgtgttcgagcctagcgaggccgagatcagccacacccagaaagccaccctcgtgtgcctggctaccggcttctaccccgaccatgtggaactgtcttggtgggtcaacggcaaagaggtgcacagcggcgtgtgtaccgacccccagccactgaaagaacagcccgccctgaacgacagccggtactgcctgagcagcagactgagagtgtccgccaccttctggcagaacccccggaaccacttcagatgccaggtgcagttctacggcctgagcgagaacgacgagtggacccaggacagagccaagcccgtgacccagatcgtgtctgccgaagcctggggcagagccgattgcggctttaccagcgagagctaccagcagggcgtgctgagcgccaccaacctgagcgtgatcggcttcagaatcctgctgctgaaagtggccggctttaacctgctgatgaccctgcggctgtggtccagc

SEQ ID NO: 5914 - DNA, 2694 bp, synthetic construct
  source 1..2694: mol_type = other DNA
atggccttaccagtgaccgccttgctcctgccgctggccttgctgctccacgccgccaggccggaagtgcagctggttgaatctggcggaggactggttcagcctggcggatctctgagactgtcttgtgccgccagcggcttcagcttcagcgacttttggatgagctgggtccgacaggcccctggcaaaggacttgaatgggtcgccacaatcagccaggccggcagcgagaaggactacgtggactctgtgaagggcagattcaccatcagccgggacaacgccaagaagtccctgtacctccagatgaacagcctgagagccgaggacaccgccgtgtactattgtgcctctggcgtgtacagcttcgactacagaggccagggcaccctggtcacagtctcttctggtaccggcggaggcggatctggcggcggaggtagcggtggcggaggatctgaattcgagatcgtgctgacacagagccctgccaccctgtctctgagccctggcgaaagagccaccctgagctgtagagccagccagagcgtgtccagctacctggcctggtatcagcagaagcccggccaggctccccggctgctgatctacgatgccagcaatagagccaccggcatccccgccagattttccggctctggcagcggcaccgacttcaccctgaccatcagctccctggaacccgaggacttcgccgtgtactactgccagcagcggagcaactggcccatcacattcggccagggcacccggctggaaatcaaactcgagatccagaaccctgatcctgccgtgtaccagctgcgggatagcaagagcagcgacaagagcgtgtgtctgttcaccgacttcgacagccagaccaacgtgtcccagagcaaggactccgacgtgtacatcaccgataagtgcgtgctggacatgcggagcatggacttcaagagcaactccgccgtggcctggtccaacaagtccgatttcgcctgcgccaacgccttcaacaacagcattatccccgaggacacattcttcccaagccccgagagcagctgcgacgtgaagctggtggaaaagagcttcgagacagacaccaacctgaacttccagatcctgtacgagatcctgctgggcaaggccaccctgtacgccgtgctggtgtctgccctggtgctgatggctatggtcaagcggaaggacagccggggacgcgccaagagaagcggatctggcgtgaagcagaccctgaatttcgacctgctgaagctggctggcgacgtggaatccaacccaggccctactagtatggactggatttggcgcatccttttccttgtcggcgctgctaccggcgcgcattccgggccccagctccagctgcaagagtctggacctggcctggtcaagcctagcgagacactgagcctgacctgtaccgtgtccggcgatagcatcagcagcggcgattactactggggctggatcagacagcctcctggcaaaggactggaatggatcggccacatctactacagcggcgtgacctactacaaccccagcctgaagtccagagtgaccatcagcgtggacaccagccggaaccagttctccctgaagctgtctagcgtgacagccgccgataccgccgtgtactactgcaccagagaggacagcagcaactggcggagtagaggccagggaacactggtcacagttagctctggatccggcggaggcggaagtggaggcggaggatctggcggcggaggctctttcgaagaggtgcagcttgttgagtctggcggaggactggtgcagcccgatagaagcctgagactgtcttgtgccgccagcggcttcaccttccacgattatgccatgcactgggtccgacaggcccctggcaaaggacttgaatgggtgtccaccatctcttggaacagcggcacaatcggctacgccgactctgtgaagggcagattcaccatcagccgggacaacgccaagaacagcctgtacctccagatgaactccctgagagccgaggacacagccctgtactactgcgccaaggacatccagtacggcaactactactacggcatggacgtgtggggccagggcacaacagtgacagtctcttctacgcgtgaggacctgaagaacgtgttcccacctgaggtggccgtgttcgagcctagcgaggccgagatcagccacacccagaaagccaccctcgtgtgcctggctaccggcttctaccccgaccatgtggaactgtcttggtgggtcaacggcaaagaggtgcacagcggcgtgtgtaccgacccccagccactgaaagaacagcccgccctgaacgacagccggtactgcctgagcagcagactgagagtgtccgccaccttctggcagaacccccggaaccacttcagatgccaggtgcagttctacggcctgagcgagaacgacgagtggacccaggacagagccaagcccgtgacccagatcgtgtctgccgaagcctggggcagagccgattgcggctttaccagcgagagctaccagcagggcgtgctgagcgccaccaacctgagcgtgatcggcttcagaatcctgctgctgaaagtggccggctttaacctgctgatgaccctgcggctgtggtccagc

SEQ ID NO: 5915 - DNA, 2679 bp, synthetic construct
  source 1..2679: mol_type = other DNA
atggccttaccagtgaccgccttgctcctgccgctggccttgctgctccacgccgccaggccggaagtgcagctggttgaatctggcggaggactggttcagcctggcggatctctgagactgtcttgtgccgccagcggcttcagcttcagcgacttttggatgagctgggtccgacaggcccctggcaaaggacttgaatgggtcgccacaatcagccaggccggcagcgagaaggactacgtggactctgtgaagggcagattcaccatcagccgggacaacgccaagaagtccctgtacctccagatgaacagcctgagagccgaggacaccgccgtgtactattgtgcctctggcgtgtacagcttcgactacagaggccagggcaccctggtcacagtctcttctggtaccggcggaggcggatctggcggcggaggtagcggtggcggaggatctgaattcgacatccagatgacacagagccctagcagcctgtctgccagcgtgggagatagagtgaccatcaactgcaaggccagccaggacatcaacagctacctgagctggttccagcagaagcctggcaaggcccctaagacactgatctaccgggccaacagactggtggatggcgtgccaagcagattttctggcagcggcagcggccaggattacaccctgacaatatccagcctccagcctgaggacttcgccacctactactgcctccagtacgacgagttccctctgacctttggcggaggcaccaaggtggaaatcaaactcgagatccagaaccctgatcctgccgtgtaccagctgcgggatagcaagagcagcgacaagagcgtgtgtctgttcaccgacttcgacagccagaccaacgtgtcccagagcaaggactccgacgtgtacatcaccgataagtgcgtgctggacatgcggagcatggacttcaagagcaactccgccgtggcctggtccaacaagtccgatttcgcctgcgccaacgccttcaacaacagcattatccccgaggacacattcttcccaagccccgagagcagctgcgacgtgaagctggtggaaaagagcttcgagacagacaccaacctgaacttccagatcctgtacgagatcctgctgggcaaggccaccctgtacgccgtgctggtgtctgccctggtgctgatggctatggtcaagcggaaggacagccggggacgcgccaagagaagcggatctggcgtgaagcagaccctgaatttcgacctgctgaagctggctggcgacgtggaatccaacccaggccctactagtatggactggatttggcgcatccttttccttgtcggcgctgctaccggcgcgcattccgggccccagctccagctgcaagagtctggacctggcctggtcaagcctagcgagacactgagcctgacctgtaccgtgtccggcgatagcatcagcagcggcgattactactggggctggatcagacagcctcctggcaaaggactggaatggatcggccacatctactacagcggcgtgacctactacaaccccagcctgaagtccagagtgaccatcagcgtggacaccagccggaaccagttctccctgaagctgtctagcgtgacagccgccgataccgccgtgtactactgcaccagagaggacagcagcaactggcggagtagaggccagggaacactggtcacagttagctctggatccggcggaggcggaagtggaggcggaggatctggcggcggaggctctttcgaacaggtgcaactggtgcagtctggggccgaagtgaagaaacctggggcctctgtgaaggtgtcctgcaaagccagcggctacacctttaccaactacgacatcaactgggtccgacaggctccaggccaaggactggaatggatcggctggatctatcctggcgacggcagcaccaagtacaacgagaagttcaaggccaaggccacactgaccgccgataccagcacaagcaccgcctacatggaactgcggagcctgagaagcgacgacaccgccgtgtactattgtgcctccggctacgaggacgctatggactattggggccagggcaccaccgtgacagtgtctagtacgcgtgaggacctgaagaacgtgttcccacctgaggtggccgtgttcgagcctagcgaggccgagatcagccacacccagaaagccaccctcgtgtgcctggctaccggcttctaccccgaccatgtggaactgtcttggtgggtcaacggcaaagaggtgcacagcggcgtgtgtaccgacccccagccactgaaagaacagcccgccctgaacgacagccggtactgcctgagcagcagactgagagtgtccgccaccttctggcagaacccccggaaccacttcagatgccaggtgcagttctacggcctgagcgagaacgacgagtggacccaggacagagccaagcccgtgacccagatcgtgtctgccgaagcctggggcagagccgattgcggctttaccagcgagagctaccagcagggcgtgctgagcgccaccaacctgagcgtgatcggcttcagaatcctgctgctgaaagtggccggctttaacctgctgatgaccctgcggctgtggtccagc

SEQ ID NO: 5916 - DNA, 2685 bp, synthetic construct
  source 1..2685: mol_type = other DNA
atggccttaccagtgaccgccttgctcctgccgctggccttgctgctccacgccgccaggccggaagtgcagctggttgaatctggcggaggactggttcagcctggcggatctctgagactgtcttgtgccgccagcggcttcagcttcagcgacttttggatgagctgggtccgacaggcccctggcaaaggacttgaatgggtcgccacaatcagccaggccggcagcgagaaggactacgtggactctgtgaagggcagattcaccatcagccgggacaacgccaagaagtccctgtacctccagatgaacagcctgagagccgaggacaccgccgtgtactattgtgcctctggcgtgtacagcttcgactacagaggccagggcaccctggtcacagtctcttctggtaccggcggaggcggatctggcggcggaggtagcggtggcggaggatctgaattcgacatcgtgatgacccagacacctctgagcctgagcgtgacacctggacagcctgccagcattagctgcaagagcagccagtctctgctggacggcgacggcaagacctacctgaattggctgctccagaagcctggacagagccctcagcggctgatctacctggtgtccaagctggatagcggcgtgcccgatagattttctggcagcggctctggcaccgacttcaccctgaagatcagcagagtggaagccgaggacgtgggcgtgtactactgttggcagggcacacacttccccagaacattcggccagggcacaaagctggaaatcaaactcgagatccagaaccctgatcctgccgtgtaccagctgcgggatagcaagagcagcgacaagagcgtgtgtctgttcaccgacttcgacagccagaccaacgtgtcccagagcaaggactccgacgtgtacatcaccgataagtgcgtgctggacatgcggagcatggacttcaagagcaactccgccgtggcctggtccaacaagtccgatttcgcctgcgccaacgccttcaacaacagcattatccccgaggacacattcttcccaagccccgagagcagctgcgacgtgaagctggtggaaaagagcttcgagacagacaccaacctgaacttccagatcctgtacgagatcctgctgggcaaggccaccctgtacgccgtgctggtgtctgccctggtgctgatggctatggtcaagcggaaggacagccggggacgcgccaagagaagcggatctggcgtgaagcagaccctgaatttcgacctgctgaagctggctggcgacgtggaatccaacccaggccctactagtatggactggatttggcgcatccttttccttgtcggcgctgctaccggcgcgcattccgggccccagctccagctgcaagagtctggacctggcctggtcaagcctagcgagacactgagcctgacctgtaccgtgtccggcgatagcatcagcagcggcgattactactggggctggatcagacagcctcctggcaaaggactggaatggatcggccacatctactacagcggcgtgacctactacaaccccagcctgaagtccagagtgaccatcagcgtggacaccagccggaaccagttctccctgaagctgtctagcgtgacagccgccgataccgccgtgtactactgcaccagagaggacagcagcaactggcggagtagaggccagggaacactggtcacagttagctctggatccggcggaggcggaagtggaggcggaggatctggcggcggaggctctttcgaacaagtgcaactggttcagagcggagccgaagtgaagaaacctggggcctctgtgaaggtgtcctgcaaggccagcggctacaccttcaaggacacctacatccactgggtccgacaggcccctggacaaggacttgagtggatgggcagaatcgaccccgccaacggcaacaccaaatacgaccccaagttccagggcagagtgaccatgaccagagacaccagcatcagcaccgcctacatggaactgagccggctgagatccgatgacaccgccgtgtactattgcgctagaagaggcggagtggattggggccagggaacactggttaccgtgtctagtacgcgtgaggacctgaagaacgtgttcccacctgaggtggccgtgttcgagcctagcgaggccgagatcagccacacccagaaagccaccctcgtgtgcctggctaccggcttctaccccgaccatgtggaactgtcttggtgggtcaacggcaaagaggtgcacagcggcgtgtgtaccgacccccagccactgaaagaacagcccgccctgaacgacagccggtactgcctgagcagcagactgagagtgtccgccaccttctggcagaacccccggaaccacttcagatgccaggtgcagttctacggcctgagcgagaacgacgagtggacccaggacagagccaagcccgtgacccagatcgtgtctgccgaagcctggggcagagccgattgcggctttaccagcgagagctaccagcagggcgtgctgagcgccaccaacctgagcgtgatcggcttcagaatcctgctgctgaaagtggccggctttaacctgctgatgaccctgcggctgtggtccagc

SEQ ID NO: 5917 - DNA, 2688 bp, synthetic construct
  source 1..2688: mol_type = other DNA
atggccttaccagtgaccgccttgctcctgccgctggccttgctgctccacgccgccaggccggaagtgcagctggttgaatctggcggaggactggttcagcctggcggatctctgagactgtcttgtgccgccagcggcttcagcttcagcgacttttggatgagctgggtccgacaggcccctggcaaaggacttgaatgggtcgccacaatcagccaggccggcagcgagaaggactacgtggactctgtgaagggcagattcaccatcagccgggacaacgccaagaagtccctgtacctccagatgaacagcctgagagccgaggacaccgccgtgtactattgtgcctctggcgtgtacagcttcgactacagaggccagggcaccctggtcacagtctcttctggtaccggcggaggcggatctggcggcggaggtagcggtggcggaggatctgaattcgacatccagatgacacagagccctagcagcctgtctgccagcgtgggagacagagtgaccatcacatgcaaggccagccaggatgtgtctacagccgtggcctggttccagcagaagcctggaaaagcccctaagctgctgatctacagccccagctacagatacaccggcgtgcccagcagattttctggcagcggctctggcaccgacttcaccctgacaatatccagcctccagcctgaggacttcacctactactgccagcagctctacagcaccccttacacattcggccagggcaccaaggtggaaatcaaactcgagatccagaaccctgatcctgccgtgtaccagctgcgggatagcaagagcagcgacaagagcgtgtgtctgttcaccgacttcgacagccagaccaacgtgtcccagagcaaggactccgacgtgtacatcaccgataagtgcgtgctggacatgcggagcatggacttcaagagcaactccgccgtggcctggtccaacaagtccgatttcgcctgcgccaacgccttcaacaacagcattatccccgaggacacattcttcccaagccccgagagcagctgcgacgtgaagctggtggaaaagagcttcgagacagacaccaacctgaacttccagatcctgtacgagatcctgctgggcaaggccaccctgtacgccgtgctggtgtctgccctggtgctgatggctatggtcaagcggaaggacagccggggacgcgccaagagaagcggatctggcgtgaagcagaccctgaatttcgacctgctgaagctggctggcgacgtggaatccaacccaggccctactagtatggactggatttggcgcatccttttccttgtcggcgctgctaccggcgcgcattccgggccccagctccagctgcaagagtctggacctggcctggtcaagcctagcgagacactgagcctgacctgtaccgtgtccggcgatagcatcagcagcggcgattactactggggctggatcagacagcctcctggcaaaggactggaatggatcggccacatctactacagcggcgtgacctactacaaccccagcctgaagtccagagtgaccatcagcgtggacaccagccggaaccagttctccctgaagctgtctagcgtgacagccgccgataccgccgtgtactactgcaccagagaggacagcagcaactggcggagtagaggccagggaacactggtcacagttagctctggatccggcggaggcggaagtggaggcggaggatctggcggcggaggctctttcgaagaagtgcaactggttcagagcggagccgaagtgaagaaacctggggcctctgtgaaggtgtcctgcaaagccagcggctacacctttaccgactactacctggacgtggtcgtgcggcaagctcctggacaaggactggaatggatcggcagagtgaacccctacaacggcggcaccatctacaaccagaaattcaagggaagagtgaccctgaccagagacaccagcacctccacagcctacctggaactgagcagcctgagaagcgaagataccgccgtgtactactgcgccagggaccactacagatatgaccctctgctggactactggggccagggaaccctggttacagtgtctagtacgcgtgaggacctgaagaacgtgttcccacctgaggtggccgtgttcgagcctagcgaggccgagatcagccacacccagaaagccaccctcgtgtgcctggctaccggcttctaccccgaccatgtggaactgtcttggtgggtcaacggcaaagaggtgcacagcggcgtgtgtaccgacccccagccactgaaagaacagcccgccctgaacgacagccggtactgcctgagcagcagactgagagtgtccgccaccttctggcagaacccccggaaccacttcagatgccaggtgcagttctacggcctgagcgagaacgacgagtggacccaggacagagccaagcccgtgacccagatcgtgtctgccgaagcctggggcagagccgattgcggctttaccagcgagagctaccagcagggcgtgctgagcgccaccaacctgagcgtgatcggcttcagaatcctgctgctgaaagtggccggctttaacctgctgatgaccctgcggctgtggtccagc

SEQ ID NO: 5918 - DNA, 2706 bp, synthetic construct
  source 1..2706: mol_type = other DNA
atggccttaccagtgaccgccttgctcctgccgctggccttgctgctccacgccgccaggccggaagtgcagctggttgaatctggcggaggactggttcagcctggcggatctctgagactgtcttgtgccgccagcggcttcagcttcagcgacttttggatgagctgggtccgacaggcccctggcaaaggacttgaatgggtcgccacaatcagccaggccggcagcgagaaggactacgtggactctgtgaagggcagattcaccatcagccgggacaacgccaagaagtccctgtacctccagatgaacagcctgagagccgaggacaccgccgtgtactattgtgcctctggcgtgtacagcttcgactacagaggccagggcaccctggtcacagtctcttctggtaccggcggaggcggatctggcggcggaggtagcggtggcggaggatctgaattcgacatccagatgacacagagccctagcagcctgtctgccagcgtgggagacagagtgaccatcacctgtagagccagccagagcgtgtccaccagcagctacaactacatgcactggtatcagcagaagcccggcaagcctcctaagctgctgattaagtacgccagcaacctggaaagcggcgtgcccagcagattttctggcagcggctctggcaccgacttcaccctgacaatatccagcctccagcctgaggacttcgccacctactactgtcagcactcctgggagatccctctgacattcggccagggcaccaaggtggaaatcaaactcgagatccagaaccctgatcctgccgtgtaccagctgcgggatagcaagagcagcgacaagagcgtgtgtctgttcaccgacttcgacagccagaccaacgtgtcccagagcaaggactccgacgtgtacatcaccgataagtgcgtgctggacatgcggagcatggacttcaagagcaactccgccgtggcctggtccaacaagtccgatttcgcctgcgccaacgccttcaacaacagcattatccccgaggacacattcttcccaagccccgagagcagctgcgacgtgaagctggtggaaaagagcttcgagacagacaccaacctgaacttccagatcctgtacgagatcctgctgggcaaggccaccctgtacgccgtgctggtgtctgccctggtgctgatggctatggtcaagcggaaggacagccggggacgcgccaagagaagcggatctggcgtgaagcagaccctgaatttcgacctgctgaagctggctggcgacgtggaatccaacccaggccctactagtatggactggatttggcgcatccttttccttgtcggcgctgctaccggcgcgcattccgggccccagctccagctgcaagagtctggacctggcctggtcaagcctagcgagacactgagcctgacctgtaccgtgtccggcgatagcatcagcagcggcgattactactggggctggatcagacagcctcctggcaaaggactggaatggatcggccacatctactacagcggcgtgacctactacaaccccagcctgaagtccagagtgaccatcagcgtggacaccagccggaaccagttctccctgaagctgtctagcgtgacagccgccgataccgccgtgtactactgcaccagagaggacagcagcaactggcggagtagaggccagggaacactggtcacagttagctctggatccggcggaggcggaagtggaggcggaggatctggcggcggaggctctttcgaagaagtgcaactggttcagagcggagccgaagtgaagaaacctggggcctctgtgaaggtgtcctgcaaggccagcggctacagcttcaccgactattatatgcactgggtccgacaggctccaggccagggacttgagtggatcggcagaatcaacccctacaacggcgctgccttctacagccagaacttcaaggatagagtgaccctgaccgtggacaccagcaccagcacagcctacctggaactgagcagcctgagaagcgaggacaccgccgtgtactactgcgccattgagagaggcgctgacctggaaggctacgctatggattattggggccagggaaccctggtcaccgtgtcatctacgcgtgaggacctgaagaacgtgttcccacctgaggtggccgtgttcgagcctagcgaggccgagatcagccacacccagaaagccaccctcgtgtgcctggctaccggcttctaccccgaccatgtggaactgtcttggtgggtcaacggcaaagaggtgcacagcggcgtgtgtaccgacccccagccactgaaagaacagcccgccctgaacgacagccggtactgcctgagcagcagactgagagtgtccgccaccttctggcagaacccccggaaccacttcagatgccaggtgcagttctacggcctgagcgagaacgacgagtggacccaggacagagccaagcccgtgacccagatcgtgtctgccgaagcctggggcagagccgattgcggctttaccagcgagagctaccagcagggcgtgctgagcgccaccaacctgagcgtgatcggcttcagaatcctgctgctgaaagtggccggctttaacctgctgatgaccctgcggctgtggtccagc

SEQ ID NO: 5919 - DNA, 2700 bp, synthetic construct
  source 1..2700: mol_type = other DNA
atggccttaccagtgaccgccttgctcctgccgctggccttgctgctccacgccgccaggccggaagtgcagctggttgaatctggcggaggactggttcagcctggcggatctctgagactgtcttgtgccgccagcggcttcagcttcagcgacttttggatgagctgggtccgacaggcccctggcaaaggacttgaatgggtcgccacaatcagccaggccggcagcgagaaggactacgtggactctgtgaagggcagattcaccatcagccgggacaacgccaagaagtccctgtacctccagatgaacagcctgagagccgaggacaccgccgtgtactattgtgcctctggcgtgtacagcttcgactacagaggccagggcaccctggtcacagtctcttctggtaccggcggaggcggatctggcggcggaggtagcggtggcggaggatctgaattcgagatcgtgctgacacagtctccagccacactgagcgcttctccaggcgagagagtgaccctgacctgtagagccagcagcaacgtgatctccagctacgtgcactggtatcagcagaagcctggcagcagccccagactgtttctgtacagcaccagcaatctggcctccggcgtgccaagcagattttctggctctggcagcggcaccgacttcacctttaccatctctagcctggaagccgaggacgccgccacctactactgtcagcagtacagcggctaccctctgaccttcggccagggcacaagactggaaatcaaactcgagatccagaaccctgatcctgccgtgtaccagctgcgggatagcaagagcagcgacaagagcgtgtgtctgttcaccgacttcgacagccagaccaacgtgtcccagagcaaggactccgacgtgtacatcaccgataagtgcgtgctggacatgcggagcatggacttcaagagcaactccgccgtggcctggtccaacaagtccgatttcgcctgcgccaacgccttcaacaacagcattatccccgaggacacattcttcccaagccccgagagcagctgcgacgtgaagctggtggaaaagagcttcgagacagacaccaacctgaacttccagatcctgtacgagatcctgctgggcaaggccaccctgtacgccgtgctggtgtctgccctggtgctgatggctatggtcaagcggaaggacagccggggacgcgccaagagaagcggatctggcgtgaagcagaccctgaatttcgacctgctgaagctggctggcgacgtggaatccaacccaggccctactagtatggactggatttggcgcatccttttccttgtcggcgctgctaccggcgcgcattccgggccccagctccagctgcaagagtctggacctggcctggtcaagcctagcgagacactgagcctgacctgtaccgtgtccggcgatagcatcagcagcggcgattactactggggctggatcagacagcctcctggcaaaggactggaatggatcggccacatctactacagcggcgtgacctactacaaccccagcctgaagtccagagtgaccatcagcgtggacaccagccggaaccagttctccctgaagctgtctagcgtgacagccgccgataccgccgtgtactactgcaccagagaggacagcagcaactggcggagtagaggccagggaacactggtcacagttagctctggatccggcggaggcggaagtggaggcggaggatctggcggcggaggctctttcgaacaagttcagctgcaagagtctggccctggcctggtcaagcctagcgaaacactgagcctgacctgcgccgtgtctggctactctatcaccagcgcctactattggaactggatcagacagcctcctggcaaaggactggaatggatcggctacatcagctacgacggcagaaacaactacaaccccagcctgaagaaccggatcaccatcaatcccgacaccagcaagaaccagttcagcctccagctgaacagcgtgacccctgaggataccgccgtgtactactgtgccagagaaggcgactacgacgtgggcaactactacgctatggactactggggccagggaaccctggtcacagtctcttctacgcgtgaggacctgaagaacgtgttcccacctgaggtggccgtgttcgagcctagcgaggccgagatcagccacacccagaaagccaccctcgtgtgcctggctaccggcttctaccccgaccatgtggaactgtcttggtgggtcaacggcaaagaggtgcacagcggcgtgtgtaccgacccccagccactgaaagaacagcccgccctgaacgacagccggtactgcctgagcagcagactgagagtgtccgccaccttctggcagaacccccggaaccacttcagatgccaggtgcagttctacggcctgagcgagaacgacgagtggacccaggacagagccaagcccgtgacccagatcgtgtctgccgaagcctggggcagagccgattgcggctttaccagcgagagctaccagcagggcgtgctgagcgccaccaacctgagcgtgatcggcttcagaatcctgctgctgaaagtggccggctttaacctgctgatgaccctgcggctgtggtccagc

SEQ ID NO: 5920 - DNA, 2700 bp, synthetic construct
  source 1..2700: mol_type = other DNA
atggccttaccagtgaccgccttgctcctgccgctggccttgctgctccacgccgccaggccggaagtgcagctggttgaatctggcggaggactggttcagcctggcggatctctgagactgtcttgtgccgccagcggcttcagcttcagcgacttttggatgagctgggtccgacaggcccctggcaaaggacttgaatgggtcgccacaatcagccaggccggcagcgagaaggactacgtggactctgtgaagggcagattcaccatcagccgggacaacgccaagaagtccctgtacctccagatgaacagcctgagagccgaggacaccgccgtgtactattgtgcctctggcgtgtacagcttcgactacagaggccagggcaccctggtcacagtctcttctggtaccggcggaggcggatctggcggcggaggtagcggtggcggaggatctgaattcgagatcgtgctgacacagtctcccgccacactgtcactgtctccaggcgaaagagccacactgagctgtagagccagcagcaacgtgatctccagctacgtgcactggtatcagcagaagcctggacaggcccctcggctgctgatctacagcacaagcaatctggcctctggcatccccgccagattttctggctctggaagcggcaccgacttcaccctgaccataagcagcctggaacctgaggacttcgccgtgtactactgccagcagtatagcggctaccctctgaccttcggccagggcacaagactggaaatcaaactcgagatccagaaccctgatcctgccgtgtaccagctgcgggatagcaagagcagcgacaagagcgtgtgtctgttcaccgacttcgacagccagaccaacgtgtcccagagcaaggactccgacgtgtacatcaccgataagtgcgtgctggacatgcggagcatggacttcaagagcaactccgccgtggcctggtccaacaagtccgatttcgcctgcgccaacgccttcaacaacagcattatccccgaggacacattcttcccaagccccgagagcagctgcgacgtgaagctggtggaaaagagcttcgagacagacaccaacctgaacttccagatcctgtacgagatcctgctgggcaaggccaccctgtacgccgtgctggtgtctgccctggtgctgatggctatggtcaagcggaaggacagccggggacgcgccaagagaagcggatctggcgtgaagcagaccctgaatttcgacctgctgaagctggctggcgacgtggaatccaacccaggccctactagtatggactggatttggcgcatccttttccttgtcggcgctgctaccggcgcgcattccgggccccagctccagctgcaagagtctggacctggcctggtcaagcctagcgagacactgagcctgacctgtaccgtgtccggcgatagcatcagcagcggcgattactactggggctggatcagacagcctcctggcaaaggactggaatggatcggccacatctactacagcggcgtgacctactacaaccccagcctgaagtccagagtgaccatcagcgtggacaccagccggaaccagttctccctgaagctgtctagcgtgacagccgccgataccgccgtgtactactgcaccagagaggacagcagcaactggcggagtagaggccagggaacactggtcacagttagctctggatccggcggaggcggaagtggaggcggaggatctggcggcggaggctctttcgaagaagtgcaactggtggaaagtggcggcggactggtgcaacctggaagaagcctgagactgtcctgtgccgccagcggctactctatcacaagcgcctactactggaactgggtccgacaggctcctggcaaaggactggaatgggtgtcctacatcagctacgacggcagaaacaactacaaccccagcctgaagaaccgcttcaccatcagccgggacaacgccaagaagtccctgtacctccagatgaacagcctgagagccgaggacacagccctgtactattgcgccaaagagggcgactacgacgtcggcaactactacgctatggactactggggccagggaaccaccgtgactgtctcttctacgcgtgaggacctgaagaacgtgttcccacctgaggtggccgtgttcgagcctagcgaggccgagatcagccacacccagaaagccaccctcgtgtgcctggctaccggcttctaccccgaccatgtggaactgtcttggtgggtcaacggcaaagaggtgcacagcggcgtgtgtaccgacccccagccactgaaagaacagcccgccctgaacgacagccggtactgcctgagcagcagactgagagtgtccgccaccttctggcagaacccccggaaccacttcagatgccaggtgcagttctacggcctgagcgagaacgacgagtggacccaggacagagccaagcccgtgacccagatcgtgtctgccgaagcctggggcagagccgattgcggctttaccagcgagagctaccagcagggcgtgctgagcgccaccaacctgagcgtgatcggcttcagaatcctgctgctgaaagtggccggctttaacctgctgatgaccctgcggctgtggtccagc

SEQ ID NO: 5921 - DNA, 2697 bp, synthetic construct
  source 1..2697: mol_type = other DNA
atggccttaccagtgaccgccttgctcctgccgctggccttgctgctccacgccgccaggccggaagtgcagctggttgaatctggcggaggactggttcagcctggcggatctctgagactgtcttgtgccgccagcggcttcagcttcagcgacttttggatgagctgggtccgacaggcccctggcaaaggacttgaatgggtcgccacaatcagccaggccggcagcgagaaggactacgtggactctgtgaagggcagattcaccatcagccgggacaacgccaagaagtccctgtacctccagatgaacagcctgagagccgaggacaccgccgtgtactattgtgcctctggcgtgtacagcttcgactacagaggccagggcaccctggtcacagtctcttctggtaccggcggaggcggatctggcggcggaggtagcggtggcggaggatctgaattcgacgtggtcatgacacagaccccactgagcctgcctgtgtctctgggagatcaggccagcatctcctgtagaagcagccagagcctggtgcacagcaacggcaacacctacctgcggtggtatctccagaagcctggacagagccccaaggtgctgatctacaaggtgtccaacagagtgtccggcgtgcccgatagattttctggcagcggctctggcaccgacttcaccctgaagatcaatagagtggaagccgaggacctgggcgtgtacttctgtagccagagcacccatgtgccttggacctttggcggaggcaccaagctggaaatcaagctcgagatccagaaccctgatcctgccgtgtaccagctgcgggatagcaagagcagcgacaagagcgtgtgtctgttcaccgacttcgacagccagaccaacgtgtcccagagcaaggactccgacgtgtacatcaccgataagtgcgtgctggacatgcggagcatggacttcaagagcaactccgccgtggcctggtccaacaagtccgatttcgcctgcgccaacgccttcaacaacagcattatccccgaggacacattcttcccaagccccgagagcagctgcgacgtgaagctggtggaaaagagcttcgagacagacaccaacctgaacttccagatcctgtacgagatcctgctgggcaaggccaccctgtacgccgtgctggtgtctgccctggtgctgatggctatggtcaagcggaaggacagccggggacgcgccaagagaagcggatctggcgtgaagcagaccctgaatttcgacctgctgaagctggctggcgacgtggaatccaacccaggccctactagtatggactggatttggcgcatccttttccttgtcggcgctgctaccggcgcgcattccgggccccagctccagctgcaagagtctggacctggcctggtcaagcctagcgagacactgagcctgacctgtaccgtgtccggcgatagcatcagcagcggcgattactactggggctggatcagacagcctcctggcaaaggactggaatggatcggccacatctactacagcggcgtgacctactacaaccccagcctgaagtccagagtgaccatcagcgtggacaccagccggaaccagttctccctgaagctgtctagcgtgacagccgccgataccgccgtgtactactgcaccagagaggacagcagcaactggcggagtagaggccagggaacactggtcacagttagctctggatccggcggaggcggaagtggaggcggaggatctggcggcggaggctctttcgaaggcgtgaagctggacgagacaggcggaggacttgttcaacctggcggagccatgaagctgagctgtgtgaccagcggctttaccttcggccactactggatgaactgggtccgacagtcccctgagaaaggactggaatgggtcgcccagttcagaaacaagccctacaactacgaaacctactacagcgacagcgtgaagggcagattcaccatcagccgggacgacagcaagtccagcgtgtacctccagatgaacaacctgcgcgtggaagataccggcatctactactgtaccggggccagctacggcatggaatatctcggccagggcaccagcgtgaccgtgtctacaacgcgtgaggacctgaagaacgtgttcccacctgaggtggccgtgttcgagcctagcgaggccgagatcagccacacccagaaagccaccctcgtgtgcctggctaccggcttctaccccgaccatgtggaactgtcttggtgggtcaacggcaaagaggtgcacagcggcgtgtgtaccgacccccagccactgaaagaacagcccgccctgaacgacagccggtactgcctgagcagcagactgagagtgtccgccaccttctggcagaacccccggaaccacttcagatgccaggtgcagttctacggcctgagcgagaacgacgagtggacccaggacagagccaagcccgtgacccagatcgtgtctgccgaagcctggggcagagccgattgcggctttaccagcgagagctaccagcagggcgtgctgagcgccaccaacctgagcgtgatcggcttcagaatcctgctgctgaaagtggccggctttaacctgctgatgaccctgcggctgtggtccagc

SEQ ID NO: 5922 - DNA, 2715 bp, synthetic construct
  source 1..2715: mol_type = other DNA
atggccttaccagtgaccgccttgctcctgccgctggccttgctgctccacgccgccaggccggaagtgcagctggttgaatctggcggaggactggttcagcctggcggatctctgagactgtcttgtgccgccagcggcttcagcttcagcgacttttggatgagctgggtccgacaggcccctggcaaaggacttgaatgggtcgccacaatcagccaggccggcagcgagaaggactacgtggactctgtgaagggcagattcaccatcagccgggacaacgccaagaagtccctgtacctccagatgaacagcctgagagccgaggacaccgccgtgtactattgtgcctctggcgtgtacagcttcgactacagaggccagggcaccctggtcacagtctcttctggtaccggcggaggcggatctggcggcggaggtagcggtggcggaggatctgaattccaggtgcaactggtggaatctggcggcaatctggttcagcctggcggctctctgagactgtcttgtgccgccagcggcttcaccttcggcagcttttctatgagctgggtccgacaagctcctggcggaggacttgaatgggtggcaggactgtctgccagaagcagcctgacacactacgccgactctgtgaagggcagattcaccatcagccgggacaacgccaagaacagcgtgtacctccagatgaacagcctgagagtggaagataccgccgtgtactactgcgccagaagaagctacgacagcagcggctactggggccacttctacagctacatggatgtgtggggccagggcaccctggttacagtttctctcgagatccagaaccctgatcctgccgtgtaccagctgcgggatagcaagagcagcgacaagagcgtgtgtctgttcaccgacttcgacagccagaccaacgtgtcccagagcaaggactccgacgtgtacatcaccgataagtgcgtgctggacatgcggagcatggacttcaagagcaactccgccgtggcctggtccaacaagtccgatttcgcctgcgccaacgccttcaacaacagcattatccccgaggacacattcttcccaagccccgagagcagctgcgacgtgaagctggtggaaaagagcttcgagacagacaccaacctgaacttccagatcctgtacgagatcctgctgggcaaggccaccctgtacgccgtgctggtgtctgccctggtgctgatggctatggtcaagcggaaggacagccggggacgcgccaagagaagcggatctggcgtgaagcagaccctgaatttcgacctgctgaagctggctggcgacgtggaatccaacccaggccctactagtatggactggatttggcgcatccttttccttgtcggcgctgctaccggcgcgcattccgggccccagctccagctgcaagagtctggacctggcctggtcaagcctagcgagacactgagcctgacctgtaccgtgtccggcgatagcatcagcagcggcgattactactggggctggatcagacagcctcctggcaaaggactggaatggatcggccacatctactacagcggcgtgacctactacaaccccagcctgaagtccagagtgaccatcagcgtggacaccagccggaaccagttctccctgaagctgtctagcgtgacagccgccgataccgccgtgtactactgcaccagagaggacagcagcaactggcggagtagaggccagggaacactggtcacagttagctctggatccggcggaggcggaagtggaggcggaggatctggcggcggaggctctttcgaatctgtgctgacccagcctagctccgtgtctgctgctcctggacagaaagtgaccatctcctgtagcggcagcaccagcaacatcggcaacaactacgtgtcctggtatcagcagcaccccggcaaggcccctaagctgatgatctacgacgtgtccaagaggcccagcggcgtgccagatagattttccggcagcaagagcggcaacagcgccagcctggatattagcggactccagtctgaggacgaggccgactactattgcgccgcctgggatgatagcctgagcgagtttctgtttggcaccggcaccaagctgacagtgcttggaacgcgtgaggacctgaagaacgtgttcccacctgaggtggccgtgttcgagcctagcgaggccgagatcagccacacccagaaagccaccctcgtgtgcctggctaccggcttctaccccgaccatgtggaactgtcttggtgggtcaacggcaaagaggtgcacagcggcgtgtgtaccgacccccagccactgaaagaacagcccgccctgaacgacagccggtactgcctgagcagcagactgagagtgtccgccaccttctggcagaacccccggaaccacttcagatgccaggtgcagttctacggcctgagcgagaacgacgagtggacccaggacagagccaagcccgtgacccagatcgtgtctgccgaagcctggggcagagccgattgcggctttaccagcgagagctaccagcagggcgtgctgagcgccaccaacctgagcgtgatcggcttcagaatcctgctgctgaaagtggccggctttaacctgctgatgaccctgcggctgtggtccagc

SEQ ID NO: 5923 - DNA, 2700 bp, synthetic construct
  source 1..2700: mol_type = other DNA
atggccttaccagtgaccgccttgctcctgccgctggccttgctgctccacgccgccaggccggaagtgcagctggttgaatctggcggaggactggttcagcctggcggatctctgagactgtcttgtgccgccagcggcttcagcttcagcgacttttggatgagctgggtccgacaggcccctggcaaaggacttgaatgggtcgccacaatcagccaggccggcagcgagaaggactacgtggactctgtgaagggcagattcaccatcagccgggacaacgccaagaagtccctgtacctccagatgaacagcctgagagccgaggacaccgccgtgtactattgtgcctctggcgtgtacagcttcgactacagaggccagggcaccctggtcacagtctcttctggtaccggcggaggcggatctggcggcggaggtagcggtggcggaggatctgaattcgacgtggtcatgacacagagcccttctagcctgtctgccagcgtgggcgacagagtgacaatcacctgtcagagcagcctggacatcagccactacctgaactggtatcagcagaagcccggcaaggcccctaagctgctgatctacgacgccagcaatctggaaaccggcgtgcccagcagattttctggcagcggaagcggcacccacttcaccttcacaatatccagcctccagcctgaggacttcgccacctactactgccagcagtacgacaacctgcctctgacctttggcggaggcaccaagctggaaatcaagagactcgagatccagaaccctgatcctgccgtgtaccagctgcgggatagcaagagcagcgacaagagcgtgtgtctgttcaccgacttcgacagccagaccaacgtgtcccagagcaaggactccgacgtgtacatcaccgataagtgcgtgctggacatgcggagcatggacttcaagagcaactccgccgtggcctggtccaacaagtccgatttcgcctgcgccaacgccttcaacaacagcattatccccgaggacacattcttcccaagccccgagagcagctgcgacgtgaagctggtggaaaagagcttcgagacagacaccaacctgaacttccagatcctgtacgagatcctgctgggcaaggccaccctgtacgccgtgctggtgtctgccctggtgctgatggctatggtcaagcggaaggacagccggggacgcgccaagagaagcggatctggcgtgaagcagaccctgaatttcgacctgctgaagctggctggcgacgtggaatccaacccaggccctactagtatggactggatttggcgcatccttttccttgtcggcgctgctaccggcgcgcattccgggccccagctccagctgcaagagtctggacctggcctggtcaagcctagcgagacactgagcctgacctgtaccgtgtccggcgatagcatcagcagcggcgattactactggggctggatcagacagcctcctggcaaaggactggaatggatcggccacatctactacagcggcgtgacctactacaaccccagcctgaagtccagagtgaccatcagcgtggacaccagccggaaccagttctccctgaagctgtctagcgtgacagccgccgataccgccgtgtactactgcaccagagaggacagcagcaactggcggagtagaggccagggaacactggtcacagttagctctggatccggcggaggcggaagtggaggcggaggatctggcggcggaggctctttcgaacaagttcaactggttcaatcaggcggaggcgtggtgcaacctggtggctctctgagagtgtcttgtgctgcctctggcgtgaccctgagcgactatggaatgcactgggtccgacaggcccctggcaaaggacttgagtgggtcgccttcatcagaaacgacggcagcgacaagtattacgccgacagcgtgaagggcagattcaccatcagccgggacaacagcgagaaaaccgtgtctctccagatgtctagcctgagagccgaggacaccgccgtgtactactgtgccaagaatggcgagagcggccctctggactactggtatctggatctgtggggcagaggcaccctggtcacagtctcttctacgcgtgaggacctgaagaacgtgttcccacctgaggtggccgtgttcgagcctagcgaggccgagatcagccacacccagaaagccaccctcgtgtgcctggctaccggcttctaccccgaccatgtggaactgtcttggtgggtcaacggcaaagaggtgcacagcggcgtgtgtaccgacccccagccactgaaagaacagcccgccctgaacgacagccggtactgcctgagcagcagactgagagtgtccgccaccttctggcagaacccccggaaccacttcagatgccaggtgcagttctacggcctgagcgagaacgacgagtggacccaggacagagccaagcccgtgacccagatcgtgtctgccgaagcctggggcagagccgattgcggctttaccagcgagagctaccagcagggcgtgctgagcgccaccaacctgagcgtgatcggcttcagaatcctgctgctgaaagtggccggctttaacctgctgatgaccctgcggctgtggtccagc

SEQ ID NO: 5924 - DNA, 2712 bp, synthetic construct
  source 1..2712: mol_type = other DNA
atggccttaccagtgaccgccttgctcctgccgctggccttgctgctccacgccgccaggccggaagtgcagctggttgaatctggcggaggactggttcagcctggcggatctctgagactgtcttgtgccgccagcggcttcagcttcagcgacttttggatgagctgggtccgacaggcccctggcaaaggacttgaatgggtcgccacaatcagccaggccggcagcgagaaggactacgtggactctgtgaagggcagattcaccatcagccgggacaacgccaagaagtccctgtacctccagatgaacagcctgagagccgaggacaccgccgtgtactattgtgcctctggcgtgtacagcttcgactacagaggccagggcaccctggtcacagtctcttctggtaccggcggaggcggatctggcggcggaggtagcggtggcggaggatctgaattcagctacgagctgacacagcctccatccgtgtctggcacacctggacagagagtggctatctcctgtagcggcagcagcagcaacatcggcaccagaatggtcacctggtatcagcacgtgccaggcacagcccctaagctgctgatcttcaacaacaaccagcggcctagcggcgtgcccgatagattttctgccagcaagagcggcacaagcgccagcctggctatcatcggactccagtctgacgacgaggccgactactactgtgccacctgggacgacaacgtgaagtcctacgtgttcggcaccggcaccaaagtgacagtgcttggaagtagactcgagatccagaaccctgatcctgccgtgtaccagctgcgggatagcaagagcagcgacaagagcgtgtgtctgttcaccgacttcgacagccagaccaacgtgtcccagagcaaggactccgacgtgtacatcaccgataagtgcgtgctggacatgcggagcatggacttcaagagcaactccgccgtggcctggtccaacaagtccgatttcgcctgcgccaacgccttcaacaacagcattatccccgaggacacattcttcccaagccccgagagcagctgcgacgtgaagctggtggaaaagagcttcgagacagacaccaacctgaacttccagatcctgtacgagatcctgctgggcaaggccaccctgtacgccgtgctggtgtctgccctggtgctgatggctatggtcaagcggaaggacagccggggacgcgccaagagaagcggatctggcgtgaagcagaccctgaatttcgacctgctgaagctggctggcgacgtggaatccaacccaggccctactagtatggactggatttggcgcatccttttccttgtcggcgctgctaccggcgcgcattccgggccccagctccagctgcaagagtctggacctggcctggtcaagcctagcgagacactgagcctgacctgtaccgtgtccggcgatagcatcagcagcggcgattactactggggctggatcagacagcctcctggcaaaggactggaatggatcggccacatctactacagcggcgtgacctactacaaccccagcctgaagtccagagtgaccatcagcgtggacaccagccggaaccagttctccctgaagctgtctagcgtgacagccgccgataccgccgtgtactactgcaccagagaggacagcagcaactggcggagtagaggccagggaacactggtcacagttagctctggatccggcggaggcggaagtggaggcggaggatctggcggcggaggctctttcgaacttgaaatggcccaggttcagctccagcagtggggagctggactgctgaagcctagcgagacactgagcctgacctgtgctgtgtacggcggcagcttcagcggctactactggtcctggatcagacagcctcctggcaaaggactggaatggatcggcgagatcaaccacagcggctccaccaactacaaccccagcctgaagtccagagtgaccatcagcgtggacaccagcaagaaccagttctccctgaagctgagcagcgtgacagccgctgataccgccgtgtactattgcgctagagcccctcagtcttggtacgtgggagatgtgtggggccagggcacactggttacagtgtcatctacgcgtgaggacctgaagaacgtgttcccacctgaggtggccgtgttcgagcctagcgaggccgagatcagccacacccagaaagccaccctcgtgtgcctggctaccggcttctaccccgaccatgtggaactgtcttggtgggtcaacggcaaagaggtgcacagcggcgtgtgtaccgacccccagccactgaaagaacagcccgccctgaacgacagccggtactgcctgagcagcagactgagagtgtccgccaccttctggcagaacccccggaaccacttcagatgccaggtgcagttctacggcctgagcgagaacgacgagtggacccaggacagagccaagcccgtgacccagatcgtgtctgccgaagcctggggcagagccgattgcggctttaccagcgagagctaccagcagggcgtgctgagcgccaccaacctgagcgtgatcggcttcagaatcctgctgctgaaagtggccggctttaacctgctgatgaccctgcggctgtggtccagc

SEQ ID NO: 5925 - DNA, 2703 bp, synthetic construct
  source 1..2703: mol_type = other DNA
atggccttaccagtgaccgccttgctcctgccgctggccttgctgctccacgccgccaggccggaagtgcagctggttgaatctggcggaggactggttcagcctggcggatctctgagactgtcttgtgccgccagcggcttcagcttcagcgacttttggatgagctgggtccgacaggcccctggcaaaggacttgaatgggtcgccacaatcagccaggccggcagcgagaaggactacgtggactctgtgaagggcagattcaccatcagccgggacaacgccaagaagtccctgtacctccagatgaacagcctgagagccgaggacaccgccgtgtactattgtgcctctggcgtgtacagcttcgactacagaggccagggcaccctggtcacagtctcttctggtaccggcggaggcggatctggcggcggaggtagcggtggcggaggatctgaattccagtctgtgctgacacagcctcctagcctgtctgtggcccctggaaagacagccagcatcacatgcggcggcaacaacatcggcatgaagtccgtgcactggtatcagcagaggccaggacaggctcctgtgctggtcatctactacgacagcgacagaccctctggcatccccggcagattttccggcagcaactctggcaataccgccacactgaccatctccagagtggaagctggcgacgaggccgactactactgccaagtgtgggataccaccggcgatcaccctggctatgtgtttggcaccggcaccaaagtgacagtgcttctcgagatccagaaccctgatcctgccgtgtaccagctgcgggatagcaagagcagcgacaagagcgtgtgtctgttcaccgacttcgacagccagaccaacgtgtcccagagcaaggactccgacgtgtacatcaccgataagtgcgtgctggacatgcggagcatggacttcaagagcaactccgccgtggcctggtccaacaagtccgatttcgcctgcgccaacgccttcaacaacagcattatccccgaggacacattcttcccaagccccgagagcagctgcgacgtgaagctggtggaaaagagcttcgagacagacaccaacctgaacttccagatcctgtacgagatcctgctgggcaaggccaccctgtacgccgtgctggtgtctgccctggtgctgatggctatggtcaagcggaaggacagccggggacgcgccaagagaagcggatctggcgtgaagcagaccctgaatttcgacctgctgaagctggctggcgacgtggaatccaacccaggccctactagtatggactggatttggcgcatccttttccttgtcggcgctgctaccggcgcgcattccgggccccagctccagctgcaagagtctggacctggcctggtcaagcctagcgagacactgagcctgacctgtaccgtgtccggcgatagcatcagcagcggcgattactactggggctggatcagacagcctcctggcaaaggactggaatggatcggccacatctactacagcggcgtgacctactacaaccccagcctgaagtccagagtgaccatcagcgtggacaccagccggaaccagttctccctgaagctgtctagcgtgacagccgccgataccgccgtgtactactgcaccagagaggacagcagcaactggcggagtagaggccagggaacactggtcacagttagctctggatccggcggaggcggaagtggaggcggaggatctggcggcggaggctctttcgaacaagttcaactggttcagagcggagccgaagtgaagaaacctggcagcagcgtgaaggtgtcctgcaaagcaagcggcggcacctttagcagctacgccatctcttgggtccgacaggcacctggacaaggactggaatggatgggcggcatcatccccatcttcggcacagccaattacgcccagaaattccagggcagagtgaccatcaccgccgacgagtctacaagcaccgcctacatggaactgagcagcctgagaagcgaggacaccgccgtgtactattgtgccagaggcgtgtacggctacagcggctctgccccttatgatgagtggggccagggaaccctggtcaccgtttcttctacgcgtgaggacctgaagaacgtgttcccacctgaggtggccgtgttcgagcctagcgaggccgagatcagccacacccagaaagccaccctcgtgtgcctggctaccggcttctaccccgaccatgtggaactgtcttggtgggtcaacggcaaagaggtgcacagcggcgtgtgtaccgacccccagccactgaaagaacagcccgccctgaacgacagccggtactgcctgagcagcagactgagagtgtccgccaccttctggcagaacccccggaaccacttcagatgccaggtgcagttctacggcctgagcgagaacgacgagtggacccaggacagagccaagcccgtgacccagatcgtgtctgccgaagcctggggcagagccgattgcggctttaccagcgagagctaccagcagggcgtgctgagcgccaccaacctgagcgtgatcggcttcagaatcctgctgctgaaagtggccggctttaacctgctgatgaccctgcggctgtggtccagc

SEQ ID NO: 5926 - DNA, 2697 bp, synthetic construct
  source 1..2697: mol_type = other DNA
atggccttaccagtgaccgccttgctcctgccgctggccttgctgctccacgccgccaggccggaagtgcagctggttgaatctggcggaggactggttcagcctggcggatctctgagactgtcttgtgccgccagcggcttcagcttcagcgacttttggatgagctgggtccgacaggcccctggcaaaggacttgaatgggtcgccacaatcagccaggccggcagcgagaaggactacgtggactctgtgaagggcagattcaccatcagccgggacaacgccaagaagtccctgtacctccagatgaacagcctgagagccgaggacaccgccgtgtactattgtgcctctggcgtgtacagcttcgactacagaggccagggcaccctggtcacagtctcttctggtaccggcggaggcggatctggcggcggaggtagcggtggcggaggatctgaattcgaggtgcaactggttgagtctggcggaggactggtgcagcctggaagaagcctgagactgtcttgtgccgccagcggcttcaccttcgacgattatgccatgcactgggtccgacaggcccctggcaaaggacttgaatgggtgtccggcatctcctggaacagcggctctatcggctacgccgattccgtgaagggcagattcaccatcagccgggacaacgccaagaacagcctgtacctccagatgaactccctgagagccgaggacacagccctgtactactgcgccaaagacaaaggcggaggctactacgacttttggagcggcagcgattattggggccagggcacactggtcacagtgtctagcctcgagatccagaaccctgatcctgccgtgtaccagctgcgggatagcaagagcagcgacaagagcgtgtgtctgttcaccgacttcgacagccagaccaacgtgtcccagagcaaggactccgacgtgtacatcaccgataagtgcgtgctggacatgcggagcatggacttcaagagcaactccgccgtggcctggtccaacaagtccgatttcgcctgcgccaacgccttcaacaacagcattatccccgaggacacattcttcccaagccccgagagcagctgcgacgtgaagctggtggaaaagagcttcgagacagacaccaacctgaacttccagatcctgtacgagatcctgctgggcaaggccaccctgtacgccgtgctggtgtctgccctggtgctgatggctatggtcaagcggaaggacagccggggacgcgccaagagaagcggatctggcgtgaagcagaccctgaatttcgacctgctgaagctggctggcgacgtggaatccaacccaggccctactagtatggactggatttggcgcatccttttccttgtcggcgctgctaccggcgcgcattccgggccccagctccagctgcaagagtctggacctggcctggtcaagcctagcgagacactgagcctgacctgtaccgtgtccggcgatagcatcagcagcggcgattactactggggctggatcagacagcctcctggcaaaggactggaatggatcggccacatctactacagcggcgtgacctactacaaccccagcctgaagtccagagtgaccatcagcgtggacaccagccggaaccagttctccctgaagctgtctagcgtgacagccgccgataccgccgtgtactactgcaccagagaggacagcagcaactggcggagtagaggccagggaacactggtcacagttagctctggatccggcggaggcggaagtggaggcggaggatctggcggcggaggctctttcgaatcttctgagctgacacaggaccctgccgtgtctgttgctctgggccagacagtgcggattacctgtcagggcgatagcctgagaagctactacgcctcctggtatcagcagaagccaggccaggctcctgtgctggtcatctacggcaagaacaacagacccagcggcatccccgatagattcagcggaagcagctctggcaataccgccagcctgacaattactggcgctcaggccgaggacgaggccgactactactgcaacagcagagatagcagcggctgggttttcggcggaggcacaaaactgacagtgctgacgcgtgaggacctgaagaacgtgttcccacctgaggtggccgtgttcgagcctagcgaggccgagatcagccacacccagaaagccaccctcgtgtgcctggctaccggcttctaccccgaccatgtggaactgtcttggtgggtcaacggcaaagaggtgcacagcggcgtgtgtaccgacccccagccactgaaagaacagcccgccctgaacgacagccggtactgcctgagcagcagactgagagtgtccgccaccttctggcagaacccccggaaccacttcagatgccaggtgcagttctacggcctgagcgagaacgacgagtggacccaggacagagccaagcccgtgacccagatcgtgtctgccgaagcctggggcagagccgattgcggctttaccagcgagagctaccagcagggcgtgctgagcgccaccaacctgagcgtgatcggcttcagaatcctgctgctgaaagtggccggctttaacctgctgatgaccctgcggctgtggtccagc

SEQ ID NO: 5927 - DNA, 2724 bp, synthetic construct
  source 1..2724: mol_type = other DNA
atggccttaccagtgaccgccttgctcctgccgctggccttgctgctccacgccgccaggccggaagtgcagctggttgaatctggcggaggactggttcagcctggcggatctctgagactgtcttgtgccgccagcggcttcagcttcagcgacttttggatgagctgggtccgacaggcccctggcaaaggacttgaatgggtcgccacaatcagccaggccggcagcgagaaggactacgtggactctgtgaagggcagattcaccatcagccgggacaacgccaagaagtccctgtacctccagatgaacagcctgagagccgaggacaccgccgtgtactattgtgcctctggcgtgtacagcttcgactacagaggccagggcaccctggtcacagtctcttctggtaccggcggaggcggatctggcggcggaggtagcggtggcggaggatctgaattcgaagtgcagctccagcagtctggacctggcctggttaagcctagccagacactgagcctgacctgtgccatcagcggcgatagcgtgctgagcaacagcgacacctggaactggatcagacagagccctagcagaggactggaatggctgggcagaacctaccacagaagcacttggtacgacgactacgccagctctgtgcggggcagagtgtccatcaatgtggacaccagcaagaaccagtacagcctgcaactgaacgccgtgacacctgaggataccggcgtgtactactgcgccagagacagactccaggacggcaactcttggagcgacgcctttgatgtgtggggccagggcacaatggtcaccgtttctagcctcgagatccagaaccctgatcctgccgtgtaccagctgcgggatagcaagagcagcgacaagagcgtgtgtctgttcaccgacttcgacagccagaccaacgtgtcccagagcaaggactccgacgtgtacatcaccgataagtgcgtgctggacatgcggagcatggacttcaagagcaactccgccgtggcctggtccaacaagtccgatttcgcctgcgccaacgccttcaacaacagcattatccccgaggacacattcttcccaagccccgagagcagctgcgacgtgaagctggtggaaaagagcttcgagacagacaccaacctgaacttccagatcctgtacgagatcctgctgggcaaggccaccctgtacgccgtgctggtgtctgccctggtgctgatggctatggtcaagcggaaggacagccggggacgcgccaagagaagcggatctggcgtgaagcagaccctgaatttcgacctgctgaagctggctggcgacgtggaatccaacccaggccctactagtatggactggatttggcgcatccttttccttgtcggcgctgctaccggcgcgcattccgggccccagctccagctgcaagagtctggacctggcctggtcaagcctagcgagacactgagcctgacctgtaccgtgtccggcgatagcatcagcagcggcgattactactggggctggatcagacagcctcctggcaaaggactggaatggatcggccacatctactacagcggcgtgacctactacaaccccagcctgaagtccagagtgaccatcagcgtggacaccagccggaaccagttctccctgaagctgtctagcgtgacagccgccgataccgccgtgtactactgcaccagagaggacagcagcaactggcggagtagaggccagggaacactggtcacagttagctctggatccggcggaggcggaagtggaggcggaggatctggcggcggaggctctttcgaacaatctgctctgacacagcctgccagcgtgtcaggatctcctggacagagcatcaccatctcttgcaccggcaccagctctgatgtcggcggctacaattacgtgtcctggtatcagcagcaccccggcaaggcccctaagctgatgatctacgacgtgtccaacagacccagcggcgtgtccaatagattctccggcagcaagagcggcaacaccgccagcctgacaatttctggactgcaagccgaggacgaggccgactactactgtagcagctacaccagcagcagcacactggtgtacgtgttcggcacaggcaccaaagtgaccgtgcttacgcgtgaggacctgaagaacgtgttcccacctgaggtggccgtgttcgagcctagcgaggccgagatcagccacacccagaaagccaccctcgtgtgcctggctaccggcttctaccccgaccatgtggaactgtcttggtgggtcaacggcaaagaggtgcacagcggcgtgtgtaccgacccccagccactgaaagaacagcccgccctgaacgacagccggtactgcctgagcagcagactgagagtgtccgccaccttctggcagaacccccggaaccacttcagatgccaggtgcagttctacggcctgagcgagaacgacgagtggacccaggacagagccaagcccgtgacccagatcgtgtctgccgaagcctggggcagagccgattgcggctttaccagcgagagctaccagcagggcgtgctgagcgccaccaacctgagcgtgatcggcttcagaatcctgctgctgaaagtggccggctttaacctgctgatgaccctgcggctgtggtccagc

SEQ ID NO: 5928 - DNA, 2658 bp, synthetic construct
  source 1..2658: mol_type = other DNA
atggccttaccagtgaccgccttgctcctgccgctggccttgctgctccacgccgccaggccggaagtgcagctggttgaatctggcggaggactggttcagcctggcggatctctgagactgtcttgtgccgccagcggcttcagcttcagcgacttttggatgagctgggtccgacaggcccctggcaaaggacttgaatgggtcgccacaatcagccaggccggcagcgagaaggactacgtggactctgtgaagggcagattcaccatcagccgggacaacgccaagaagtccctgtacctccagatgaacagcctgagagccgaggacaccgccgtgtactattgtgcctctggcgtgtacagcttcgactacagaggccagggcaccctggtcacagtctcttctggtaccggcggaggcggatctggcggcggaggtagcggtggcggaggatctgaattccaggtgcaactggttcagtctggggccgaagtgaagaaacctggggcctctgtgaaggtgtcctgcaaggcttccggctacacctttaccagctacgacatcaactgggtccgacaggccacaggccaaggactggaatggatgggctggatgaaccccaacagcggcaataccggctacgcccagaaattccagggcagagtgaccatgaccagaaacaccagcatcagcaccgcctacatggaactgagcagcctgagaagcgaggacaccgccgtgtactattgcgccagaggcgacagcaccaaggtggaaatcaaactcgagatccagaaccctgatcctgccgtgtaccagctgcgggatagcaagagcagcgacaagagcgtgtgtctgttcaccgacttcgacagccagaccaacgtgtcccagagcaaggactccgacgtgtacatcaccgataagtgcgtgctggacatgcggagcatggacttcaagagcaactccgccgtggcctggtccaacaagtccgatttcgcctgcgccaacgccttcaacaacagcattatccccgaggacacattcttcccaagccccgagagcagctgcgacgtgaagctggtggaaaagagcttcgagacagacaccaacctgaacttccagatcctgtacgagatcctgctgggcaaggccaccctgtacgccgtgctggtgtctgccctggtgctgatggctatggtcaagcggaaggacagccggggacgcgccaagagaagcggatctggcgtgaagcagaccctgaatttcgacctgctgaagctggctggcgacgtggaatccaacccaggccctactagtatggactggatttggcgcatccttttccttgtcggcgctgctaccggcgcgcattccgggccccagctccagctgcaagagtctggacctggcctggtcaagcctagcgagacactgagcctgacctgtaccgtgtccggcgatagcatcagcagcggcgattactactggggctggatcagacagcctcctggcaaaggactggaatggatcggccacatctactacagcggcgtgacctactacaaccccagcctgaagtccagagtgaccatcagcgtggacaccagccggaaccagttctccctgaagctgtctagcgtgacagccgccgataccgccgtgtactactgcaccagagaggacagcagcaactggcggagtagaggccagggaacactggtcacagttagctctggatccggcggaggcggaagtggaggcggaggatctggcggcggaggctctttcgaacaatctgtgctgacccagcctagatccgtgtctggctctcctggacagagcgtgaccatctcttgtaccggcaccagctctgatgtcggcggctacaattacgtgtcctggtatcagcagcaccccggcgaagcccctaagctgattatctacgacgccgacaagcggcccagcggcatcagcaatagattcagctctggcaagagcggcaacaccgccagcctgacaatcagcggactccaggtggaagatgaggccgactactactgctgctcctatgccggcggaagcacctgggttttcggaggcggtacaaaagtgaccgtgctgacgcgtgaggacctgaagaacgtgttcccacctgaggtggccgtgttcgagcctagcgaggccgagatcagccacacccagaaagccaccctcgtgtgcctggctaccggcttctaccccgaccatgtggaactgtcttggtgggtcaacggcaaagaggtgcacagcggcgtgtgtaccgacccccagccactgaaagaacagcccgccctgaacgacagccggtactgcctgagcagcagactgagagtgtccgccaccttctggcagaacccccggaaccacttcagatgccaggtgcagttctacggcctgagcgagaacgacgagtggacccaggacagagccaagcccgtgacccagatcgtgtctgccgaagcctggggcagagccgattgcggctttaccagcgagagctaccagcagggcgtgctgagcgccaccaacctgagcgtgatcggcttcagaatcctgctgctgaaagtggccggctttaacctgctgatgaccctgcggctgtggtccagc

SEQ ID NO: 5929 - DNA, 2724 bp, synthetic construct
  source 1..2724: mol_type = other DNA
atggccttaccagtgaccgccttgctcctgccgctggccttgctgctccacgccgccaggccggaagtgcagctggttgaatctggcggaggactggttcagcctggcggatctctgagactgtcttgtgccgccagcggcttcagcttcagcgacttttggatgagctgggtccgacaggcccctggcaaaggacttgaatgggtcgccacaatcagccaggccggcagcgagaaggactacgtggactctgtgaagggcagattcaccatcagccgggacaacgccaagaagtccctgtacctccagatgaacagcctgagagccgaggacaccgccgtgtactattgtgcctctggcgtgtacagcttcgactacagaggccagggcaccctggtcacagtctcttctggtaccggcggaggcggatctggcggcggaggtagcggtggcggaggatctgaattcgaagtgcagctccagcagtctggacctggcctggttaagcctagccagacactgagcctgacctgtgccatcagcggcgatagcgtgtcctctaatagcgccgcctggaactggatcagacagagccctagcagaggactggaatggctgggcagaacctactaccgcagcaagtggtacagcgactacgccgtgtccgtgaagtcccggatcaccatcaatcccgacaccagcaagaaccagttcagcctgcaactgaacagcgtgacccctgaggataccgccgtgtactactgcgccagagatccctacgacttttggagcggctaccccgacgcctttgacatctggggacagggcacaatggtcaccgtttctagcctcgagatccagaaccctgatcctgccgtgtaccagctgcgggatagcaagagcagcgacaagagcgtgtgtctgttcaccgacttcgacagccagaccaacgtgtcccagagcaaggactccgacgtgtacatcaccgataagtgcgtgctggacatgcggagcatggacttcaagagcaactccgccgtggcctggtccaacaagtccgatttcgcctgcgccaacgccttcaacaacagcattatccccgaggacacattcttcccaagccccgagagcagctgcgacgtgaagctggtggaaaagagcttcgagacagacaccaacctgaacttccagatcctgtacgagatcctgctgggcaaggccaccctgtacgccgtgctggtgtctgccctggtgctgatggctatggtcaagcggaaggacagccggggacgcgccaagagaagcggatctggcgtgaagcagaccctgaatttcgacctgctgaagctggctggcgacgtggaatccaacccaggccctactagtatggactggatttggcgcatccttttccttgtcggcgctgctaccggcgcgcattccgggccccagctccagctgcaagagtctggacctggcctggtcaagcctagcgagacactgagcctgacctgtaccgtgtccggcgatagcatcagcagcggcgattactactggggctggatcagacagcctcctggcaaaggactggaatggatcggccacatctactacagcggcgtgacctactacaaccccagcctgaagtccagagtgaccatcagcgtggacaccagccggaaccagttctccctgaagctgtctagcgtgacagccgccgataccgccgtgtactactgcaccagagaggacagcagcaactggcggagtagaggccagggaacactggtcacagttagctctggatccggcggaggcggaagtggaggcggaggatctggcggcggaggctctttcgaacaatctgctctgacacagcctgccagcgtgtcaggatctcctggacagagcatcaccatctcttgcaccggcaccagctctgatgtcggcggctacaattacgtgtcctggtatcagcagcaccccggcaaggcccctaaagtgattatcagcgaagtgaacaacagacccagcggcgtgtcccacagattcagcggctctaagtctggcaacaccgccagcctgacaatctctggactgcaagccgaggacgaggccgactacttctgtagcagctacaccagcggcagaaccctgtacgtgttcggcacaggcagcaaagtgacagtgctgggaacgcgtgaggacctgaagaacgtgttcccacctgaggtggccgtgttcgagcctagcgaggccgagatcagccacacccagaaagccaccctcgtgtgcctggctaccggcttctaccccgaccatgtggaactgtcttggtgggtcaacggcaaagaggtgcacagcggcgtgtgtaccgacccccagccactgaaagaacagcccgccctgaacgacagccggtactgcctgagcagcagactgagagtgtccgccaccttctggcagaacccccggaaccacttcagatgccaggtgcagttctacggcctgagcgagaacgacgagtggacccaggacagagccaagcccgtgacccagatcgtgtctgccgaagcctggggcagagccgattgcggctttaccagcgagagctaccagcagggcgtgctgagcgccaccaacctgagcgtgatcggcttcagaatcctgctgctgaaagtggccggctttaacctgctgatgaccctgcggctgtggtccagc

SEQ ID NO: 5930 - DNA, 2721 bp, synthetic construct
  source 1..2721: mol_type = other DNA
atggccttaccagtgaccgccttgctcctgccgctggccttgctgctccacgccgccaggccggaagtgcagctggttgaatctggcggaggactggttcagcctggcggatctctgagactgtcttgtgccgccagcggcttcagcttcagcgacttttggatgagctgggtccgacaggcccctggcaaaggacttgaatgggtcgccacaatcagccaggccggcagcgagaaggactacgtggactctgtgaagggcagattcaccatcagccgggacaacgccaagaagtccctgtacctccagatgaacagcctgagagccgaggacaccgccgtgtactattgtgcctctggcgtgtacagcttcgactacagaggccagggcaccctggtcacagtctcttctggtaccggcggaggcggatctggcggcggaggtagcggtggcggaggatctgaattccaatctgctctgacacagcctgccagcgcctctggatctcctggacagagcgtgaccatctcctgtaccggcacctcttctgatgtcggcggctacaactacgtgtcctggtatcagcagcaccccggcaaggcccctaagctgatgatctacgacgtgtccaacagacccagcggcgtgtccaatagattctccggcagcaagagcggcaacaccgccagcctgacaatttctggactgcaagccgaggacgaggccgactactactgtagcagctacaccagcagcagcacactgtacgtgttcggcacaggcacccagctcacagttcttctcgagatccagaaccctgatcctgccgtgtaccagctgcgggatagcaagagcagcgacaagagcgtgtgtctgttcaccgacttcgacagccagaccaacgtgtcccagagcaaggactccgacgtgtacatcaccgataagtgcgtgctggacatgcggagcatggacttcaagagcaactccgccgtggcctggtccaacaagtccgatttcgcctgcgccaacgccttcaacaacagcattatccccgaggacacattcttcccaagccccgagagcagctgcgacgtgaagctggtggaaaagagcttcgagacagacaccaacctgaacttccagatcctgtacgagatcctgctgggcaaggccaccctgtacgccgtgctggtgtctgccctggtgctgatggctatggtcaagcggaaggacagccggggacgcgccaagagaagcggatctggcgtgaagcagaccctgaatttcgacctgctgaagctggctggcgacgtggaatccaacccaggccctactagtatggactggatttggcgcatccttttccttgtcggcgctgctaccggcgcgcattccgggccccagctccagctgcaagagtctggacctggcctggtcaagcctagcgagacactgagcctgacctgtaccgtgtccggcgatagcatcagcagcggcgattactactggggctggatcagacagcctcctggcaaaggactggaatggatcggccacatctactacagcggcgtgacctactacaaccccagcctgaagtccagagtgaccatcagcgtggacaccagccggaaccagttctccctgaagctgtctagcgtgacagccgccgataccgccgtgtactactgcaccagagaggacagcagcaactggcggagtagaggccagggaacactggtcacagttagctctggatccggcggaggcggaagtggaggcggaggatctggcggcggaggctctttcgaagaagtgcagctccagcagtctggacctggcctggttaagcctagccagacactgagcctgacctgtgccatcagcggcgattccatgctgagcaacagcgacacctggaactggatcagacagagccccagcagaggcctggaatggctgggcagaacataccacagaagcacttggtacgacgactacgccagctctgtgcggggcagagtgtccatcaatgtggacaccagcaagaaccagtacagcctgcaactgaacgccgtgacacctgaggataccggcgtgtactactgtgccagagtgcggctccaggacggcaattcttggagcgacgcctttgatgtgtggggccagggcacaatggtcaccgtttctagcacgcgtgaggacctgaagaacgtgttcccacctgaggtggccgtgttcgagcctagcgaggccgagatcagccacacccagaaagccaccctcgtgtgcctggctaccggcttctaccccgaccatgtggaactgtcttggtgggtcaacggcaaagaggtgcacagcggcgtgtgtaccgacccccagccactgaaagaacagcccgccctgaacgacagccggtactgcctgagcagcagactgagagtgtccgccaccttctggcagaacccccggaaccacttcagatgccaggtgcagttctacggcctgagcgagaacgacgagtggacccaggacagagccaagcccgtgacccagatcgtgtctgccgaagcctggggcagagccgattgcggctttaccagcgagagctaccagcagggcgtgctgagcgccaccaacctgagcgtgatcggcttcagaatcctgctgctgaaagtggccggctttaacctgctgatgaccctgcggctgtggtccagc

SEQ ID NO: 5931 - DNA, 2721 bp, synthetic construct
  source 1..2721: mol_type = other DNA
atggccttaccagtgaccgccttgctcctgccgctggccttgctgctccacgccgccaggccggaagtgcagctggttgaatctggcggaggactggttcagcctggcggatctctgagactgtcttgtgccgccagcggcttcagcttcagcgacttttggatgagctgggtccgacaggcccctggcaaaggacttgaatgggtcgccacaatcagccaggccggcagcgagaaggactacgtggactctgtgaagggcagattcaccatcagccgggacaacgccaagaagtccctgtacctccagatgaacagcctgagagccgaggacaccgccgtgtactattgtgcctctggcgtgtacagcttcgactacagaggccagggcaccctggtcacagtctcttctggtaccggcggaggcggatctggcggcggaggtagcggtggcggaggatctgaattcgacgtgatgctgacccagacaccactgagcctgcctgtgtctctgggcgatcaggccagcatctcctgtagaagcagccagagcatcctgcacagcaccggcgatacctacctggaatggtatctccagaagcctggacagagccccaagctgctgattaacaaggtgtccaaccggctgagcggcgtgcccgatagattttctggcagcggctctggcaccgacttcaccctgaagatcagcagagtggaagccgaggacctgggcgtgtactactgcttccaaggcagccatgttccttggacctttggcggaggcaccaagctggaaatcaagagagctgacgccgctcctaccgtgtccatctttcctctcgagatccagaaccctgatcctgccgtgtaccagctgcgggatagcaagagcagcgacaagagcgtgtgtctgttcaccgacttcgacagccagaccaacgtgtcccagagcaaggactccgacgtgtacatcaccgataagtgcgtgctggacatgcggagcatggacttcaagagcaactccgccgtggcctggtccaacaagtccgatttcgcctgcgccaacgccttcaacaacagcattatccccgaggacacattcttcccaagccccgagagcagctgcgacgtgaagctggtggaaaagagcttcgagacagacaccaacctgaacttccagatcctgtacgagatcctgctgggcaaggccaccctgtacgccgtgctggtgtctgccctggtgctgatggctatggtcaagcggaaggacagccggggacgcgccaagagaagcggatctggcgtgaagcagaccctgaatttcgacctgctgaagctggctggcgacgtggaatccaacccaggccctactagtatggactggatttggcgcatccttttccttgtcggcgctgctaccggcgcgcattccgggccccagctccagctgcaagagtctggacctggcctggtcaagcctagcgagacactgagcctgacctgtaccgtgtccggcgatagcatcagcagcggcgattactactggggctggatcagacagcctcctggcaaaggactggaatggatcggccacatctactacagcggcgtgacctactacaaccccagcctgaagtccagagtgaccatcagcgtggacaccagccggaaccagttctccctgaagctgtctagcgtgacagccgccgataccgccgtgtactactgcaccagagaggacagcagcaactggcggagtagaggccagggaacactggtcacagttagctctggatccggcggaggcggaagtggaggcggaggatctggcggcggaggctctttcgaacaagtgaagctccagcagagcggccctagccttgtgaaacctggcgcttccgtgaagatgagctgcaaggccagcggctacaccttcaccgatttctacatgaaatgggtcaagcagagccacggcaagtctctggaatggatcggcgacatcaaccccaacatcggagacaccttctacaaccagaagttcaagggcaaagccacactgaccgtggacaagagcagcagcaccgcctacatgcagctcaacagcctgaccagcgaggacagcgccgtgtacttttgttccgtgggctacttcgacgtgtggggagccggaacaaccgtgacagtctcttctacgcgtgaggacctgaagaacgtgttcccacctgaggtggccgtgttcgagcctagcgaggccgagatcagccacacccagaaagccaccctcgtgtgcctggctaccggcttctaccccgaccatgtggaactgtcttggtgggtcaacggcaaagaggtgcacagcggcgtgtgtaccgacccccagccactgaaagaacagcccgccctgaacgacagccggtactgcctgagcagcagactgagagtgtccgccaccttctggcagaacccccggaaccacttcagatgccaggtgcagttctacggcctgagcgagaacgacgagtggacccaggacagagccaagcccgtgacccagatcgtgtctgccgaagcctggggcagagccgattgcggctttaccagcgagagctaccagcagggcgtgctgagcgccaccaacctgagcgtgatcggcttcagaatcctgctgctgaaagtggccggctttaacctgctgatgaccctgcggctgtggtccagc

SEQ ID NO: 5932 - DNA, 2709 bp, synthetic construct
  source 1..2709: mol_type = other DNA
atggccttaccagtgaccgccttgctcctgccgctggccttgctgctccacgccgccaggccggaagtgcagctggttgaatctggcggaggactggttcagcctggcggatctctgagactgtcttgtgccgccagcggcttcagcttcagcgacttttggatgagctgggtccgacaggcccctggcaaaggacttgaatgggtcgccacaatcagccaggccggcagcgagaaggactacgtggactctgtgaagggcagattcaccatcagccgggacaacgccaagaagtccctgtacctccagatgaacagcctgagagccgaggacaccgccgtgtactattgtgcctctggcgtgtacagcttcgactacagaggccagggcaccctggtcacagtctcttctggtaccggcggaggcggatctggcggcggaggtagcggtggcggaggatctgaattcgagatcgtgctgacacagtctcccgccacactgtcactgtctccaggcgaaagagccacactgagctgtagagccagccagagcgtgtccatctacctggcctggtatcagcagaagcctggacaggctccccggctgctgatctacgatgccagcaatagagccacaggcatccccgccagattttctggctctggcagcggcaccgatttcaccctgaccataagcagcctggaacctgaggacttcgccgtgtactactgccagcagagaagcaactggcctcctttcacattcggccctggcaccaaggtggacatcaaactcgagatccagaaccctgatcctgccgtgtaccagctgcgggatagcaagagcagcgacaagagcgtgtgtctgttcaccgacttcgacagccagaccaacgtgtcccagagcaaggactccgacgtgtacatcaccgataagtgcgtgctggacatgcggagcatggacttcaagagcaactccgccgtggcctggtccaacaagtccgatttcgcctgcgccaacgccttcaacaacagcattatccccgaggacacattcttcccaagccccgagagcagctgcgacgtgaagctggtggaaaagagcttcgagacagacaccaacctgaacttccagatcctgtacgagatcctgctgggcaaggccaccctgtacgccgtgctggtgtctgccctggtgctgatggctatggtcaagcggaaggacagccggggacgcgccaagagaagcggatctggcgtgaagcagaccctgaatttcgacctgctgaagctggctggcgacgtggaatccaacccaggccctactagtatggactggatttggcgcatccttttccttgtcggcgctgctaccggcgcgcattccgggccccagctccagctgcaagagtctggacctggcctggtcaagcctagcgagacactgagcctgacctgtaccgtgtccggcgatagcatcagcagcggcgattactactggggctggatcagacagcctcctggcaaaggactggaatggatcggccacatctactacagcggcgtgacctactacaaccccagcctgaagtccagagtgaccatcagcgtggacaccagccggaaccagttctccctgaagctgtctagcgtgacagccgccgataccgccgtgtactactgcaccagagaggacagcagcaactggcggagtagaggccagggaacactggtcacagttagctctggatccggcggaggcggaagtggaggcggaggatctggcggcggaggctctttcgaacaggtgcagcttgttgaaagcggaggcggagttgtgcagcctggcagaagtctgagactgtcttgtgccgccagcggcttcaccttcagcagctatggaatgcactgggtccgacaggcccctggcaaaggacttgaatgggttgccgtgatctgggacgacggcagcaacaagtattacgtggacagcgtgaagggcagattcaccatcagccgggacaacagcaagaacaccctgtacctccagatgaacagcctgagagccgaggacacagccgtgtattattgcgccagagatgactactacggcagcggctccttcaacagctactatggcacagacgtgtggggccagggcacaacagttaccgttagctctacgcgtgaggacctgaagaacgtgttcccacctgaggtggccgtgttcgagcctagcgaggccgagatcagccacacccagaaagccaccctcgtgtgcctggctaccggcttctaccccgaccatgtggaactgtcttggtgggtcaacggcaaagaggtgcacagcggcgtgtgtaccgacccccagccactgaaagaacagcccgccctgaacgacagccggtactgcctgagcagcagactgagagtgtccgccaccttctggcagaacccccggaaccacttcagatgccaggtgcagttctacggcctgagcgagaacgacgagtggacccaggacagagccaagcccgtgacccagatcgtgtctgccgaagcctggggcagagccgattgcggctttaccagcgagagctaccagcagggcgtgctgagcgccaccaacctgagcgtgatcggcttcagaatcctgctgctgaaagtggccggctttaacctgctgatgaccctgcggctgtggtccagc

SEQ ID NO: 5933 - DNA, 2664 bp, synthetic construct
  source 1..2664: mol_type = other DNA
atggccttaccagtgaccgccttgctcctgccgctggccttgctgctccacgccgccaggccggaagtgcagctggttgaatctggcggaggactggttcagcctggcggatctctgagactgtcttgtgccgccagcggcttcagcttcagcgacttttggatgagctgggtccgacaggcccctggcaaaggacttgaatgggtcgccacaatcagccaggccggcagcgagaaggactacgtggactctgtgaagggcagattcaccatcagccgggacaacgccaagaagtccctgtacctccagatgaacagcctgagagccgaggacaccgccgtgtactattgtgcctctggcgtgtacagcttcgactacagaggccagggcaccctggtcacagtctcttctggtaccggcggaggcggatctggcggcggaggtagcggtggcggaggatctgaattcgacatccagatgacacagagccctagcagcctgtctgccagcgtgggagacagagtgaccatcacctgtagagccagccagggcatctcttcttggctggcctggtatcagcagaagcccgagaaggcccctaagagcctgatctatgccgccagctctctccagagcggagtgcctagcagattttctggcagcggctccggcaccgatttcaccctgacaatatccagcctccagcctgaggacttcgccacctactactgccagcagtacaacagctacccctacaccttcggccagggcaccaagctggaaatcaaactcgagatccagaaccctgatcctgccgtgtaccagctgcgggatagcaagagcagcgacaagagcgtgtgtctgttcaccgacttcgacagccagaccaacgtgtcccagagcaaggactccgacgtgtacatcaccgataagtgcgtgctggacatgcggagcatggacttcaagagcaactccgccgtggcctggtccaacaagtccgatttcgcctgcgccaacgccttcaacaacagcattatccccgaggacacattcttcccaagccccgagagcagctgcgacgtgaagctggtggaaaagagcttcgagacagacaccaacctgaacttccagatcctgtacgagatcctgctgggcaaggccaccctgtacgccgtgctggtgtctgccctggtgctgatggctatggtcaagcggaaggacagccggggacgcgccaagagaagcggatctggcgtgaagcagaccctgaatttcgacctgctgaagctggctggcgacgtggaatccaacccaggccctactagtatggactggatttggcgcatccttttccttgtcggcgctgctaccggcgcgcattccgggccccagctccagctgcaagagtctggacctggcctggtcaagcctagcgagacactgagcctgacctgtaccgtgtccggcgatagcatcagcagcggcgattactactggggctggatcagacagcctcctggcaaaggactggaatggatcggccacatctactacagcggcgtgacctactacaaccccagcctgaagtccagagtgaccatcagcgtggacaccagccggaaccagttctccctgaagctgtctagcgtgacagccgccgataccgccgtgtactactgcaccagagaggacagcagcaactggcggagtagaggccagggaacactggtcacagttagctctggatccggcggaggcggaagtggaggcggaggatctggcggcggaggctctttcgaagaagtgcaactggttcaatctggcggcggactggttcatccaggcggttctctgagactgagctgtgccggctctggcttcaccttcagcacctacctgatgtactgggtccgacaggcccctggcaagacactggaatgggtgtccgctattggcagcggaggcgatacctactacgccgactctgtgaagggcagattcaccatcagccgggacaacgccaagaacagcctgtacctccagatgaactccctgagagccgaggacatggccgtgtactactgtgccagaggactcggctattggggccagggaacactggtcacagtgtcctctacgcgtgaggacctgaagaacgtgttcccacctgaggtggccgtgttcgagcctagcgaggccgagatcagccacacccagaaagccaccctcgtgtgcctggctaccggcttctaccccgaccatgtggaactgtcttggtgggtcaacggcaaagaggtgcacagcggcgtgtgtaccgacccccagccactgaaagaacagcccgccctgaacgacagccggtactgcctgagcagcagactgagagtgtccgccaccttctggcagaacccccggaaccacttcagatgccaggtgcagttctacggcctgagcgagaacgacgagtggacccaggacagagccaagcccgtgacccagatcgtgtctgccgaagcctggggcagagccgattgcggctttaccagcgagagctaccagcagggcgtgctgagcgccaccaacctgagcgtgatcggcttcagaatcctgctgctgaaagtggccggctttaacctgctgatgaccctgcggctgtggtccagc

SEQ ID NO: 5934 - DNA, 2721 bp, synthetic construct
  source 1..2721: mol_type = other DNA
atggccttaccagtgaccgccttgctcctgccgctggccttgctgctccacgccgccaggccggaagtgcagctggttgaatctggcggaggactggttcagcctggcggatctctgagactgtcttgtgccgccagcggcttcagcttcagcgacttttggatgagctgggtccgacaggcccctggcaaaggacttgaatgggtcgccacaatcagccaggccggcagcgagaaggactacgtggactctgtgaagggcagattcaccatcagccgggacaacgccaagaagtccctgtacctccagatgaacagcctgagagccgaggacaccgccgtgtactattgtgcctctggcgtgtacagcttcgactacagaggccagggcaccctggtcacagtctcttctggtaccggcggaggcggatctggcggcggaggtagcggtggcggaggatctgaattcctgcctgttctgacacagcctccatccgtgtctgtggcccctggaaagaccgccagaatcacatgcggcggcaacaacatcggcagcaagagcgtgcactggtatcagcagaagcctggacaggctcctgtgctggtggtgtacgacgacagcgatagacctagcggcatccccgagagattcagcggcagcaattccggcaataccgccacactgaccatcagcagagtggaagctggcgacgaggccgactactactgccaagtgtgggacagcagcagcgactacgtggtgtttggcggcggaacaaagctgacagtgcttctcgagatccagaaccctgatcctgccgtgtaccagctgcgggatagcaagagcagcgacaagagcgtgtgtctgttcaccgacttcgacagccagaccaacgtgtcccagagcaaggactccgacgtgtacatcaccgataagtgcgtgctggacatgcggagcatggacttcaagagcaactccgccgtggcctggtccaacaagtccgatttcgcctgcgccaacgccttcaacaacagcattatccccgaggacacattcttcccaagccccgagagcagctgcgacgtgaagctggtggaaaagagcttcgagacagacaccaacctgaacttccagatcctgtacgagatcctgctgggcaaggccaccctgtacgccgtgctggtgtctgccctggtgctgatggctatggtcaagcggaaggacagccggggacgcgccaagagaagcggatctggcgtgaagcagaccctgaatttcgacctgctgaagctggctggcgacgtggaatccaacccaggccctactagtatggactggatttggcgcatccttttccttgtcggcgctgctaccggcgcgcattccgggccccagctccagctgcaagagtctggacctggcctggtcaagcctagcgagacactgagcctgacctgtaccgtgtccggcgatagcatcagcagcggcgattactactggggctggatcagacagcctcctggcaaaggactggaatggatcggccacatctactacagcggcgtgacctactacaaccccagcctgaagtccagagtgaccatcagcgtggacaccagccggaaccagttctccctgaagctgtctagcgtgacagccgccgataccgccgtgtactactgcaccagagaggacagcagcaactggcggagtagaggccagggaacactggtcacagttagctctggatccggcggaggcggaagtggaggcggaggatctggcggcggaggctctttcgaagaagttcaactggtgcagagcggagccgaagtgaagaagccaggcgagagcctgaagattagctgcaaaggcagcggctacagcttcaccagctactggatcggctgggtccgacagatgcctggcaaaggactggaatggatgggcatcatctaccccggcgacagcgacaccagatacagccctagctttcagggccaagtgaccatctccgccgacaagagcatcagcacagcctacctccagtggtcctctctgaaggccagcgataccgccatgtactactgcgccagacaagtctggggatggcaaggcggcatgtaccccaggtctaactggtggtacaacctggactcttggggccagggcacactggtcacagtctcttctacgcgtgaggacctgaagaacgtgttcccacctgaggtggccgtgttcgagcctagcgaggccgagatcagccacacccagaaagccaccctcgtgtgcctggctaccggcttctaccccgaccatgtggaactgtcttggtgggtcaacggcaaagaggtgcacagcggcgtgtgtaccgacccccagccactgaaagaacagcccgccctgaacgacagccggtactgcctgagcagcagactgagagtgtccgccaccttctggcagaacccccggaaccacttcagatgccaggtgcagttctacggcctgagcgagaacgacgagtggacccaggacagagccaagcccgtgacccagatcgtgtctgccgaagcctggggcagagccgattgcggctttaccagcgagagctaccagcagggcgtgctgagcgccaccaacctgagcgtgatcggcttcagaatcctgctgctgaaagtggccggctttaacctgctgatgaccctgcggctgtggtccagc

SEQ ID NO: 5935 - DNA, 2700 bp, synthetic construct
  source 1..2700: mol_type = other DNA
atggccttaccagtgaccgccttgctcctgccgctggccttgctgctccacgccgccaggccggaagtgcagctggttgaatctggcggaggactggttcagcctggcggatctctgagactgtcttgtgccgccagcggcttcagcttcagcgacttttggatgagctgggtccgacaggcccctggcaaaggacttgaatgggtcgccacaatcagccaggccggcagcgagaaggactacgtggactctgtgaagggcagattcaccatcagccgggacaacgccaagaagtccctgtacctccagatgaacagcctgagagccgaggacaccgccgtgtactattgtgcctctggcgtgtacagcttcgactacagaggccagggcaccctggtcacagtctcttctggtaccggcggaggcggatctggcggcggaggtagcggtggcggaggatctgaattcgagctggtcatgacacagagccctgcttctctggccgtgtcactgggacagagagccaccatctcttgcagagccagcgagagcgtggacagctacggcaagagcttcatgcactggtatcagctcaagcccggccagcctcctaagctgctgatctacagagcctccaacctggaaagcggcgtgccagccagattttctggcagcggcagcagaaccgacttcaccctgaccattgatcccgtggaagccgatgatgccgccacctactactgccagcagaacaacgaggacccctggacatttggcggaggcaccaagctggaaatcaaactcgagatccagaaccctgatcctgccgtgtaccagctgcgggatagcaagagcagcgacaagagcgtgtgtctgttcaccgacttcgacagccagaccaacgtgtcccagagcaaggactccgacgtgtacatcaccgataagtgcgtgctggacatgcggagcatggacttcaagagcaactccgccgtggcctggtccaacaagtccgatttcgcctgcgccaacgccttcaacaacagcattatccccgaggacacattcttcccaagccccgagagcagctgcgacgtgaagctggtggaaaagagcttcgagacagacaccaacctgaacttccagatcctgtacgagatcctgctgggcaaggccaccctgtacgccgtgctggtgtctgccctggtgctgatggctatggtcaagcggaaggacagccggggacgcgccaagagaagcggatctggcgtgaagcagaccctgaatttcgacctgctgaagctggctggcgacgtggaatccaacccaggccctactagtatggactggatttggcgcatccttttccttgtcggcgctgctaccggcgcgcattccgggccccagctccagctgcaagagtctggacctggcctggtcaagcctagcgagacactgagcctgacctgtaccgtgtccggcgatagcatcagcagcggcgattactactggggctggatcagacagcctcctggcaaaggactggaatggatcggccacatctactacagcggcgtgacctactacaaccccagcctgaagtccagagtgaccatcagcgtggacaccagccggaaccagttctccctgaagctgtctagcgtgacagccgccgataccgccgtgtactactgcaccagagaggacagcagcaactggcggagtagaggccagggaacactggtcacagttagctctggatccggcggaggcggaagtggaggcggaggatctggcggcggaggctctttcgaagaagtgcagctcgaacagtctggccccgagcttgtgaaacctggcgcttccgtgaagatgagctgcaaggccagcggctacaccttcaccaactactacatgaaatgggtcaagcagagccacggcaagtccctggaatggatcggcgatctgaaccccaacaacggcgacaccttctacaaccagaagttcaagggcaaagccacactgaccgtggacaagagcagcaacaccgcctacatgcagctcaactccctgaccagcgaggacagcgccgtgtactactgtgccagaaccggcagatacgaagagaacgctatggactactggggccagggcacaagcgtgacagtctcttctacgcgtgaggacctgaagaacgtgttcccacctgaggtggccgtgttcgagcctagcgaggccgagatcagccacacccagaaagccaccctcgtgtgcctggctaccggcttctaccccgaccatgtggaactgtcttggtgggtcaacggcaaagaggtgcacagcggcgtgtgtaccgacccccagccactgaaagaacagcccgccctgaacgacagccggtactgcctgagcagcagactgagagtgtccgccaccttctggcagaacccccggaaccacttcagatgccaggtgcagttctacggcctgagcgagaacgacgagtggacccaggacagagccaagcccgtgacccagatcgtgtctgccgaagcctggggcagagccgattgcggctttaccagcgagagctaccagcagggcgtgctgagcgccaccaacctgagcgtgatcggcttcagaatcctgctgctgaaagtggccggctttaacctgctgatgaccctgcggctgtggtccagc

SEQ ID NO: 5936 - DNA, 2682 bp, synthetic construct
  source 1..2682: mol_type = other DNA
atggccttaccagtgaccgccttgctcctgccgctggccttgctgctccacgccgccaggccggaagtgcagctggttgaatctggcggaggactggttcagcctggcggatctctgagactgtcttgtgccgccagcggcttcagcttcagcgacttttggatgagctgggtccgacaggcccctggcaaaggacttgaatgggtcgccacaatcagccaggccggcagcgagaaggactacgtggactctgtgaagggcagattcaccatcagccgggacaacgccaagaagtccctgtacctccagatgaacagcctgagagccgaggacaccgccgtgtactattgtgcctctggcgtgtacagcttcgactacagaggccagggcaccctggtcacagtctcttctggtaccggcggaggcggatctggcggcggaggtagcggtggcggaggatctgaattcgacgtggtcatgacacagagcccttctagcctgtctgccagcgtgggcgacagagtgaccatcacctgtatggcctccgaggacatctacatccggctggcctggtatcagcagaagcctggaaacgcccctaagctgctgatctacgccgccacctctctggaaacaggcgtgccaagcagattttccggcagcggctctggcaccgatttcaccctgacaatatccagcctccagcctgaggacttcgccacctactactgccagcagtattggagcagcccctggacatttggcggaggcaccaaggtggaaatcaaactcgagatccagaaccctgatcctgccgtgtaccagctgcgggatagcaagagcagcgacaagagcgtgtgtctgttcaccgacttcgacagccagaccaacgtgtcccagagcaaggactccgacgtgtacatcaccgataagtgcgtgctggacatgcggagcatggacttcaagagcaactccgccgtggcctggtccaacaagtccgatttcgcctgcgccaacgccttcaacaacagcattatccccgaggacacattcttcccaagccccgagagcagctgcgacgtgaagctggtggaaaagagcttcgagacagacaccaacctgaacttccagatcctgtacgagatcctgctgggcaaggccaccctgtacgccgtgctggtgtctgccctggtgctgatggctatggtcaagcggaaggacagccggggacgcgccaagagaagcggatctggcgtgaagcagaccctgaatttcgacctgctgaagctggctggcgacgtggaatccaacccaggccctactagtatggactggatttggcgcatccttttccttgtcggcgctgctaccggcgcgcattccgggccccagctccagctgcaagagtctggacctggcctggtcaagcctagcgagacactgagcctgacctgtaccgtgtccggcgatagcatcagcagcggcgattactactggggctggatcagacagcctcctggcaaaggactggaatggatcggccacatctactacagcggcgtgacctactacaaccccagcctgaagtccagagtgaccatcagcgtggacaccagccggaaccagttctccctgaagctgtctagcgtgacagccgccgataccgccgtgtactactgcaccagagaggacagcagcaactggcggagtagaggccagggaacactggtcacagttagctctggatccggcggaggcggaagtggaggcggaggatctggcggcggaggctctttcgaacaggttcagctgcaagagtctggccccggactggtcaagcctagccaaacactgagcctgacctgtaccgtgtccggctacagcatcaccagcgactacacctggaactggatcagacagcctcctggcaacggactggaatggatcggctacatcacctacagcggcagcaccagctacaaccccagcctgaaaagccgggtgctgatctccgtggacaccagcaagaatcaggtgtccctgaagctgagcagcgtgacagccgctgataccgccgtgtactactgtgccagactggggagaagatacacaatggactactggggccagggcaccaccgtgacagtttcttctacgcgtgaggacctgaagaacgtgttcccacctgaggtggccgtgttcgagcctagcgaggccgagatcagccacacccagaaagccaccctcgtgtgcctggctaccggcttctaccccgaccatgtggaactgtcttggtgggtcaacggcaaagaggtgcacagcggcgtgtgtaccgacccccagccactgaaagaacagcccgccctgaacgacagccggtactgcctgagcagcagactgagagtgtccgccaccttctggcagaacccccggaaccacttcagatgccaggtgcagttctacggcctgagcgagaacgacgagtggacccaggacagagccaagcccgtgacccagatcgtgtctgccgaagcctggggcagagccgattgcggctttaccagcgagagctaccagcagggcgtgctgagcgccaccaacctgagcgtgatcggcttcagaatcctgctgctgaaagtggccggctttaacctgctgatgaccctgcggctgtggtccagc

SEQ ID NO: 5937 - DNA, 2694 bp, synthetic construct
  source 1..2694: mol_type = other DNA
atggccttaccagtgaccgccttgctcctgccgctggccttgctgctccacgccgccaggccggaagtgcagctggttgaatctggcggaggactggttcagcctggcggatctctgagactgtcttgtgccgccagcggcttcagcttcagcgacttttggatgagctgggtccgacaggcccctggcaaaggacttgaatgggtcgccacaatcagccaggccggcagcgagaaggactacgtggactctgtgaagggcagattcaccatcagccgggacaacgccaagaagtccctgtacctccagatgaacagcctgagagccgaggacaccgccgtgtactattgtgcctctggcgtgtacagcttcgactacagaggccagggcaccctggtcacagtctcttctggtaccggcggaggcggatctggcggcggaggtagcggtggcggaggatctgaattcgatattgtgctgactcagagccctgccactctgagccttagtccaggcgacagagctaccatctcctgtagggcctctgaatccgtgaccattctgggctctcatctcatatattggtatcaacaaaagccgggccagcctccacggctgctcattcaactggcctctaacgtgcagaccggcgtgccagctagattttctggctctggctcccggaccgactttacactgacaatcagctccgtggaacccgaagattttgccgtctattattgcctccagtccaggaccattcctcggacattcggccagggaacaaaactcgaaatcaagcggctcgagatccagaaccctgatcctgccgtgtaccagctgcgggatagcaagagcagcgacaagagcgtgtgtctgttcaccgacttcgacagccagaccaacgtgtcccagagcaaggactccgacgtgtacatcaccgataagtgcgtgctggacatgcggagcatggacttcaagagcaactccgccgtggcctggtccaacaagtccgatttcgcctgcgccaacgccttcaacaacagcattatccccgaggacacattcttcccaagccccgagagcagctgcgacgtgaagctggtggaaaagagcttcgagacagacaccaacctgaacttccagatcctgtacgagatcctgctgggcaaggccaccctgtacgccgtgctggtgtctgccctggtgctgatggctatggtcaagcggaaggacagccggggacgcgccaagagaagcggatctggcgtgaagcagaccctgaatttcgacctgctgaagctggctggcgacgtggaatccaacccaggccctactagtatggactggatttggcgcatccttttccttgtcggcgctgctaccggcgcgcattccgggccccagctccagctgcaagagtctggacctggcctggtcaagcctagcgagacactgagcctgacctgtaccgtgtccggcgatagcatcagcagcggcgattactactggggctggatcagacagcctcctggcaaaggactggaatggatcggccacatctactacagcggcgtgacctactacaaccccagcctgaagtccagagtgaccatcagcgtggacaccagccggaaccagttctccctgaagctgtctagcgtgacagccgccgataccgccgtgtactactgcaccagagaggacagcagcaactggcggagtagaggccagggaacactggtcacagttagctctggatccggcggaggcggaagtggaggcggaggatctggcggcggaggctctttcgaacaggtgcagctcgttcagagtggccccgaagtgaaaaagccaggcgagtccgtgaagatttcctgcaaagcctccggctacacattccggcactactctatgaattgggtcaagcaggccccaggccagggccttaagtggatgggacgcatcaataccgagtccggcgtgccaatctacgccgatgacttcaaaggccggttcagcttcaccgtggatacctctgcctccaccgcctacctggaaatcagcagcctgaccagcgaggatacagctgtgtacttctgtagcaacgattacctctacagcctggatttctggggacagggaaccacactgaccgtgtctagcacgcgtgaggacctgaagaacgtgttcccacctgaggtggccgtgttcgagcctagcgaggccgagatcagccacacccagaaagccaccctcgtgtgcctggctaccggcttctaccccgaccatgtggaactgtcttggtgggtcaacggcaaagaggtgcacagcggcgtgtgtaccgacccccagccactgaaagaacagcccgccctgaacgacagccggtactgcctgagcagcagactgagagtgtccgccaccttctggcagaacccccggaaccacttcagatgccaggtgcagttctacggcctgagcgagaacgacgagtggacccaggacagagccaagcccgtgacccagatcgtgtctgccgaagcctggggcagagccgattgcggctttaccagcgagagctaccagcagggcgtgctgagcgccaccaacctgagcgtgatcggcttcagaatcctgctgctgaaagtggccggctttaacctgctgatgaccctgcggctgtggtccagc

SEQ ID NO: 5938 - DNA, 2694 bp, synthetic construct
  source 1..2694: mol_type = other DNA
atggccttaccagtgaccgccttgctcctgccgctggccttgctgctccacgccgccaggccggaagtgcagctggttgaatctggcggaggactggttcagcctggcggatctctgagactgtcttgtgccgccagcggcttcagcttcagcgacttttggatgagctgggtccgacaggcccctggcaaaggacttgaatgggtcgccacaatcagccaggccggcagcgagaaggactacgtggactctgtgaagggcagattcaccatcagccgggacaacgccaagaagtccctgtacctccagatgaacagcctgagagccgaggacaccgccgtgtactattgtgcctctggcgtgtacagcttcgactacagaggccagggcaccctggtcacagtctcttctggtaccggcggaggcggatctggcggcggaggtagcggtggcggaggatctgaattcgacatcgtgctgacacagtctcccgccacactgtcactgagccctggcgatagagccacactgagctgtagagccagcgagagcgtgacaatcctgggcagccacctgatctactggtatcagcagaagcccggacaggcccctagactgctgattcagctcgccagcaatgtgcagacaggcatccctgccagattttccggcagcggcagcagaaccgatttcaccctgaccataagcagcctggaacctgaggacttcgccgtgtactactgcctccagagccggacaatccccagaacctttggacagggcaccaagctggaaatcaagagactcgagatccagaaccctgatcctgccgtgtaccagctgcgggatagcaagagcagcgacaagagcgtgtgtctgttcaccgacttcgacagccagaccaacgtgtcccagagcaaggactccgacgtgtacatcaccgataagtgcgtgctggacatgcggagcatggacttcaagagcaactccgccgtggcctggtccaacaagtccgatttcgcctgcgccaacgccttcaacaacagcattatccccgaggacacattcttcccaagccccgagagcagctgcgacgtgaagctggtggaaaagagcttcgagacagacaccaacctgaacttccagatcctgtacgagatcctgctgggcaaggccaccctgtacgccgtgctggtgtctgccctggtgctgatggctatggtcaagcggaaggacagccggggacgcgccaagagaagcggatctggcgtgaagcagaccctgaatttcgacctgctgaagctggctggcgacgtggaatccaacccaggccctactagtatggactggatttggcgcatccttttccttgtcggcgctgctaccggcgcgcattccgggccccagctccagctgcaagagtctggacctggcctggtcaagcctagcgagacactgagcctgacctgtaccgtgtccggcgatagcatcagcagcggcgattactactggggctggatcagacagcctcctggcaaaggactggaatggatcggccacatctactacagcggcgtgacctactacaaccccagcctgaagtccagagtgaccatcagcgtggacaccagccggaaccagttctccctgaagctgtctagcgtgacagccgccgataccgccgtgtactactgcaccagagaggacagcagcaactggcggagtagaggccagggaacactggtcacagttagctctggatccggcggaggcggaagtggaggcggaggatctggcggcggaggctctttcgaacaggttcagctggtgcagtctggcagcgagctgaagaaacctggcgagagcgtgaagatcagctgcaaggccagcggctacaccttcacacactacagcatgaactgggtccgacaggcccctggacaaggactggaatggatgggcagaatcaacaccgagacaggcgagcccctgtacgccgacgatttcaagggcagattcgtgttcagcctggacaccagcgccagcacagcctatctccagatcagctctctgaaggccgaggacaccgccgtgtactactgctccaacgactacctgtactccctggactattggggccagggcacactggtcacagtgtctagtacgcgtgaggacctgaagaacgtgttcccacctgaggtggccgtgttcgagcctagcgaggccgagatcagccacacccagaaagccaccctcgtgtgcctggctaccggcttctaccccgaccatgtggaactgtcttggtgggtcaacggcaaagaggtgcacagcggcgtgtgtaccgacccccagccactgaaagaacagcccgccctgaacgacagccggtactgcctgagcagcagactgagagtgtccgccaccttctggcagaacccccggaaccacttcagatgccaggtgcagttctacggcctgagcgagaacgacgagtggacccaggacagagccaagcccgtgacccagatcgtgtctgccgaagcctggggcagagccgattgcggctttaccagcgagagctaccagcagggcgtgctgagcgccaccaacctgagcgtgatcggcttcagaatcctgctgctgaaagtggccggctttaacctgctgatgaccctgcggctgtggtccagc

SEQ ID NO: 5939 - DNA, 2697 bp, synthetic construct
  source 1..2697: mol_type = other DNA
atggccttaccagtgaccgccttgctcctgccgctggccttgctgctccacgccgccaggccggaagtgcagctggttgaatctggcggaggactggttcagcctggcggatctctgagactgtcttgtgccgccagcggcttcagcttcagcgacttttggatgagctgggtccgacaggcccctggcaaaggacttgaatgggtcgccacaatcagccaggccggcagcgagaaggactacgtggactctgtgaagggcagattcaccatcagccgggacaacgccaagaagtccctgtacctccagatgaacagcctgagagccgaggacaccgccgtgtactattgtgcctctggcgtgtacagcttcgactacagaggccagggcaccctggtcacagtctcttctggtaccggcggaggcggatctggcggcggaggtagcggtggcggaggatctgaattcgacatccagctgactcagagccctagctttctgagcgccagcgtgggcgacagagtgaccattacatgtagagccagccagggcatcagcaccgacctgaactggtatcagcagaagcctggcaaggcccctaagctgctgatctacgccgccagcaatctggaaagcggcgtgccaagcagattttccggctctggcagcggcaccgagttcaccctgacaatatctagcctccagcctgaggacttcgccacctactactgccagcagagctacaactggccctacacctttggcggaggcaccaaggtggaaatcaagagactcgagatccagaaccctgatcctgccgtgtaccagctgcgggatagcaagagcagcgacaagagcgtgtgtctgttcaccgacttcgacagccagaccaacgtgtcccagagcaaggactccgacgtgtacatcaccgataagtgcgtgctggacatgcggagcatggacttcaagagcaactccgccgtggcctggtccaacaagtccgatttcgcctgcgccaacgccttcaacaacagcattatccccgaggacacattcttcccaagccccgagagcagctgcgacgtgaagctggtggaaaagagcttcgagacagacaccaacctgaacttccagatcctgtacgagatcctgctgggcaaggccaccctgtacgccgtgctggtgtctgccctggtgctgatggctatggtcaagcggaaggacagccggggacgcgccaagagaagcggatctggcgtgaagcagaccctgaatttcgacctgctgaagctggctggcgacgtggaatccaacccaggccctactagtatggactggatttggcgcatccttttccttgtcggcgctgctaccggcgcgcattccgggccccagctccagctgcaagagtctggacctggcctggtcaagcctagcgagacactgagcctgacctgtaccgtgtccggcgatagcatcagcagcggcgattactactggggctggatcagacagcctcctggcaaaggactggaatggatcggccacatctactacagcggcgtgacctactacaaccccagcctgaagtccagagtgaccatcagcgtggacaccagccggaaccagttctccctgaagctgtctagcgtgacagccgccgataccgccgtgtactactgcaccagagaggacagcagcaactggcggagtagaggccagggaacactggtcacagttagctctggatccggcggaggcggaagtggaggcggaggatctggcggcggaggctctttcgaagaagttcagctggttgaatcaggcggaggactcgtgaaacctggcggctctctgagactgtcttgtgccgccagcggcttcaccttcagcaacttcgagatgaactgggtccgacaggccccaggcaaaggactggaatgggtgtccggcatcagctccaatggccggtacatcaactacgccgacagcgtgaagggcagattcaccatcagccgggacaacgccaagaacagcctgtacctccagatgaactccctgagagccgaggacaccgccgtgtactattgtgccagagtggtggacttcgaccaggactacaacggcttcgactattggggccagggcaccctggttaccgttagctctacgcgtgaggacctgaagaacgtgttcccacctgaggtggccgtgttcgagcctagcgaggccgagatcagccacacccagaaagccaccctcgtgtgcctggctaccggcttctaccccgaccatgtggaactgtcttggtgggtcaacggcaaagaggtgcacagcggcgtgtgtaccgacccccagccactgaaagaacagcccgccctgaacgacagccggtactgcctgagcagcagactgagagtgtccgccaccttctggcagaacccccggaaccacttcagatgccaggtgcagttctacggcctgagcgagaacgacgagtggacccaggacagagccaagcccgtgacccagatcgtgtctgccgaagcctggggcagagccgattgcggctttaccagcgagagctaccagcagggcgtgctgagcgccaccaacctgagcgtgatcggcttcagaatcctgctgctgaaagtggccggctttaacctgctgatgaccctgcggctgtggtccagc

SEQ ID NO: 5940 - DNA, 2691 bp, synthetic construct
  source 1..2691: mol_type = other DNA
atggccttaccagtgaccgccttgctcctgccgctggccttgctgctccacgccgccaggccggaagtgcagctggttgaatctggcggaggactggttcagcctggcggatctctgagactgtcttgtgccgccagcggcttcagcttcagcgacttttggatgagctgggtccgacaggcccctggcaaaggacttgaatgggtcgccacaatcagccaggccggcagcgagaaggactacgtggactctgtgaagggcagattcaccatcagccgggacaacgccaagaagtccctgtacctccagatgaacagcctgagagccgaggacaccgccgtgtactattgtgcctctggcgtgtacagcttcgactacagaggccagggcaccctggtcacagtctcttctggtaccggcggaggcggatctggcggcggaggtagcggtggcggaggatctgaattcgacatccaactgactcagagccccagctttctgagcgcctctgtgggcgacagagtgaccatcacatgtagtctcagcctgggcatcagcacatggcgggattggtttccgccgaggcttggcaggggccttgagccgctgacctacgccgccagcacactgcaaagcggagtgcctagcagattttccggcagcggctctggcaccgagttcaccctgacaatatccagcctccagcctgaggacttcgccacctactactgccagcagctcaacagctaccctctgacctttggcggaggcaccaaggtggaaatcaagagactcgagatccagaaccctgatcctgccgtgtaccagctgcgggatagcaagagcagcgacaagagcgtgtgtctgttcaccgacttcgacagccagaccaacgtgtcccagagcaaggactccgacgtgtacatcaccgataagtgcgtgctggacatgcggagcatggacttcaagagcaactccgccgtggcctggtccaacaagtccgatttcgcctgcgccaacgccttcaacaacagcattatccccgaggacacattcttcccaagccccgagagcagctgcgacgtgaagctggtggaaaagagcttcgagacagacaccaacctgaacttccagatcctgtacgagatcctgctgggcaaggccaccctgtacgccgtgctggtgtctgccctggtgctgatggctatggtcaagcggaaggacagccggggacgcgccaagagaagcggatctggcgtgaagcagaccctgaatttcgacctgctgaagctggctggcgacgtggaatccaacccaggccctactagtatggactggatttggcgcatccttttccttgtcggcgctgctaccggcgcgcattccgggccccagctccagctgcaagagtctggacctggcctggtcaagcctagcgagacactgagcctgacctgtaccgtgtccggcgatagcatcagcagcggcgattactactggggctggatcagacagcctcctggcaaaggactggaatggatcggccacatctactacagcggcgtgacctactacaaccccagcctgaagtccagagtgaccatcagcgtggacaccagccggaaccagttctccctgaagctgtctagcgtgacagccgccgataccgccgtgtactactgcaccagagaggacagcagcaactggcggagtagaggccagggaacactggtcacagttagctctggatccggcggaggcggaagtggaggcggaggatctggcggcggaggctctttcgaagaagttcaactggttgagtctggtggcggcctggttaagcctggcggatctctgagactgagctgtgccgccagcggcttcacctttagcacatacggcatgagctgggtccgacaggcccctggaaaaggacttgagtgggtcgcctacatcaacaacggctccggctacatctactacgccgacagcgtgaagggcagattcaccatcagccgggacaacgccaagaacagcctgtacctccagatgaactccctgagagccgaggacaccgccgtgtactattgtgccagaggacagtggtggagcggcggagactttgattattggggccagggcaccctggtcaccgtttcttctacgcgtgaggacctgaagaacgtgttcccacctgaggtggccgtgttcgagcctagcgaggccgagatcagccacacccagaaagccaccctcgtgtgcctggctaccggcttctaccccgaccatgtggaactgtcttggtgggtcaacggcaaagaggtgcacagcggcgtgtgtaccgacccccagccactgaaagaacagcccgccctgaacgacagccggtactgcctgagcagcagactgagagtgtccgccaccttctggcagaacccccggaaccacttcagatgccaggtgcagttctacggcctgagcgagaacgacgagtggacccaggacagagccaagcccgtgacccagatcgtgtctgccgaagcctggggcagagccgattgcggctttaccagcgagagctaccagcagggcgtgctgagcgccaccaacctgagcgtgatcggcttcagaatcctgctgctgaaagtggccggctttaacctgctgatgaccctgcggctgtggtccagc

SEQ ID NO: 5941 - DNA, 2694 bp, synthetic construct
  source 1..2694: mol_type = other DNA
atggccttaccagtgaccgccttgctcctgccgctggccttgctgctccacgccgccaggccggaagtgcagctggttgaatctggcggaggactggttcagcctggcggatctctgagactgtcttgtgccgccagcggcttcagcttcagcgacttttggatgagctgggtccgacaggcccctggcaaaggacttgaatgggtcgccacaatcagccaggccggcagcgagaaggactacgtggactctgtgaagggcagattcaccatcagccgggacaacgccaagaagtccctgtacctccagatgaacagcctgagagccgaggacaccgccgtgtactattgtgcctctggcgtgtacagcttcgactacagaggccagggcaccctggtcacagtctcttctggtaccggcggaggcggatctggcggcggaggtagcggtggcggaggatctgaattcgagatcgtgctgacacagtctcccgccacactgtcactgtctccaggcgaaagagccacactgagctgtagcgccagcagcagcgtgtcctacatgtactggtatcagcagaagcccggacaggcccctagactgctgatctacagaaccagcaacctggcctctggcatccccgccagattttctggctctggcagcggcaccgatttcaccctgaccataagcagcctggaacctgaggacttcgccgtgtactactgccagcagtaccacagctaccccaccacctttggacagggcaccaaggtggaaatcaagcggacagttctcgagatccagaaccctgatcctgccgtgtaccagctgcgggatagcaagagcagcgacaagagcgtgtgtctgttcaccgacttcgacagccagaccaacgtgtcccagagcaaggactccgacgtgtacatcaccgataagtgcgtgctggacatgcggagcatggacttcaagagcaactccgccgtggcctggtccaacaagtccgatttcgcctgcgccaacgccttcaacaacagcattatccccgaggacacattcttcccaagccccgagagcagctgcgacgtgaagctggtggaaaagagcttcgagacagacaccaacctgaacttccagatcctgtacgagatcctgctgggcaaggccaccctgtacgccgtgctggtgtctgccctggtgctgatggctatggtcaagcggaaggacagccggggacgcgccaagagaagcggatctggcgtgaagcagaccctgaatttcgacctgctgaagctggctggcgacgtggaatccaacccaggccctactagtatggactggatttggcgcatccttttccttgtcggcgctgctaccggcgcgcattccgggccccagctccagctgcaagagtctggacctggcctggtcaagcctagcgagacactgagcctgacctgtaccgtgtccggcgatagcatcagcagcggcgattactactggggctggatcagacagcctcctggcaaaggactggaatggatcggccacatctactacagcggcgtgacctactacaaccccagcctgaagtccagagtgaccatcagcgtggacaccagccggaaccagttctccctgaagctgtctagcgtgacagccgccgataccgccgtgtactactgcaccagagaggacagcagcaactggcggagtagaggccagggaacactggtcacagttagctctggatccggcggaggcggaagtggaggcggaggatctggcggcggaggctctttcgaagaagtgcagctggttgaatcaggtggcggcctggttcaacctggcggatctctgagactgtcttgtgccgccagcggcttcagcttcaacacctacgccatgaactgggtccgacaggctcctggcaaaggactggaatgggtgtcccacatcagaagcaagagcaacaacttcgccacctactacgccgacagcgtgaaggacagattcaccatcagccgggacaacgccaagaacagcctgtacctccagatgaactccctgagagccgaggacaccgccgtgtattattgcgccagacaaggcggcgacttccctatggattattggggccagggcaccctggtcaccgtttcttctacgcgtgaggacctgaagaacgtgttcccacctgaggtggccgtgttcgagcctagcgaggccgagatcagccacacccagaaagccaccctcgtgtgcctggctaccggcttctaccccgaccatgtggaactgtcttggtgggtcaacggcaaagaggtgcacagcggcgtgtgtaccgacccccagccactgaaagaacagcccgccctgaacgacagccggtactgcctgagcagcagactgagagtgtccgccaccttctggcagaacccccggaaccacttcagatgccaggtgcagttctacggcctgagcgagaacgacgagtggacccaggacagagccaagcccgtgacccagatcgtgtctgccgaagcctggggcagagccgattgcggctttaccagcgagagctaccagcagggcgtgctgagcgccaccaacctgagcgtgatcggcttcagaatcctgctgctgaaagtggccggctttaacctgctgatgaccctgcggctgtggtccagc

SEQ ID NO: 5942 - DNA, 2682 bp, synthetic construct
  source 1..2682: mol_type = other DNA
atggccttaccagtgaccgccttgctcctgccgctggccttgctgctccacgccgccaggccggaagtgcagctggttgaatctggcggaggactggttcagcctggcggatctctgagactgtcttgtgccgccagcggcttcagcttcagcgacttttggatgagctgggtccgacaggcccctggcaaaggacttgaatgggtcgccacaatcagccaggccggcagcgagaaggactacgtggactctgtgaagggcagattcaccatcagccgggacaacgccaagaagtccctgtacctccagatgaacagcctgagagccgaggacaccgccgtgtactattgtgcctctggcgtgtacagcttcgactacagaggccagggcaccctggtcacagtctcttctggtaccggcggaggcggatctggcggcggaggtagcggtggcggaggatctgaattcgacgtggtcatgacacagagcccttctagcctgtctgccagcgtgggcgacagagtgaccatcacctgtaaagccagcgaggacatctacatccggctggcctggtatcagcagaagcctggaaaggcccctaagctgctgatctacgccgccacctctctggaaacaggcgtgccaagcagattttccggcagcggctctggcaccgatttcaccctgacaatatccagcctccagcctgaggacttcgccacctactactgccagcagtattggaccacaccttggacctttggcggaggcaccaaggtggaaatcaaactcgagatccagaaccctgatcctgccgtgtaccagctgcgggatagcaagagcagcgacaagagcgtgtgtctgttcaccgacttcgacagccagaccaacgtgtcccagagcaaggactccgacgtgtacatcaccgataagtgcgtgctggacatgcggagcatggacttcaagagcaactccgccgtggcctggtccaacaagtccgatttcgcctgcgccaacgccttcaacaacagcattatccccgaggacacattcttcccaagccccgagagcagctgcgacgtgaagctggtggaaaagagcttcgagacagacaccaacctgaacttccagatcctgtacgagatcctgctgggcaaggccaccctgtacgccgtgctggtgtctgccctggtgctgatggctatggtcaagcggaaggacagccggggacgcgccaagagaagcggatctggcgtgaagcagaccctgaatttcgacctgctgaagctggctggcgacgtggaatccaacccaggccctactagtatggactggatttggcgcatccttttccttgtcggcgctgctaccggcgcgcattccgggccccagctccagctgcaagagtctggacctggcctggtcaagcctagcgagacactgagcctgacctgtaccgtgtccggcgatagcatcagcagcggcgattactactggggctggatcagacagcctcctggcaaaggactggaatggatcggccacatctactacagcggcgtgacctactacaaccccagcctgaagtccagagtgaccatcagcgtggacaccagccggaaccagttctccctgaagctgtctagcgtgacagccgccgataccgccgtgtactactgcaccagagaggacagcagcaactggcggagtagaggccagggaacactggtcacagttagctctggatccggcggaggcggaagtggaggcggaggatctggcggcggaggctctttcgaacaggtgcagctccaagagtctggccctggactggtcaagcctagccagacactgagcctgacctgtaccgtgtccggctacagcatcaccatcgactacacctggaactggatcagacagcctcctggcaaaggactggaatggatcggctacatcacctacagcggcagcaccgactacaaccccagcctgaaaagccgggtgctgatctccgtggacaccagcaagaatcaggtgtccctgaagctgagcagcgtgacagccgctgataccgccgtgtactactgtgccagactgggcagaagatacgccctggattattggggccagggcaccaccgtgacagtgtcatctacgcgtgaggacctgaagaacgtgttcccacctgaggtggccgtgttcgagcctagcgaggccgagatcagccacacccagaaagccaccctcgtgtgcctggctaccggcttctaccccgaccatgtggaactgtcttggtgggtcaacggcaaagaggtgcacagcggcgtgtgtaccgacccccagccactgaaagaacagcccgccctgaacgacagccggtactgcctgagcagcagactgagagtgtccgccaccttctggcagaacccccggaaccacttcagatgccaggtgcagttctacggcctgagcgagaacgacgagtggacccaggacagagccaagcccgtgacccagatcgtgtctgccgaagcctggggcagagccgattgcggctttaccagcgagagctaccagcagggcgtgctgagcgccaccaacctgagcgtgatcggcttcagaatcctgctgctgaaagtggccggctttaacctgctgatgaccctgcggctgtggtccagc

SEQ ID NO: 5943 - DNA, 2694 bp, synthetic construct
  source 1..2694: mol_type = other DNA
atggccttaccagtgaccgccttgctcctgccgctggccttgctgctccacgccgccaggccggaagtgcagctggttgaatctggcggaggactggttcagcctggcggatctctgagactgtcttgtgccgccagcggcttcagcttcagcgacttttggatgagctgggtccgacaggcccctggcaaaggacttgaatgggtcgccacaatcagccaggccggcagcgagaaggactacgtggactctgtgaagggcagattcaccatcagccgggacaacgccaagaagtccctgtacctccagatgaacagcctgagagccgaggacaccgccgtgtactattgtgcctctggcgtgtacagcttcgactacagaggccagggcaccctggtcacagtctcttctggtaccggcggaggcggatctggcggcggaggtagcggtggcggaggatctgaattcgacatccagatgacccagaccacaagcagcctgtctgccagcctgggcgacagagtgaccatctcttgtagagccagccaggacatcagcaactacctgaactggtatcagcagaaacccgacggcaccgtgaagctgctgatctactacaccagcatcctgcacagcggcgtgcccagcagattttctggctctggcagcggcaccgactacagcctgaccatcagcaatctggaacaagaggacttcgctacctacttctgccagcaaggcaacaccctgccttggacatttggcggaggcaccaagctggaaatcaaagctctcgagatccagaaccctgatcctgccgtgtaccagctgcgggatagcaagagcagcgacaagagcgtgtgtctgttcaccgacttcgacagccagaccaacgtgtcccagagcaaggactccgacgtgtacatcaccgataagtgcgtgctggacatgcggagcatggacttcaagagcaactccgccgtggcctggtccaacaagtccgatttcgcctgcgccaacgccttcaacaacagcattatccccgaggacacattcttcccaagccccgagagcagctgcgacgtgaagctggtggaaaagagcttcgagacagacaccaacctgaacttccagatcctgtacgagatcctgctgggcaaggccaccctgtacgccgtgctggtgtctgccctggtgctgatggctatggtcaagcggaaggacagccggggacgcgccaagagaagcggatctggcgtgaagcagaccctgaatttcgacctgctgaagctggctggcgacgtggaatccaacccaggccctactagtatggactggatttggcgcatccttttccttgtcggcgctgctaccggcgcgcattccgggccccagctccagctgcaagagtctggacctggcctggtcaagcctagcgagacactgagcctgacctgtaccgtgtccggcgatagcatcagcagcggcgattactactggggctggatcagacagcctcctggcaaaggactggaatggatcggccacatctactacagcggcgtgacctactacaaccccagcctgaagtccagagtgaccatcagcgtggacaccagccggaaccagttctccctgaagctgtctagcgtgacagccgccgataccgccgtgtactactgcaccagagaggacagcagcaactggcggagtagaggccagggaacactggtcacagttagctctggatccggcggaggcggaagtggaggcggaggatctggcggcggaggctctttcgaagtgcaactggttgaatctggcggcggactggttaagcctggcggatctctgaagctgagctgtgccgcctctggcttcgccttcagcatctacgatatgagctgggtccgacagacccctgagaagagactggaatgggtcgcctacatctctagcggcggagggacctactatcccgacacagtgaagggcagattcaccatctccagagacaacgccaagaacaccctgtacctccagatgagcagcctgaagtccgaggacaccgccatgtactactgcgccagacacagcggctatggcacacattggggagtgctgtttgcctactggggccagggaacactggtcacagtttctgctacgcgtgaggacctgaagaacgtgttcccacctgaggtggccgtgttcgagcctagcgaggccgagatcagccacacccagaaagccaccctcgtgtgcctggctaccggcttctaccccgaccatgtggaactgtcttggtgggtcaacggcaaagaggtgcacagcggcgtgtgtaccgacccccagccactgaaagaacagcccgccctgaacgacagccggtactgcctgagcagcagactgagagtgtccgccaccttctggcagaacccccggaaccacttcagatgccaggtgcagttctacggcctgagcgagaacgacgagtggacccaggacagagccaagcccgtgacccagatcgtgtctgccgaagcctggggcagagccgattgcggctttaccagcgagagctaccagcagggcgtgctgagcgccaccaacctgagcgtgatcggcttcagaatcctgctgctgaaagtggccggctttaacctgctgatgaccctgcggctgtggtccagc

SEQ ID NO: 5944 - DNA, 2727 bp, synthetic construct
  source 1..2727: mol_type = other DNA
atggccttaccagtgaccgccttgctcctgccgctggccttgctgctccacgccgccaggccggaagtgcagctggttgaatctggcggaggactggttcagcctggcggatctctgagactgtcttgtgccgccagcggcttcagcttcagcgacttttggatgagctgggtccgacaggcccctggcaaaggacttgaatgggtcgccacaatcagccaggccggcagcgagaaggactacgtggactctgtgaagggcagattcaccatcagccgggacaacgccaagaagtccctgtacctccagatgaacagcctgagagccgaggacaccgccgtgtactattgtgcctctggcgtgtacagcttcgactacagaggccagggcaccctggtcacagtctcttctggtaccggcggaggcggatctggcggcggaggtagcggtggcggaggatctgaattcgacatcgtgatgacacagagccctgatagcctggccgtgtctctgggagagagagccaccatcaactgcaagagcagccagagcctgctgtacagaagcaaccagaagaactacctggcctggtatcagcagaagcccggccagcctcctaagctgctgatctactgggccagcaccagagaaagcggcgtgcccgatagattttctggctctggcagcggcaccgacttcaccctgacaatttctagcctgcaagccgaggacgtggccgtgtactactgccagcagtattacaactaccccagaaccttcggccagggcaccaaggtggaaatcaagagaacagttctcgagatccagaaccctgatcctgccgtgtaccagctgcgggatagcaagagcagcgacaagagcgtgtgtctgttcaccgacttcgacagccagaccaacgtgtcccagagcaaggactccgacgtgtacatcaccgataagtgcgtgctggacatgcggagcatggacttcaagagcaactccgccgtggcctggtccaacaagtccgatttcgcctgcgccaacgccttcaacaacagcattatccccgaggacacattcttcccaagccccgagagcagctgcgacgtgaagctggtggaaaagagcttcgagacagacaccaacctgaacttccagatcctgtacgagatcctgctgggcaaggccaccctgtacgccgtgctggtgtctgccctggtgctgatggctatggtcaagcggaaggacagccggggacgcgccaagagaagcggatctggcgtgaagcagaccctgaatttcgacctgctgaagctggctggcgacgtggaatccaacccaggccctactagtatggactggatttggcgcatccttttccttgtcggcgctgctaccggcgcgcattccgggccccagctccagctgcaagagtctggacctggcctggtcaagcctagcgagacactgagcctgacctgtaccgtgtccggcgatagcatcagcagcggcgattactactggggctggatcagacagcctcctggcaaaggactggaatggatcggccacatctactacagcggcgtgacctactacaaccccagcctgaagtccagagtgaccatcagcgtggacaccagccggaaccagttctccctgaagctgtctagcgtgacagccgccgataccgccgtgtactactgcaccagagaggacagcagcaactggcggagtagaggccagggaacactggtcacagttagctctggatccggcggaggcggaagtggaggcggaggatctggcggcggaggctctttcgaagaagttcagctgcttgaatcaggcggcggactggttcaacctggcggatctctgagactgagctgtgccgccagcggctacagcatcacaagcgactatgcctggaactgggtccgacaggcccctggcaaaggactggaatgggtgtcctacatcagcaacagcggcagcaccagctacaaccccagcctgaagtcccggttcaccatcagcagagacaacagcaagaacaccctgtacctccagatgaacagcctgagagctgaggacaccgccgtgtattattgcgccaaagagcggaactacgactacgacgattactactacgctatggactactggggccagggaaccctggtcacagtctcttctacgcgtgaggacctgaagaacgtgttcccacctgaggtggccgtgttcgagcctagcgaggccgagatcagccacacccagaaagccaccctcgtgtgcctggctaccggcttctaccccgaccatgtggaactgtcttggtgggtcaacggcaaagaggtgcacagcggcgtgtgtaccgacccccagccactgaaagaacagcccgccctgaacgacagccggtactgcctgagcagcagactgagagtgtccgccaccttctggcagaacccccggaaccacttcagatgccaggtgcagttctacggcctgagcgagaacgacgagtggacccaggacagagccaagcccgtgacccagatcgtgtctgccgaagcctggggcagagccgattgcggctttaccagcgagagctaccagcagggcgtgctgagcgccaccaacctgagcgtgatcggcttcagaatcctgctgctgaaagtggccggctttaacctgctgatgaccctgcggctgtggtccagc

SEQ ID NO: 5945 - DNA, 2706 bp, synthetic construct
  source 1..2706: mol_type = other DNA
atggccttaccagtgaccgccttgctcctgccgctggccttgctgctccacgccgccaggccggaagtgcagctggttgaatctggcggaggactggttcagcctggcggatctctgagactgtcttgtgccgccagcggcttcagcttcagcgacttttggatgagctgggtccgacaggcccctggcaaaggacttgaatgggtcgccacaatcagccaggccggcagcgagaaggactacgtggactctgtgaagggcagattcaccatcagccgggacaacgccaagaagtccctgtacctccagatgaacagcctgagagccgaggacaccgccgtgtactattgtgcctctggcgtgtacagcttcgactacagaggccagggcaccctggtcacagtctcttctggtaccggcggaggcggatctggcggcggaggtagcggtggcggaggatctgaattcgacgtggtcatgacacagagccctctgagcctgcctgtgacacttggacagcctgccagcatcagctgtagaagcagccagagcctgctgcacagcagcggcaatacctacctggaatggtatcagcagaggcccggacagagccccagacctctgatctacaagatcagcacccggttcagcggcgtgcccgatagattttctggctctggcagcggcaccgacttcaccctgaagattagcagagtggaagccgaggacgtgggcgtgtactactgcttccaaggcagccacgtgccatacacctttggcggcggaacaaaggtggaaatcaagagactcgagatccagaaccctgatcctgccgtgtaccagctgcgggatagcaagagcagcgacaagagcgtgtgtctgttcaccgacttcgacagccagaccaacgtgtcccagagcaaggactccgacgtgtacatcaccgataagtgcgtgctggacatgcggagcatggacttcaagagcaactccgccgtggcctggtccaacaagtccgatttcgcctgcgccaacgccttcaacaacagcattatccccgaggacacattcttcccaagccccgagagcagctgcgacgtgaagctggtggaaaagagcttcgagacagacaccaacctgaacttccagatcctgtacgagatcctgctgggcaaggccaccctgtacgccgtgctggtgtctgccctggtgctgatggctatggtcaagcggaaggacagccggggacgcgccaagagaagcggatctggcgtgaagcagaccctgaatttcgacctgctgaagctggctggcgacgtggaatccaacccaggccctactagtatggactggatttggcgcatccttttccttgtcggcgctgctaccggcgcgcattccgggccccagctccagctgcaagagtctggacctggcctggtcaagcctagcgagacactgagcctgacctgtaccgtgtccggcgatagcatcagcagcggcgattactactggggctggatcagacagcctcctggcaaaggactggaatggatcggccacatctactacagcggcgtgacctactacaaccccagcctgaagtccagagtgaccatcagcgtggacaccagccggaaccagttctccctgaagctgtctagcgtgacagccgccgataccgccgtgtactactgcaccagagaggacagcagcaactggcggagtagaggccagggaacactggtcacagttagctctggatccggcggaggcggaagtggaggcggaggatctggcggcggaggctctttcgaacaagttcagctggttcagagcggagccgaagtgaagaaacctggggcctctgtgaaggtgtcctgcaaagcctctggcctgaccatcgaggactactacatgcactgggtccgacaggcccctggacaaggacttgaatggatgggctggatcgaccccgagaacggcgatacagagtacggccctaagttccagggcagagtgaccatgaccagagacaccagcatcaacaccgcctacatggaactgagccggctgagatccgatgacaccgccgtgtactattgcgccgtgcacaatgcccactacggcacttggtttgcctattggggccagggcacactggtcaccgttagctctacgcgtgaggacctgaagaacgtgttcccacctgaggtggccgtgttcgagcctagcgaggccgagatcagccacacccagaaagccaccctcgtgtgcctggctaccggcttctaccccgaccatgtggaactgtcttggtgggtcaacggcaaagaggtgcacagcggcgtgtgtaccgacccccagccactgaaagaacagcccgccctgaacgacagccggtactgcctgagcagcagactgagagtgtccgccaccttctggcagaacccccggaaccacttcagatgccaggtgcagttctacggcctgagcgagaacgacgagtggacccaggacagagccaagcccgtgacccagatcgtgtctgccgaagcctggggcagagccgattgcggctttaccagcgagagctaccagcagggcgtgctgagcgccaccaacctgagcgtgatcggcttcagaatcctgctgctgaaagtggccggctttaacctgctgatgaccctgcggctgtggtccagc

SEQ ID NO: 5946 - DNA, 2682 bp, synthetic construct
  source 1..2682: mol_type = other DNA
atggccttaccagtgaccgccttgctcctgccgctggccttgctgctccacgccgccaggccggaagtgcagctggttgaatctggcggaggactggttcagcctggcggatctctgagactgtcttgtgccgccagcggcttcagcttcagcgacttttggatgagctgggtccgacaggcccctggcaaaggacttgaatgggtcgccacaatcagccaggccggcagcgagaaggactacgtggactctgtgaagggcagattcaccatcagccgggacaacgccaagaagtccctgtacctccagatgaacagcctgagagccgaggacaccgccgtgtactattgtgcctctggcgtgtacagcttcgactacagaggccagggcaccctggtcacagtctcttctggtaccggcggaggcggatctggcggcggaggtagcggtggcggaggatctgaattcgacatccagatgacacagagccctagcagcctgtctgccagcgtgggagacagagtgaccatcacctgtagagccagcgagaacatctacagcaacctggcctggtatcagcagaagcctggcaaggcccctaagctgctgatctacgccgccaccaatctggctgatggcgtgccaagcagattttccggctctggcagcggcaccgatttcaccctgacaatatccagcctccagcctgaggacttcgccacctactactgccagcacttttggggcacccctacattcggccagggcaccaaggtggaaatcaagagaacagttctcgagatccagaaccctgatcctgccgtgtaccagctgcgggatagcaagagcagcgacaagagcgtgtgtctgttcaccgacttcgacagccagaccaacgtgtcccagagcaaggactccgacgtgtacatcaccgataagtgcgtgctggacatgcggagcatggacttcaagagcaactccgccgtggcctggtccaacaagtccgatttcgcctgcgccaacgccttcaacaacagcattatccccgaggacacattcttcccaagccccgagagcagctgcgacgtgaagctggtggaaaagagcttcgagacagacaccaacctgaacttccagatcctgtacgagatcctgctgggcaaggccaccctgtacgccgtgctggtgtctgccctggtgctgatggctatggtcaagcggaaggacagccggggacgcgccaagagaagcggatctggcgtgaagcagaccctgaatttcgacctgctgaagctggctggcgacgtggaatccaacccaggccctactagtatggactggatttggcgcatccttttccttgtcggcgctgctaccggcgcgcattccgggccccagctccagctgcaagagtctggacctggcctggtcaagcctagcgagacactgagcctgacctgtaccgtgtccggcgatagcatcagcagcggcgattactactggggctggatcagacagcctcctggcaaaggactggaatggatcggccacatctactacagcggcgtgacctactacaaccccagcctgaagtccagagtgaccatcagcgtggacaccagccggaaccagttctccctgaagctgtctagcgtgacagccgccgataccgccgtgtactactgcaccagagaggacagcagcaactggcggagtagaggccagggaacactggtcacagttagctctggatccggcggaggcggaagtggaggcggaggatctggcggcggaggctctttcgaagaagtgcagctggttgaatcaggtggcggcctggttcaacctggcggatctctgagactgagctgtgccgcctctggcttcagcctgacaaattacggcgtgcactgggtccgacaggcccctggaaaaggactggaatgggtgtccgtgatttggagcggcggcagcaccgattacaacgccgccttcatcagccggttcaccatcagcgccgacaccagcaagaataccgcctacctccagatgaactccctgagagccgaggacaccgccgtgtactattgcgccagagaactgatccacgctatggacaactggggccagggaaccctggtcacagtctcttctacgcgtgaggacctgaagaacgtgttcccacctgaggtggccgtgttcgagcctagcgaggccgagatcagccacacccagaaagccaccctcgtgtgcctggctaccggcttctaccccgaccatgtggaactgtcttggtgggtcaacggcaaagaggtgcacagcggcgtgtgtaccgacccccagccactgaaagaacagcccgccctgaacgacagccggtactgcctgagcagcagactgagagtgtccgccaccttctggcagaacccccggaaccacttcagatgccaggtgcagttctacggcctgagcgagaacgacgagtggacccaggacagagccaagcccgtgacccagatcgtgtctgccgaagcctggggcagagccgattgcggctttaccagcgagagctaccagcagggcgtgctgagcgccaccaacctgagcgtgatcggcttcagaatcctgctgctgaaagtggccggctttaacctgctgatgaccctgcggctgtggtccagc

SEQ ID NO: 5947 - DNA, 2703 bp, synthetic construct
  source 1..2703: mol_type = other DNA
atggccttaccagtgaccgccttgctcctgccgctggccttgctgctccacgccgccaggccggaagtgcagctggttgaatctggcggaggactggttcagcctggcggatctctgagactgtcttgtgccgccagcggcttcagcttcagcgacttttggatgagctgggtccgacaggcccctggcaaaggacttgaatgggtcgccacaatcagccaggccggcagcgagaaggactacgtggactctgtgaagggcagattcaccatcagccgggacaacgccaagaagtccctgtacctccagatgaacagcctgagagccgaggacaccgccgtgtactattgtgcctctggcgtgtacagcttcgactacagaggccagggcaccctggtcacagtctcttctggtaccggcggaggcggatctggcggcggaggtagcggtggcggaggatctgaattcgacttcgtgatgacacagagccctctgagcctgcctgtgacacctggcgaacctgccagcatcagctgtagaagcagccagagcatcgtgcacagcaacggcaacacctacctggaatggtatctccagaagcctggacagagcccacagctgctgatctacaaggtgtccaacagattcagcggcgtgcccgacagattttctggcagcggctctggcaccgacttcaccctgaagattagcagagtggaagccgaggacgtgggcgtgtactactgcttccaaggctctcacgtgcccctgacctttggacagggcaccaagctggaaatcaagagactcgagatccagaaccctgatcctgccgtgtaccagctgcgggatagcaagagcagcgacaagagcgtgtgtctgttcaccgacttcgacagccagaccaacgtgtcccagagcaaggactccgacgtgtacatcaccgataagtgcgtgctggacatgcggagcatggacttcaagagcaactccgccgtggcctggtccaacaagtccgatttcgcctgcgccaacgccttcaacaacagcattatccccgaggacacattcttcccaagccccgagagcagctgcgacgtgaagctggtggaaaagagcttcgagacagacaccaacctgaacttccagatcctgtacgagatcctgctgggcaaggccaccctgtacgccgtgctggtgtctgccctggtgctgatggctatggtcaagcggaaggacagccggggacgcgccaagagaagcggatctggcgtgaagcagaccctgaatttcgacctgctgaagctggctggcgacgtggaatccaacccaggccctactagtatggactggatttggcgcatccttttccttgtcggcgctgctaccggcgcgcattccgggccccagctccagctgcaagagtctggacctggcctggtcaagcctagcgagacactgagcctgacctgtaccgtgtccggcgatagcatcagcagcggcgattactactggggctggatcagacagcctcctggcaaaggactggaatggatcggccacatctactacagcggcgtgacctactacaaccccagcctgaagtccagagtgaccatcagcgtggacaccagccggaaccagttctccctgaagctgtctagcgtgacagccgccgataccgccgtgtactactgcaccagagaggacagcagcaactggcggagtagaggccagggaacactggtcacagttagctctggatccggcggaggcggaagtggaggcggaggatctggcggcggaggctctttcgaagaagtgcagctggttgaaagcggagccgaagtgaagaaacctggggcctctgtgaaggtgtcctgcaaggccagcggctacacctttaccagctactggattcactgggtccgacaggcccctggacaaggacttgagtggatgggcgagaacgacccctccaacggcaggaccaactacaacgagaagttcaagaaccgcgtgaccctgaccgtggacaccagcatctctaccgcctacatggaactgagccggctgagatccgatgacaccgccgtgtactattgcgccagaggacccaactacttttacagcatggactactggggccagggcacaatggtcaccgttagctctacgcgtgaggacctgaagaacgtgttcccacctgaggtggccgtgttcgagcctagcgaggccgagatcagccacacccagaaagccaccctcgtgtgcctggctaccggcttctaccccgaccatgtggaactgtcttggtgggtcaacggcaaagaggtgcacagcggcgtgtgtaccgacccccagccactgaaagaacagcccgccctgaacgacagccggtactgcctgagcagcagactgagagtgtccgccaccttctggcagaacccccggaaccacttcagatgccaggtgcagttctacggcctgagcgagaacgacgagtggacccaggacagagccaagcccgtgacccagatcgtgtctgccgaagcctggggcagagccgattgcggctttaccagcgagagctaccagcagggcgtgctgagcgccaccaacctgagcgtgatcggcttcagaatcctgctgctgaaagtggccggctttaacctgctgatgaccctgcggctgtggtccagc

SEQ ID NO: 5948 - DNA, 2682 bp, synthetic construct
  source 1..2682: mol_type = other DNA
atggccttaccagtgaccgccttgctcctgccgctggccttgctgctccacgccgccaggccggaagtgcagctggttgaatctggcggaggactggttcagcctggcggatctctgagactgtcttgtgccgccagcggcttcagcttcagcgacttttggatgagctgggtccgacaggcccctggcaaaggacttgaatgggtcgccacaatcagccaggccggcagcgagaaggactacgtggactctgtgaagggcagattcaccatcagccgggacaacgccaagaagtccctgtacctccagatgaacagcctgagagccgaggacaccgccgtgtactattgtgcctctggcgtgtacagcttcgactacagaggccagggcaccctggtcacagtctcttctggtaccggcggaggcggatctggcggcggaggtagcggtggcggaggatctgaattcgacatccagctgactcagagccctagctttctgagcgccagcgtgggcgacagagtgaccatcacatgtagcgccagatccagcatcagcttcatgtactggtatcagcagaagcccggcaaggcccctaagctgctgatctacgacaccagcaatctggcctctggcgtgcccagcagattttctggaagcggcagcggcaccgagttcaccctgacaatctctagcctggaagccgaggatgccgccacctactattgccagcagtggtccagctatcccctgacatttggacagggcaccaagctggaaatcaaactcgagatccagaaccctgatcctgccgtgtaccagctgcgggatagcaagagcagcgacaagagcgtgtgtctgttcaccgacttcgacagccagaccaacgtgtcccagagcaaggactccgacgtgtacatcaccgataagtgcgtgctggacatgcggagcatggacttcaagagcaactccgccgtggcctggtccaacaagtccgatttcgcctgcgccaacgccttcaacaacagcattatccccgaggacacattcttcccaagccccgagagcagctgcgacgtgaagctggtggaaaagagcttcgagacagacaccaacctgaacttccagatcctgtacgagatcctgctgggcaaggccaccctgtacgccgtgctggtgtctgccctggtgctgatggctatggtcaagcggaaggacagccggggacgcgccaagagaagcggatctggcgtgaagcagaccctgaatttcgacctgctgaagctggctggcgacgtggaatccaacccaggccctactagtatggactggatttggcgcatccttttccttgtcggcgctgctaccggcgcgcattccgggccccagctccagctgcaagagtctggacctggcctggtcaagcctagcgagacactgagcctgacctgtaccgtgtccggcgatagcatcagcagcggcgattactactggggctggatcagacagcctcctggcaaaggactggaatggatcggccacatctactacagcggcgtgacctactacaaccccagcctgaagtccagagtgaccatcagcgtggacaccagccggaaccagttctccctgaagctgtctagcgtgacagccgccgataccgccgtgtactactgcaccagagaggacagcagcaactggcggagtagaggccagggaacactggtcacagttagctctggatccggcggaggcggaagtggaggcggaggatctggcggcggaggctctttcgaacaggttcagctggttcagtctggggccgaagtgaagaaacctggggcctctgtgaaggtgtcctgcaaggcttccggctacacctttaccggctcttggatgaactgggtccgacaggctcctggacagggactcgaatggatcggcagaatctatcctggcgacggcgagacaaactacaacggcaagttcaaggaccgcgtgacaatcaccgccgacaagagcacaagcaccgcctacatggaactgagcagcctgcggagcgaagataccgccgtgtactactgcgcccggatctacggcaacaacgtgtacttcgatgtgtggggccagggcacaaccgtgacagtctcttctacgcgtgaggacctgaagaacgtgttcccacctgaggtggccgtgttcgagcctagcgaggccgagatcagccacacccagaaagccaccctcgtgtgcctggctaccggcttctaccccgaccatgtggaactgtcttggtgggtcaacggcaaagaggtgcacagcggcgtgtgtaccgacccccagccactgaaagaacagcccgccctgaacgacagccggtactgcctgagcagcagactgagagtgtccgccaccttctggcagaacccccggaaccacttcagatgccaggtgcagttctacggcctgagcgagaacgacgagtggacccaggacagagccaagcccgtgacccagatcgtgtctgccgaagcctggggcagagccgattgcggctttaccagcgagagctaccagcagggcgtgctgagcgccaccaacctgagcgtgatcggcttcagaatcctgctgctgaaagtggccggctttaacctgctgatgaccctgcggctgtggtccagc

SEQ ID NO: 5949 - DNA, 2706 bp, synthetic construct
  source 1..2706: mol_type = other DNA
atggccttaccagtgaccgccttgctcctgccgctggccttgctgctccacgccgccaggccggaagtgcagctggttgaatctggcggaggactggttcagcctggcggatctctgagactgtcttgtgccgccagcggcttcagcttcagcgacttttggatgagctgggtccgacaggcccctggcaaaggacttgaatgggtcgccacaatcagccaggccggcagcgagaaggactacgtggactctgtgaagggcagattcaccatcagccgggacaacgccaagaagtccctgtacctccagatgaacagcctgagagccgaggacaccgccgtgtactattgtgcctctggcgtgtacagcttcgactacagaggccagggcaccctggtcacagtctcttctggtaccggcggaggcggatctggcggcggaggtagcggtggcggaggatctgaattccagctggtgctgacacagtctccaagcgcctctgccagcctgggatctagcgtgaagctgacctgtacactgagcagcggccacaagaccgacaccatcgactggtatcagcagcagcctggcaaggcccctagatacctgatgaagctggaaggcagcggcagctacaacaaaggctctggcgtgcccgatagattcagcggcagttcttctggcgctgattggtatctgaccatcagcagcctccagagcgaggacgaggccgattactactgcggcacagactaccccggcaactacctgtttggcggcggaacacagctgacagtgcttggcctcgagatccagaaccctgatcctgccgtgtaccagctgcgggatagcaagagcagcgacaagagcgtgtgtctgttcaccgacttcgacagccagaccaacgtgtcccagagcaaggactccgacgtgtacatcaccgataagtgcgtgctggacatgcggagcatggacttcaagagcaactccgccgtggcctggtccaacaagtccgatttcgcctgcgccaacgccttcaacaacagcattatccccgaggacacattcttcccaagccccgagagcagctgcgacgtgaagctggtggaaaagagcttcgagacagacaccaacctgaacttccagatcctgtacgagatcctgctgggcaaggccaccctgtacgccgtgctggtgtctgccctggtgctgatggctatggtcaagcggaaggacagccggggacgcgccaagagaagcggatctggcgtgaagcagaccctgaatttcgacctgctgaagctggctggcgacgtggaatccaacccaggccctactagtatggactggatttggcgcatccttttccttgtcggcgctgctaccggcgcgcattccgggccccagctccagctgcaagagtctggacctggcctggtcaagcctagcgagacactgagcctgacctgtaccgtgtccggcgatagcatcagcagcggcgattactactggggctggatcagacagcctcctggcaaaggactggaatggatcggccacatctactacagcggcgtgacctactacaaccccagcctgaagtccagagtgaccatcagcgtggacaccagccggaaccagttctccctgaagctgtctagcgtgacagccgccgataccgccgtgtactactgcaccagagaggacagcagcaactggcggagtagaggccagggaacactggtcacagttagctctggatccggcggaggcggaagtggaggcggaggatctggcggcggaggctctttcgaacaagaacagctggttgaaagcggcggaggactggttcaacctggcggttctctgagactgagctgtgccgccagcggcttcaccttcagcgactactacatgagctggatcagacaggccccaggcaaaggactggaatgggtcgccacaatctaccccagcagcggcaagacctactacgccgattctgccaagggcagactgaccatctccagcgacaacgccaaggacagcctgtacctccagatgaacagcctgagagccgaggacaccgccgtgtactactgcaccagagatagctacgccgacgacgccgctctgtttgacatttggggccagggcaccaccgtgaccgtttcttctacgcgtgaggacctgaagaacgtgttcccacctgaggtggccgtgttcgagcctagcgaggccgagatcagccacacccagaaagccaccctcgtgtgcctggctaccggcttctaccccgaccatgtggaactgtcttggtgggtcaacggcaaagaggtgcacagcggcgtgtgtaccgacccccagccactgaaagaacagcccgccctgaacgacagccggtactgcctgagcagcagactgagagtgtccgccaccttctggcagaacccccggaaccacttcagatgccaggtgcagttctacggcctgagcgagaacgacgagtggacccaggacagagccaagcccgtgacccagatcgtgtctgccgaagcctggggcagagccgattgcggctttaccagcgagagctaccagcagggcgtgctgagcgccaccaacctgagcgtgatcggcttcagaatcctgctgctgaaagtggccggctttaacctgctgatgaccctgcggctgtggtccagc

SEQ ID NO: 5950 - DNA, 2682 bp, synthetic construct; identical to SEQ ID NO: 5946
  source 1..2682: mol_type = other DNA

SEQ ID NO: 5951 - DNA, 2703 bp, synthetic construct; identical to SEQ ID NO: 5947
  source 1..2703: mol_type = other DNA

SEQ ID NO: 5952 - DNA, 2682 bp, synthetic construct; identical to SEQ ID NO: 5948
  source 1..2682: mol_type = other DNA

SEQ ID NO: 5953 - DNA, 2706 bp, synthetic construct; identical to SEQ ID NO: 5949
  source 1..2706: mol_type = other DNA

SEQ ID NO: 5954 - DNA, 2703 bp, synthetic construct
  source 1..2703: mol_type = other DNA
atggccttaccagtgaccgccttgctcctgccgctggccttgctgctccacgccgccaggccggaagtgcagctggttgaatctggcggaggactggttcagcctggcggatctctgagactgtcttgtgccgccagcggcttcagcttcagcgacttttggatgagctgggtccgacaggcccctggcaaaggacttgaatgggtcgccacaatcagccaggccggcagcgagaaggactacgtggactctgtgaagggcagattcaccatcagccgggacaacgccaagaagtccctgtacctccagatgaacagcctgagagccgaggacaccgccgtgtactattgtgcctctggcgtgtacagcttcgactacagaggccagggcaccctggtcacagtctcttctggtaccggcggaggcggatctggcggcggaggtagcggtggcggaggatctgaattcgatatccagctcactcaaagcccctctagtctctctgcctcagtgggggatcgggtcagttttacttgtcaagcttcacaggatatcaacaacttccttaattggtatcagcagaagccaggaaaagcacccaagctgctcatctatgatgcctcaaatttggagacgggtgttcccagtcgattctctgggtcagggtccgggaccgactttacgtttacgatctcctctctgcagcccgaagacatcgccacatactattgtcaacagtacggcaacttgcctttcacatttgggggcgggactaaggttgaaatcaagaggctcgagatccagaaccctgatcctgccgtgtaccagctgcgggatagcaagagcagcgacaagagcgtgtgtctgttcaccgacttcgacagccagaccaacgtgtcccagagcaaggactccgacgtgtacatcaccgataagtgcgtgctggacatgcggagcatggacttcaagagcaactccgccgtggcctggtccaacaagtccgatttcgcctgcgccaacgccttcaacaacagcattatccccgaggacacattcttcccaagccccgagagcagctgcgacgtgaagctggtggaaaagagcttcgagacagacaccaacctgaacttccagatcctgtacgagatcctgctgggcaaggccaccctgtacgccgtgctggtgtctgccctggtgctgatggctatggtcaagcggaaggacagccggggacgcgccaagagaagcggatctggcgtgaagcagaccctgaatttcgacctgctgaagctggctggcgacgtggaatccaacccaggccctactagtatggactggatttggcgcatccttttccttgtcggcgctgctaccggcgcgcattccgggccccagctccagctgcaagagtctggacctggcctggtcaagcctagcgagacactgagcctgacctgtaccgtgtccggcgatagcatcagcagcggcgattactactggggctggatcagacagcctcctggcaaaggactggaatggatcggccacatctactacagcggcgtgacctactacaaccccagcctgaagtccagagtgaccatcagcgtggacaccagccggaaccagttctccctgaagctgtctagcgtgacagccgccgataccgccgtgtactactgcaccagagaggacagcagcaactggcggagtagaggccagggaacactggtcacagttagctctggatccggcggaggcggaagtggaggcggaggatctggcggcggaggctctttcgaacaggtacagctgcaggaatctgggcccggacttgtcaagccaagtcagacactttctcttacatgtaccgtgagcggcggaagtataagcagtggaggcttttactggtcttggatacggcagcacccaggcaaaggcttggagtggattggatacattcatcattcaggatctacacactataatccatcccttaagtcccgggtcaccattagcattgatacgtctaagaatctgttcagtctcaggctgtcctccgtcactgctgccgacacagccgtgtactactgcgcctccttggtttactgcggaggcgactgttatagcggctttgattattgggggcaggggaccctcgtaaccgtgagctctacgcgtgaggacctgaagaacgtgttcccacctgaggtggccgtgttcgagcctagcgaggccgagatcagccacacccagaaagccaccctcgtgtgcctggctaccggcttctaccccgaccatgtggaactgtcttggtgggtcaacggcaaagaggtgcacagcggcgtgtgtaccgacccccagccactgaaagaacagcccgccctgaacgacagccggtactgcctgagcagcagactgagagtgtccgccaccttctggcagaacccccggaaccacttcagatgccaggtgcagttctacggcctgagcgagaacgacgagtggacccaggacagagccaagcccgtgacccagatcgtgtctgccgaagcctggggcagagccgattgcggctttaccagcgagagctaccagcagggcgtgctgagcgccaccaacctgagcgtgatcggcttcagaatcctgctgctgaaagtggccggctttaacctgctgatgaccctgcggctgtggtccagc

SEQ ID NO: 5955 - DNA, 2691 bp, synthetic construct
  source 1..2691: mol_type = other DNA
atggccttaccagtgaccgccttgctcctgccgctggccttgctgctccacgccgccaggccggaagtgcagctggttgaatctggcggaggactggttcagcctggcggatctctgagactgtcttgtgccgccagcggcttcagcttcagcgacttttggatgagctgggtccgacaggcccctggcaaaggacttgaatgggtcgccacaatcagccaggccggcagcgagaaggactacgtggactctgtgaagggcagattcaccatcagccgggacaacgccaagaagtccctgtacctccagatgaacagcctgagagccgaggacaccgccgtgtactattgtgcctctggcgtgtacagcttcgactacagaggccagggcaccctggtcacagtctcttctggtaccggcggaggcggatctggcggcggaggtagcggtggcggaggatctgaattcgacattcagatgacacagagccctagcagcctgagcgcctctgtgggagacagagtgaccatcacatgcaagagcagccagagcgtgctgtactccagcaatcagaagaactacctggcctggttccagcagaagcctggcaaggctcctaagctgctgatctactgggccagcaccagagaaagcggcgtgccaagcagattttctggcagcggctctggcaccgacttcaccctgacaatatccagcctccagcctgaggacttcgccacctacttttgccaccagtacctgagcagctacacattcggacagggcaccaaggtggaaatcaagcggctcgagatccagaaccctgatcctgccgtgtaccagctgcgggatagcaagagcagcgacaagagcgtgtgtctgttcaccgacttcgacagccagaccaacgtgtcccagagcaaggactccgacgtgtacatcaccgataagtgcgtgctggacatgcggagcatggacttcaagagcaactccgccgtggcctggtccaacaagtccgatttcgcctgcgccaacgccttcaacaacagcattatccccgaggacacattcttcccaagccccgagagcagctgcgacgtgaagctggtggaaaagagcttcgagacagacaccaacctgaacttccagatcctgtacgagatcctgctgggcaaggccaccctgtacgccgtgctggtgtctgccctggtgctgatggctatggtcaagcggaaggacagccggggacgcgccaagagaagcggatctggcgtgaagcagaccctgaatttcgacctgctgaagctggctggcgacgtggaatccaacccaggccctactagtatggactggatttggcgcatccttttccttgtcggcgctgctaccggcgcgcattccgggccccagctccagctgcaagagtctggacctggcctggtcaagcctagcgagacactgagcctgacctgtaccgtgtccggcgatagcatcagcagcggcgattactactggggctggatcagacagcctcctggcaaaggactggaatggatcggccacatctactacagcggcgtgacctactacaaccccagcctgaagtccagagtgaccatcagcgtggacaccagccggaaccagttctccctgaagctgtctagcgtgacagccgccgataccgccgtgtactactgcaccagagaggacagcagcaactggcggagtagaggccagggaacactggtcacagttagctctggatccggcggaggcggaagtggaggcggaggatctggcggcggaggctctttcgaagaggtgcagctggttgaatctggcggaggactggttcagcctggcggatctctgagactgtcttgtgccgccagcggctacaccttcaccacctattggatgcactgggtccgacaggcccctggcaaaggacttgagtgggtcggatatatcaggcccagcaccggctacacagagtacaaccagaagttcaaggaccgcttcaccatcagcgccgacaccagcaagaataccgcctacctccagatgaacagcctgagagccgaggacaccgccgtgtactactgtgccagatccagatggctgctggactattggggccagggcacactggttacagtttctacgcgtgaggacctgaagaacgtgttcccacctgaggtggccgtgttcgagcctagcgaggccgagatcagccacacccagaaagccaccctcgtgtgcctggctaccggcttctaccccgaccatgtggaactgtcttggtgggtcaacggcaaagaggtgcacagcggcgtgtgtaccgacccccagccactgaaagaacagcccgccctgaacgacagccggtactgcctgagcagcagactgagagtgtccgccaccttctggcagaacccccggaaccacttcagatgccaggtgcagttctacggcctgagcgagaacgacgagtggacccaggacagagccaagcccgtgacccagatcgtgtctgccgaagcctggggcagagccgattgcggctttaccagcgagagctaccagcagggcgtgctgagcgccaccaacctgagcgtgatcggcttcagaatcctgctgctgaaagtggccggctttaacctgctgatgaccctgcggctgtggtccagc

SEQ ID NO: 5956 - DNA, 2682 bp, synthetic construct
  source 1..2682: mol_type = other DNA
atggccttaccagtgaccgccttgctcctgccgctggccttgctgctccacgccgccaggccggaagtgcagctggttgaatctggcggaggactggttcagcctggcggatctctgagactgtcttgtgccgccagcggcttcagcttcagcgacttttggatgagctgggtccgacaggcccctggcaaaggacttgaatgggtcgccacaatcagccaggccggcagcgagaaggactacgtggactctgtgaagggcagattcaccatcagccgggacaacgccaagaagtccctgtacctccagatgaacagcctgagagccgaggacaccgccgtgtactattgtgcctctggcgtgtacagcttcgactacagaggccagggcaccctggtcacagtctcttctggtaccggcggaggcggatctggcggcggaggtagcggtggcggaggatctgaattcgacatccagatgacacagagccctagcagcctgtctgccagcgtgggagacagagtgaccatcacctgtagagccagccaggacatcagcaactacctgaactggtatcagcagaagcccggcaaggcccctaagctgctgatctactacaccagcagactgcacagcggcgtgcccagcagattttctggctctggcagcggcaccgacttcaccctgacaatatctagcctccagcctgaggacttcgccacctactattgccagcagggcaacaccctgccttacacatttggacagggcaccaaggtggaaatcaagagactcgagatccagaaccctgatcctgccgtgtaccagctgcgggatagcaagagcagcgacaagagcgtgtgtctgttcaccgacttcgacagccagaccaacgtgtcccagagcaaggactccgacgtgtacatcaccgataagtgcgtgctggacatgcggagcatggacttcaagagcaactccgccgtggcctggtccaacaagtccgatttcgcctgcgccaacgccttcaacaacagcattatccccgaggacacattcttcccaagccccgagagcagctgcgacgtgaagctggtggaaaagagcttcgagacagacaccaacctgaacttccagatcctgtacgagatcctgctgggcaaggccaccctgtacgccgtgctggtgtctgccctggtgctgatggctatggtcaagcggaaggacagccggggacgcgccaagagaagcggatctggcgtgaagcagaccctgaatttcgacctgctgaagctggctggcgacgtggaatccaacccaggccctactagtatggactggatttggcgcatccttttccttgtcggcgctgctaccggcgcgcattccgggccccagctccagctgcaagagtctggacctggcctggtcaagcctagcgagacactgagcctgacctgtaccgtgtccggcgatagcatcagcagcggcgattactactggggctggatcagacagcctcctggcaaaggactggaatggatcggccacatctactacagcggcgtgacctactacaaccccagcctgaagtccagagtgaccatcagcgtggacaccagccggaaccagttctccctgaagctgtctagcgtgacagccgccgataccgccgtgtactactgcaccagagaggacagcagcaactggcggagtagaggccagggaacactggtcacagttagctctggatccggcggaggcggaagtggaggcggaggatctggcggcggaggctctttcgaagaagtgcagctggttgaatcaggtggcggcctggttcaacctggcggatctctgagactgagctgtgccgccagcggcttcaccttcagcgactactttatgagctgggtccgacaggcccctggcaaaggacttgaatgggtcgccaccatcagcaatggcggcacctacacttactaccccgacagcgtgaagggcagattcaccatctccagagacaacagcaagaacaccctgtacctccagatgaactccctgagagccgaggacaccgccgtgtactactgcgccagattcgacggctacatcttcgactattggggccagggcaccctggtcacagtctcttctacgcgtgaggacctgaagaacgtgttcccacctgaggtggccgtgttcgagcctagcgaggccgagatcagccacacccagaaagccaccctcgtgtgcctggctaccggcttctaccccgaccatgtggaactgtcttggtgggtcaacggcaaagaggtgcacagcggcgtgtgtaccgacccccagccactgaaagaacagcccgccctgaacgacagccggtactgcctgagcagcagactgagagtgtccgccaccttctggcagaacccccggaaccacttcagatgccaggtgcagttctacggcctgagcgagaacgacgagtggacccaggacagagccaagcccgtgacccagatcgtgtctgccgaagcctggggcagagccgattgcggctttaccagcgagagctaccagcagggcgtgctgagcgccaccaacctgagcgtgatcggcttcagaatcctgctgctgaaagtggccggctttaacctgctgatgaccctgcggctgtggtccagc

SEQ ID NO: 5957 - DNA, 2076 bp, synthetic construct
  source 1..2076: mol_type = other DNA
atggccttaccagtgaccgccttgctcctgccgctggccttgctgctccacgccgccaggccggacatccagatgacacagagccctagcagcctgtctgccagcgtgggagacagagtgaccatcacatgcaaggccagcgaccacatcaacaactggctggcctggtatcagcagaagcctggacaggcccctaagctgctgatctacggcgctaccacactggaaacaggcgtgcccagcagattttctggcagcggctctggcaccgactacaccctgacaatatccagcctccagcctgaggacttcgccacctactactgtcagcagagctggaacaccccttggacattcggccagggcaccaagctggaaatcaagagactcgaggacctgaagaacgtgttcccacctgaggtggccgtgttcgagcctagcgaggccgagatcagccacacccagaaagccaccctcgtgtgcctggctaccggcttctaccccgaccatgtggaactgtcttggtgggtcaacggcaaagaggtgcacagcggcgtgtgtaccgacccccagccactgaaagaacagcccgccctgaacgacagccggtactgcctgagcagcagactgagagtgtccgccaccttctggcagaacccccggaaccacttcagatgccaggtgcagttctacggcctgagcgagaacgacgagtggacccaggacagagccaagcccgtgacccagatcgtgtctgccgaagcctggggcagagccgattgcggctttaccagcgagagctaccagcagggcgtgctgagcgccaccaacctgagcgtgatcggcttcagaatcctgctgctgaaagtggccggctttaacctgctgatgaccctgcggctgtggtccagcagggccaagcgatctggatctggagcaacaaacttctcactactcaaacaagcaggtgacgtggaggagaatcccgggcctactagtatggactggatttggcgcatccttttccttgtcggcgctgctaccggcgcccattccgggcccatggaccccgacctggaaatcagagccgccttcctgcggcagagaaacacagccctgagaacagaggtggccgagctggaacaagaggtgcagcggctggaaaacgaggtgtcccagtacgagacaagatacggccctctcggaggcggaaaaggatccggcggcggaggatctggcggaggcggatctgggggcggaggctctttcgaacaagttcagcttcaacagcctggcgctgagctggtcaaacctggcgcttctgtgaagatgagctgcaaagccagcggctacgccttcagcagctactggatcaactggatgaagcagaaacccggccagggactcgaatggatcggccaaatctatcccggcgacggcgacaccaactacaacggcaagttcaagggcagagccacactgaccgccgatacctctagcagcacagcctacatgcagctgagcagcctgaccagcgaagatagcgccgtgtacttctgtgcccggtccatcacaacagtcgtgggctgcgctatggactattggggccagggaacaagcgtgaccgtgtctagtacgcgtatccagaaccctgatcctgccgtgtaccagctgcgggatagcaagagcagcgacaagagcgtgtgtctgttcaccgacttcgacagccagaccaacgtgtcccagagcaaggactccgacgtgtacatcaccgataagtgcgtgctggacatgcggagcatggacttcaagagcaactccgccgtggcctggtccaacaagtccgatttcgcctgcgccaacgccttcaacaacagcattatccccgaggacacattcttcccaagccccgagagcagctgcgacgtgaagctggtggaaaagagcttcgagacagacaccaacctgaacttccagatcctgtacgagatcctgctgggcaaggccaccctgtacgccgtgctggtgtctgccctggtgctgatggctatggtcaagcggaaggacagccgggga

SEQ ID NO: 5958 - DNA, 2088 bp, synthetic construct
  source 1..2088: mol_type = other DNA
atggccttaccagtgaccgccttgctcctgccgctggccttgctgctccacgccgccaggccggacatccagatgacacagagccctagcagcctgtctgccagcgtgggagacagagtgaccatcacatgcaaggccagcgaccacatcaacaactggctggcctggtatcagcagaagcctggacaggcccctaagctgctgatctacggcgctaccacactggaaacaggcgtgcccagcagattttctggcagcggctctggcaccgactacaccctgacaatatccagcctccagcctgaggacttcgccacctactactgtcagcagagctggaacaccccttggacattcggccagggcaccaagctggaaatcaagagactcgagatccagaaccctgatcctgccgtgtaccagctgcgggatagcaagagcagcgacaagagcgtgtgtctgttcaccgacttcgacagccagaccaacgtgtcccagagcaaggactccgacgtgtacatcaccgataagtgcgtgctggacatgcggagcatggacttcaagagcaactccgccgtggcctggtccaacaagtccgatttcgcctgcgccaacgccttcaacaacagcattatccccgaggacacattcttcccaagccccgagagcagctgcgacgtgaagctggtggaaaagagcttcgagacagacaccaacctgaacttccagatcctgtacgagatcctgctgggcaaggccaccctgtacgccgtgctggtgtctgccctggtgctgatggctatggtcaagcggaaggacagccggggacgcgccaagagaagcggatctggcgtgaagcagaccctgaatttcgacctgctgaagctggctggcgacgtggaatccaacccaggccctactagtatggactggatttggcgcatccttttccttgtcggcgctgctaccggcgcccattccgggcccatggaccccgacctggaaatcagagccgccttcctgcggcagagaaacacagccctgagaacagaggtggccgagctggaacaagaggtgcagcggctggaaaacgaggtgtcccagtacgagacaagatacggccctctcggaggcggaaaaggatccggcggcggaggatctggcggaggcggatctgggggcggaggctctttcgaacaagttcagcttcaacagcctggcgctgagctggtcaaacctggcgcttctgtgaagatgagctgcaaagccagcggctacgccttcagcagctactggatcaactggatgaagcagaaacccggccagggactcgaatggatcggccaaatctatcccggcgacggcgacaccaactacaacggcaagttcaagggcagagccacactgaccgccgatacctctagcagcacagcctacatgcagctgagcagcctgaccagcgaagatagcgccgtgtacttctgtgcccggtccatcacaacagtcgtgggctgcgctatggactattggggccagggaacaagcgtgaccgtgtctagtacgcgtgaggacctgaagaacgtgttcccacctgaggtggccgtgttcgagcctagcgaggccgagatcagccacacccagaaagccaccctcgtgtgcctggctaccggcttctaccccgaccatgtggaactgtcttggtgggtcaacggcaaagaggtgcacagcggcgtgtgtaccgacccccagccactgaaagaacagcccgccctgaacgacagccggtactgcctgagcagcagactgagagtgtccgccaccttctggcagaacccccggaaccacttcagatgccaggtgcagttctacggcctgagcgagaacgacgagtggacccaggacagagccaagcccgtgacccagatcgtgtctgccgaagcctggggcagagccgattgcggctttaccagcgagagctaccagcagggcgtgctgagcgccaccaacctgagcgtgatcggcttcagaatcctgctgctgaaagtggccggctttaacctgctgatgaccctgcggctgtggtccagc

SEQ ID NO: 5959 - DNA, 2007 bp, synthetic construct
  source 1..2007: mol_type = other DNA
atggccttaccagtgaccgccttgctcctgccgctggccttgctgctccacgccgccaggccggacatccagatgacacagagccctagcagcctgtctgccagcgtgggagacagagtgaccatcacatgcaaggccagcgaccacatcaacaactggctggcctggtatcagcagaagcctggacaggcccctaagctgctgatctacggcgctaccacactggaaacaggcgtgcccagcagattttctggcagcggctctggcaccgactacaccctgacaatatccagcctccagcctgaggacttcgccacctactactgtcagcagagctggaacaccccttggacattcggccagggcaccaagctggaaatcaagagactcgaggacctgaagaacgtgttcccacctgaggtggccgtgttcgagcctagcgaggccgagatcagccacacccagaaagccaccctcgtgtgcctggctaccggcttctaccccgaccatgtggaactgtcttggtgggtcaacggcaaagaggtgcacagcggcgtgtgtaccgacccccagccactgaaagaacagcccgccctgaacgacagccggtactgcctgagcagcagactgagagtgtccgccaccttctggcagaacccccggaaccacttcagatgccaggtgcagttctacggcctgagcgagaacgacgagtggacccaggacagagccaagcccgtgacccagatcgtgtctgccgaagcctggggcagagccgattgcggctttaccagcgagagctaccagcagggcgtgctgagcgccaccaacctgagcgtgatcggcttcagaatcctgctgctgaaagtggccggctttaacctgctgatgaccctgcggctgtggtccagcagggccaagcgatctggatctggagcaacaaacttctcactactcaaacaagcaggtgacgtggaggagaatcccgggcctactagtatggactggatttggcgcatccttttccttgtcggcgctgctaccggcgcccattccgggcccgaagttgctgccctcgagaaggaggtagcagctttggaaaaagaagtcgcagcccttgagaaagaagttgcggctctggagaagggatccggcggcggaggatctggcggaggcggatctgggggcggaggctctttcgaacaagttcagcttcaacagcctggcgctgagctggtcaaacctggcgcttctgtgaagatgagctgcaaagccagcggctacgccttcagcagctactggatcaactggatgaagcagaaacccggccagggactcgaatggatcggccaaatctatcccggcgacggcgacaccaactacaacggcaagttcaagggcagagccacactgaccgccgatacctctagcagcacagcctacatgcagctgagcagcctgaccagcgaagatagcgccgtgtacttctgtgcccggtccatcacaacagtcgtgggctgcgctatggactattggggccagggaacaagcgtgaccgtgtctagtacgcgtatccagaaccctgatcctgccgtgtaccagctgcgggatagcaagagcagcgacaagagcgtgtgtctgttcaccgacttcgacagccagaccaacgtgtcccagagcaaggactccgacgtgtacatcaccgataagtgcgtgctggacatgcggagcatggacttcaagagcaactccgccgtggcctggtccaacaagtccgatttcgcctgcgccaacgccttcaacaacagcattatccccgaggacacattcttcccaagccccgagagcagctgcgacgtgaagctggtggaaaagagcttcgagacagacaccaacctgaacttccagatcctgtacgagatcctgctgggcaaggccaccctgtacgccgtgctggtgtctgccctggtgctgatggctatggtcaagcggaaggacagccgggga

SEQ ID NO: 5960 - DNA, 2019 bp, synthetic construct
  source 1..2019: mol_type = other DNA
atggccttaccagtgaccgccttgctcctgccgctggccttgctgctccacgccgccaggccggacatccagatgacacagagccctagcagcctgtctgccagcgtgggagacagagtgaccatcacatgcaaggccagcgaccacatcaacaactggctggcctggtatcagcagaagcctggacaggcccctaagctgctgatctacggcgctaccacactggaaacaggcgtgcccagcagattttctggcagcggctctggcaccgactacaccctgacaatatccagcctccagcctgaggacttcgccacctactactgtcagcagagctggaacaccccttggacattcggccagggcaccaagctggaaatcaagagactcgagatccagaaccctgatcctgccgtgtaccagctgcgggatagcaagagcagcgacaagagcgtgtgtctgttcaccgacttcgacagccagaccaacgtgtcccagagcaaggactccgacgtgtacatcaccgataagtgcgtgctggacatgcggagcatggacttcaagagcaactccgccgtggcctggtccaacaagtccgatttcgcctgcgccaacgccttcaacaacagcattatccccgaggacacattcttcccaagccccgagagcagctgcgacgtgaagctggtggaaaagagcttcgagacagacaccaacctgaacttccagatcctgtacgagatcctgctgggcaaggccaccctgtacgccgtgctggtgtctgccctggtgctgatggctatggtcaagcggaaggacagccggggacgcgccaagagaagcggatctggcgtgaagcagaccctgaatttcgacctgctgaagctggctggcgacgtggaatccaacccaggccctactagtatggactggatttggcgcatccttttccttgtcggcgctgctaccggcgcccattccgggcccgaagttgctgccctcgagaaggaggtagcagctttggaaaaagaagtcgcagcccttgagaaagaagttgcggctctggagaagggatccggcggcggaggatctggcggaggcggatctgggggcggaggctctttcgaacaagttcagcttcaacagcctggcgctgagctggtcaaacctggcgcttctgtgaagatgagctgcaaagccagcggctacgccttcagcagctactggatcaactggatgaagcagaaacccggccagggactcgaatggatcggccaaatctatcccggcgacggcgacaccaactacaacggcaagttcaagggcagagccacactgaccgccgatacctctagcagcacagcctacatgcagctgagcagcctgaccagcgaagatagcgccgtgtacttctgtgcccggtccatcacaacagtcgtgggctgcgctatggactattggggccagggaacaagcgtgaccgtgtctagtacgcgtgaggacctgaagaacgtgttcccacctgaggtggccgtgttcgagcctagcgaggccgagatcagccacacccagaaagccaccctcgtgtgcctggctaccggcttctaccccgaccatgtggaactgtcttggtgggtcaacggcaaagaggtgcacagcggcgtgtgtaccgacccccagccactgaaagaacagcccgccctgaacgacagccggtactgcctgagcagcagactgagagtgtccgccaccttctggcagaacccccggaaccacttcagatgccaggtgcagttctacggcctgagcgagaacgacgagtggacccaggacagagccaagcccgtgacccagatcgtgtctgccgaagcctggggcagagccgattgcggctttaccagcgagagctaccagcagggcgtgctgagcgccaccaacctgagcgtgatcggcttcagaatcctgctgctgaaagtggccggctttaacctgctgatgaccctgcggctgtggtccagc

SEQ ID NO: 5961 - DNA, 2007 bp, synthetic construct; identical to SEQ ID NO: 5959
  source 1..2007: mol_type = other DNA

SEQ ID NO: 5962 - DNA, 2019 bp, synthetic construct; identical to SEQ ID NO: 5960
  source 1..2019: mol_type = other DNA

SEQ ID NO: 5963 - DNA, 2277 bp, synthetic construct
  source 1..2277: mol_type = other DNA
atggccttaccagtgaccgccttgctcctgccgctggccttgctgctccacgccgccaggccggacatccagatgacacagagccctagcagcctgtctgccagcgtgggagacagagtgaccatcacatgcaaggccagcgaccacatcaacaactggctggcctggtatcagcagaagcctggacaggcccctaagctgctgatctacggcgctaccacactggaaacaggcgtgcccagcagattttctggcagcggctctggcaccgactacaccctgacaatatccagcctccagcctgaggacttcgccacctactactgtcagcagagctggaacaccccttggacattcggccagggcaccaagctggaaatcaagagactcgaggacctgaagaacgtgttcccacctgaggtggccgtgttcgagcctagcgaggccgagatcagccacacccagaaagccaccctcgtgtgcctggctaccggcttctaccccgaccatgtggaactgtcttggtgggtcaacggcaaagaggtgcacagcggcgtgtgtaccgacccccagccactgaaagaacagcccgccctgaacgacagccggtactgcctgagcagcagactgagagtgtccgccaccttctggcagaacccccggaaccacttcagatgccaggtgcagttctacggcctgagcgagaacgacgagtggacccaggacagagccaagcccgtgacccagatcgtgtctgccgaagcctggggcagagccgattgcggctttaccagcgagagctaccagcagggcgtgctgagcgccaccaacctgagcgtgatcggcttcagaatcctgctgctgaaagtggccggctttaacctgctgatgaccctgcggctgtggtccagcagggccaagcgatctggatctggagcaacaaacttctcactactcaaacaagcaggtgacgtggaggagaatcccgggcctactagtatggactggatttggcgcatccttttccttgtcggcgctgctaccggcgcccattccgggccccaggttcagctgcaagagtctggcggaggacttgctcaagctggcggaagcctgagactgtcttgtgccgcctctggcagaaccttcagcatgggctggtttagacaggcccctggcaaagagagagagttcgtcgccgccatcacatacagcggcggcagcccttactacgcctcttctgtcagaggccggttcaccatcagccgggacaacgccaagaacaccgtgtacctccagatgaacagcctgaagccagaggacaccgccgtgtactactgtgccgccaatccaacctacggcagcgactggaatgccgagaattggggccagggcacccaagtgacagtgtctagtggatccggcggcggaggatctggcggaggcggatctgggggcggaggctctttcgaacaagttcagcttcaacagcctggcgctgagctggtcaaacctggcgcttctgtgaagatgagctgcaaagccagcggctacgccttcagcagctactggatcaactggatgaagcagaaacccggccagggactcgaatggatcggccaaatctatcccggcgacggcgacaccaactacaacggcaagttcaagggcagagccacactgaccgccgatacctctagcagcacagcctacatgcagctgagcagcctgaccagcgaagatagcgccgtgtacttctgtgcccggtccatcacaacagtcgtgggctgcgctatggactattggggccagggaacaagcgtgaccgtgtctagtacgcgtatccagaaccctgatcctgccgtgtaccagctgcgggatagcaagagcagcgacaagagcgtgtgtctgttcaccgacttcgacagccagaccaacgtgtcccagagcaaggactccgacgtgtacatcaccgataagtgcgtgctggacatgcggagcatggacttcaagagcaactccgccgtggcctggtccaacaagtccgatttcgcctgcgccaacgccttcaacaacagcattatccccgaggacacattcttcccaagccccgagagcagctgcgacgtgaagctggtggaaaagagcttcgagacagacaccaacctgaacttccagatcctgtacgagatcctgctgggcaaggccaccctgtacgccgtgctggtgtctgccctggtgctgatggctatggtcaagcggaaggacagccgggga

SEQ ID NO: 5964 - DNA, 2289 bp, synthetic construct
  source 1..2289: mol_type = other DNA
atggccttaccagtgaccgccttgctcctgccgctggccttgctgctccacgccgccaggccggacatccagatgacacagagccctagcagcctgtctgccagcgtgggagacagagtgaccatcacatgcaaggccagcgaccacatcaacaactggctggcctggtatcagcagaagcctggacaggcccctaagctgctgatctacggcgctaccacactggaaacaggcgtgcccagcagattttctggcagcggctctggcaccgactacaccctgacaatatccagcctccagcctgaggacttcgccacctactactgtcagcagagctggaacaccccttggacattcggccagggcaccaagctggaaatcaagagactcgagatccagaaccctgatcctgccgtgtaccagctgcgggatagcaagagcagcgacaagagcgtgtgtctgttcaccgacttcgacagccagaccaacgtgtcccagagcaaggactccgacgtgtacatcaccgataagtgcgtgctggacatgcggagcatggacttcaagagcaactccgccgtggcctggtccaacaagtccgatttcgcctgcgccaacgccttcaacaacagcattatccccgaggacacattcttcccaagccccgagagcagctgcgacgtgaagctggtggaaaagagcttcgagacagacaccaacctgaacttccagatcctgtacgagatcctgctgggcaaggccaccctgtacgccgtgctggtgtctgccctggtgctgatggctatggtcaagcggaaggacagccggggacgcgccaagagaagcggatctggcgtgaagcagaccctgaatttcgacctgctgaagctggctggcgacgtggaatccaacccaggccctactagtatggactggatttggcgcatccttttccttgtcggcgctgctaccggcgcccattccgggccccaggttcagctgcaagagtctggcggaggacttgctcaagctggcggaagcctgagactgtcttgtgccgcctctggcagaaccttcagcatgggctggtttagacaggcccctggcaaagagagagagttcgtcgccgccatcacatacagcggcggcagcccttactacgcctcttctgtcagaggccggttcaccatcagccgggacaacgccaagaacaccgtgtacctccagatgaacagcctgaagccagaggacaccgccgtgtactactgtgccgccaatccaacctacggcagcgactggaatgccgagaattggggccagggcacccaagtgacagtgtctagtggatccggcggcggaggatctggcggaggcggatctgggggcggaggctctttcgaacaagttcagcttcaacagcctggcgctgagctggtcaaacctggcgcttctgtgaagatgagctgcaaagccagcggctacgccttcagcagctactggatcaactggatgaagcagaaacccggccagggactcgaatggatcggccaaatctatcccggcgacggcgacaccaactacaacggcaagttcaagggcagagccacactgaccgccgatacctctagcagcacagcctacatgcagctgagcagcctgaccagcgaagatagcgccgtgtacttctgtgcccggtccatcacaacagtcgtgggctgcgctatggactattggggccagggaacaagcgtgaccgtgtctagtacgcgtgaggacctgaagaacgtgttcccacctgaggtggccgtgttcgagcctagcgaggccgagatcagccacacccagaaagccaccctcgtgtgcctggctaccggcttctaccccgaccatgtggaactgtcttggtgggtcaacggcaaagaggtgcacagcggcgtgtgtaccgacccccagccactgaaagaacagcccgccctgaacgacagccggtactgcctgagcagcagactgagagtgtccgccaccttctggcagaacccccggaaccacttcagatgccaggtgcagttctacggcctgagcgagaacgacgagtggacccaggacagagccaagcccgtgacccagatcgtgtctgccgaagcctggggcagagccgattgcggctttaccagcgagagctaccagcagggcgtgctgagcgccaccaacctgagcgtgatcggcttcagaatcctgctgctgaaagtggccggctttaacctgctgatgaccctgcggctgtggtccagc

SEQ ID NO: 5965 - DNA, 2295 bp, synthetic construct
  source 1..2295: mol_type = other DNA
atggccttaccagtgaccgccttgctcctgccgctggccttgctgctccacgccgccaggccggaagtgcaactggtggaatctggaggctctctggtgcagccagggggaagcctgagactgtcttgtgccgcttccggcttcaccttcgacgactacgccatgagctgggtgcgccaggtgccaggcaaaggcctggaatgggtgtccagcatcaactggagcggcacccacaccgattacgccgactccgtgaaaggcagattcacaatcagcagaaacaacgccaacaataccctgtacctgcagatgaactccctgaagtctgaggatacagcagtgtattattgcgccaagaactggcgggacgccggcaccacttggtttgagaaaagcggctctgccggacagggaacccaagtgacagtgtcctccggtaccggcggaggcggatctggcggcggaggtagcggtggcggaggatctgaattcgacatccagatgacacagagccctagcagcctgtctgccagcgtgggagacagagtgaccatcacatgcaaggccagcgaccacatcaacaactggctggcctggtatcagcagaagcctggacaggcccctaagctgctgatctacggcgctaccacactggaaacaggcgtgcccagcagattttctggcagcggctctggcaccgactacaccctgacaatatccagcctccagcctgaggacttcgccacctactactgtcagcagagctggaacaccccttggacattcggccagggcaccaagctggaaatcaagagactcgaggacctgaagaacgtgttcccacctgaggtggccgtgttcgagcctagcgaggccgagatcagccacacccagaaagccaccctcgtgtgcctggctaccggcttctaccccgaccatgtggaactgtcttggtgggtcaacggcaaagaggtgcacagcggcgtgtgtaccgacccccagccactgaaagaacagcccgccctgaacgacagccggtactgcctgagcagcagactgagagtgtccgccaccttctggcagaacccccggaaccacttcagatgccaggtgcagttctacggcctgagcgagaacgacgagtggacccaggacagagccaagcccgtgacccagatcgtgtctgccgaagcctggggcagagccgattgcggctttaccagcgagagctaccagcagggcgtgctgagcgccaccaacctgagcgtgatcggcttcagaatcctgctgctgaaagtggccggctttaacctgctgatgaccctgcggctgtggtccagcagggccaagcgatctggatctggagcaacaaacttctcactactcaaacaagcaggtgacgtggaggagaatcccgggcctactagtatggactggatttggcgcatccttttccttgtcggcgctgctaccggcgcgcattccttcgaacaagttcagcttcaacagcctggcgctgagctggtcaaacctggcgcttctgtgaagatgagctgcaaagccagcggctacgccttcagcagctactggatcaactggatgaagcagaaacccggccagggactcgaatggatcggccaaatctatcccggcgacggcgacaccaactacaacggcaagttcaagggcagagccacactgaccgccgatacctctagcagcacagcctacatgcagctgagcagcctgaccagcgaagatagcgccgtgtacttctgtgcccggtccatcacaacagtcgtgggctgcgctatggactattggggccagggaacaagcgtgaccgtgtctagtacgcgtatccagaaccctgatcctgccgtgtaccagctgcgggatagcaagagcagcgacaagagcgtgtgtctgttcaccgacttcgacagccagaccaacgtgtcccagagcaaggactccgacgtgtacatcaccgataagtgcgtgctggacatgcggagcatggacttcaagagcaactccgccgtggcctggtccaacaagtccgatttcgcctgcgccaacgccttcaacaacagcattatccccgaggacacattcttcccaagccccgagagcagctgcgacgtgaagctggtggaaaagagcttcgagacagacaccaacctgaacttccagatcctgtacgagatcctgctgggcaaggccaccctgtacgccgtgctggtgtctgccctggtgctgatggctatggtcaagcggaaggacagccgggga

SEQ ID NO: 5966 - DNA, 2307 bp, synthetic construct
  source 1..2307: mol_type = other DNA
atggccttaccagtgaccgccttgctcctgccgctggccttgctgctccacgccgccaggccggaagtgcaactggtggaatctggaggctctctggtgcagccagggggaagcctgagactgtcttgtgccgcttccggcttcaccttcgacgactacgccatgagctgggtgcgccaggtgccaggcaaaggcctggaatgggtgtccagcatcaactggagcggcacccacaccgattacgccgactccgtgaaaggcagattcacaatcagcagaaacaacgccaacaataccctgtacctgcagatgaactccctgaagtctgaggatacagcagtgtattattgcgccaagaactggcgggacgccggcaccacttggtttgagaaaagcggctctgccggacagggaacccaagtgacagtgtcctccggtaccggcggaggcggatctggcggcggaggtagcggtggcggaggatctgaattcgacatccagatgacacagagccctagcagcctgtctgccagcgtgggagacagagtgaccatcacatgcaaggccagcgaccacatcaacaactggctggcctggtatcagcagaagcctggacaggcccctaagctgctgatctacggcgctaccacactggaaacaggcgtgcccagcagattttctggcagcggctctggcaccgactacaccctgacaatatccagcctccagcctgaggacttcgccacctactactgtcagcagagctggaacaccccttggacattcggccagggcaccaagctggaaatcaagagactcgagatccagaaccctgatcctgccgtgtaccagctgcgggatagcaagagcagcgacaagagcgtgtgtctgttcaccgacttcgacagccagaccaacgtgtcccagagcaaggactccgacgtgtacatcaccgataagtgcgtgctggacatgcggagcatggacttcaagagcaactccgccgtggcctggtccaacaagtccgatttcgcctgcgccaacgccttcaacaacagcattatccccgaggacacattcttcccaagccccgagagcagctgcgacgtgaagctggtggaaaagagcttcgagacagacaccaacctgaacttccagatcctgtacgagatcctgctgggcaaggccaccctgtacgccgtgctggtgtctgccctggtgctgatggctatggtcaagcggaaggacagccggggacgcgccaagagaagcggatctggcgtgaagcagaccctgaatttcgacctgctgaagctggctggcgacgtggaatccaacccaggccctactagtatggactggatttggcgcatccttttccttgtcggcgctgctaccggcgcgcattccttcgaacaagttcagcttcaacagcctggcgctgagctggtcaaacctggcgcttctgtgaagatgagctgcaaagccagcggctacgccttcagcagctactggatcaactggatgaagcagaaacccggccagggactcgaatggatcggccaaatctatcccggcgacggcgacaccaactacaacggcaagttcaagggcagagccacactgaccgccgatacctctagcagcacagcctacatgcagctgagcagcctgaccagcgaagatagcgccgtgtacttctgtgcccggtccatcacaacagtcgtgggctgcgctatggactattggggccagggaacaagcgtgaccgtgtctagtacgcgtgaggacctgaagaacgtgttcccacctgaggtggccgtgttcgagcctagcgaggccgagatcagccacacccagaaagccaccctcgtgtgcctggctaccggcttctaccccgaccatgtggaactgtcttggtgggtcaacggcaaagaggtgcacagcggcgtgtgtaccgacccccagccactgaaagaacagcccgccctgaacgacagccggtactgcctgagcagcagactgagagtgtccgccaccttctggcagaacccccggaaccacttcagatgccaggtgcagttctacggcctgagcgagaacgacgagtggacccaggacagagccaagcccgtgacccagatcgtgtctgccgaagcctggggcagagccgattgcggctttaccagcgagagctaccagcagggcgtgctgagcgccaccaacctgagcgtgatcggcttcagaatcctgctgctgaaagtggccggctttaacctgctgatgaccctgcggctgtggtccagc

SEQ ID NO: 5967 - DNA, 2289 bp, synthetic construct
  source 1..2289: mol_type = other DNA
atggccttaccagtgaccgccttgctcctgccgctggccttgctgctccacgccgccaggccggaagttcagctgcttgagtctggcggaggactggttcaacctggcggaagcctgagactgtcttgtgccgccagcggcttcatcttcagcagctacgccatgagctgggtccgacaggctcctggaaagggccaagaatgggtttccggcgttagcggcacaggcgtgaacacctactacgccgatagcgtgaagggcagattcaccatcagccgggacaacagcaagaacaccctgtacctccagatgaacagcctgagagccgaggacaccgccgtgtactattgtgcctctggcaaaggctgggacagcggctcttggtacgaggactatagaggccagggcaccctggtcacagtttcttcaggtaccggcggaggcggatctggcggcggaggtagcggtggcggaggatctgaattcgacatccagatgacacagagccctagcagcctgtctgccagcgtgggagacagagtgaccatcacatgcaaggccagcgaccacatcaacaactggctggcctggtatcagcagaagcctggacaggcccctaagctgctgatctacggcgctaccacactggaaacaggcgtgcccagcagattttctggcagcggctctggcaccgactacaccctgacaatatccagcctccagcctgaggacttcgccacctactactgtcagcagagctggaacaccccttggacattcggccagggcaccaagctggaaatcaagagactcgaggacctgaagaacgtgttcccacctgaggtggccgtgttcgagcctagcgaggccgagatcagccacacccagaaagccaccctcgtgtgcctggctaccggcttctaccccgaccatgtggaactgtcttggtgggtcaacggcaaagaggtgcacagcggcgtgtgtaccgacccccagccactgaaagaacagcccgccctgaacgacagccggtactgcctgagcagcagactgagagtgtccgccaccttctggcagaacccccggaaccacttcagatgccaggtgcagttctacggcctgagcgagaacgacgagtggacccaggacagagccaagcccgtgacccagatcgtgtctgccgaagcctggggcagagccgattgcggctttaccagcgagagctaccagcagggcgtgctgagcgccaccaacctgagcgtgatcggcttcagaatcctgctgctgaaagtggccggctttaacctgctgatgaccctgcggctgtggtccagcagggccaagcgatctggatctggagcaacaaacttctcactactcaaacaagcaggtgacgtggaggagaatcccgggcctactagtatggactggatttggcgcatccttttccttgtcggcgctgctaccggcgcgcattccttcgaacaagttcagcttcaacagcctggcgctgagctggtcaaacctggcgcttctgtgaagatgagctgcaaagccagcggctacgccttcagcagctactggatcaactggatgaagcagaaacccggccagggactcgaatggatcggccaaatctatcccggcgacggcgacaccaactacaacggcaagttcaagggcagagccacactgaccgccgatacctctagcagcacagcctacatgcagctgagcagcctgaccagcgaagatagcgccgtgtacttctgtgcccggtccatcacaacagtcgtgggctgcgctatggactattggggccagggaacaagcgtgaccgtgtctagtacgcgtatccagaaccctgatcctgccgtgtaccagctgcgggatagcaagagcagcgacaagagcgtgtgtctgttcaccgacttcgacagccagaccaacgtgtcccagagcaaggactccgacgtgtacatcaccgataagtgcgtgctggacatgcggagcatggacttcaagagcaactccgccgtggcctggtccaacaagtccgatttcgcctgcgccaacgccttcaacaacagcattatccccgaggacacattcttcccaagccccgagagcagctgcgacgtgaagctggtggaaaagagcttcgagacagacaccaacctgaacttccagatcctgtacgagatcctgctgggcaaggccaccctgtacgccgtgctggtgtctgccctggtgctgatggctatggtcaagcggaaggacagccgggga

SEQ ID NO: 5968 - DNA, 2301 bp, synthetic construct
  source 1..2301: mol_type = other DNA
atggccttaccagtgaccgccttgctcctgccgctggccttgctgctccacgccgccaggccggaagttcagctgcttgagtctggcggaggactggttcaacctggcggaagcctgagactgtcttgtgccgccagcggcttcatcttcagcagctacgccatgagctgggtccgacaggctcctggaaagggccaagaatgggtttccggcgttagcggcacaggcgtgaacacctactacgccgatagcgtgaagggcagattcaccatcagccgggacaacagcaagaacaccctgtacctccagatgaacagcctgagagccgaggacaccgccgtgtactattgtgcctctggcaaaggctgggacagcggctcttggtacgaggactatagaggccagggcaccctggtcacagtttcttcaggtaccggcggaggcggatctggcggcggaggtagcggtggcggaggatctgaattcgacatccagatgacacagagccctagcagcctgtctgccagcgtgggagacagagtgaccatcacatgcaaggccagcgaccacatcaacaactggctggcctggtatcagcagaagcctggacaggcccctaagctgctgatctacggcgctaccacactggaaacaggcgtgcccagcagattttctggcagcggctctggcaccgactacaccctgacaatatccagcctccagcctgaggacttcgccacctactactgtcagcagagctggaacaccccttggacattcggccagggcaccaagctggaaatcaagagactcgagatccagaaccctgatcctgccgtgtaccagctgcgggatagcaagagcagcgacaagagcgtgtgtctgttcaccgacttcgacagccagaccaacgtgtcccagagcaaggactccgacgtgtacatcaccgataagtgcgtgctggacatgcggagcatggacttcaagagcaactccgccgtggcctggtccaacaagtccgatttcgcctgcgccaacgccttcaacaacagcattatccccgaggacacattcttcccaagccccgagagcagctgcgacgtgaagctggtggaaaagagcttcgagacagacaccaacctgaacttccagatcctgtacgagatcctgctgggcaaggccaccctgtacgccgtgctggtgtctgccctggtgctgatggctatggtcaagcggaaggacagccggggacgcgccaagagaagcggatctggcgtgaagcagaccctgaatttcgacctgctgaagctggctggcgacgtggaatccaacccaggccctactagtatggactggatttggcgcatccttttccttgtcggcgctgctaccggcgcgcattccttcgaacaagttcagcttcaacagcctggcgctgagctggtcaaacctggcgcttctgtgaagatgagctgcaaagccagcggctacgccttcagcagctactggatcaactggatgaagcagaaacccggccagggactcgaatggatcggccaaatctatcccggcgacggcgacaccaactacaacggcaagttcaagggcagagccacactgaccgccgatacctctagcagcacagcctacatgcagctgagcagcctgaccagcgaagatagcgccgtgtacttctgtgcccggtccatcacaacagtcgtgggctgcgctatggactattggggccagggaacaagcgtgaccgtgtctagtacgcgtgaggacctgaagaacgtgttcccacctgaggtggccgtgttcgagcctagcgaggccgagatcagccacacccagaaagccaccctcgtgtgcctggctaccggcttctaccccgaccatgtggaactgtcttggtgggtcaacggcaaagaggtgcacagcggcgtgtgtaccgacccccagccactgaaagaacagcccgccctgaacgacagccggtactgcctgagcagcagactgagagtgtccgccaccttctggcagaacccccggaaccacttcagatgccaggtgcagttctacggcctgagcgagaacgacgagtggacccaggacagagccaagcccgtgacccagatcgtgtctgccgaagcctggggcagagccgattgcggctttaccagcgagagctaccagcagggcgtgctgagcgccaccaacctgagcgtgatcggcttcagaatcctgctgctgaaagtggccggctttaacctgctgatgaccctgcggctgtggtccagc

SEQ ID NO: 5969 - DNA, 2193 bp, synthetic construct
  source 1..2193: mol_type = other DNA
atggccttaccagtgaccgccttgctcctgccgctggccttgctgctccacgccgccaggccgatgctgcccgctcctaagaatctggtggtgtccagaatcaccgaggacagcgccagactgtcttggacagctcctgatgccgccttcgacagcttccccatccggtacatcgagacactgatctggggcgaagccatctggctggatgtgcctggaagcgagagaagctacgacctgaccggactgaagcctggcacagagtatgccgtggtcatcaccggcgtgaaaggcggcagattctctagccctctggtggcctctttcaccaccggtaccggcggaggcggatctggcggcggaggtagcggtggcggaggatctgaattcgacatccagatgacacagagccctagcagcctgtctgccagcgtgggagacagagtgaccatcacatgcaaggccagcgaccacatcaacaactggctggcctggtatcagcagaagcctggacaggcccctaagctgctgatctacggcgctaccacactggaaacaggcgtgcccagcagattttctggcagcggctctggcaccgactacaccctgacaatatccagcctccagcctgaggacttcgccacctactactgtcagcagagctggaacaccccttggacattcggccagggcaccaagctggaaatcaagagactcgaggacctgaagaacgtgttcccacctgaggtggccgtgttcgagcctagcgaggccgagatcagccacacccagaaagccaccctcgtgtgcctggctaccggcttctaccccgaccatgtggaactgtcttggtgggtcaacggcaaagaggtgcacagcggcgtgtgtaccgacccccagccactgaaagaacagcccgccctgaacgacagccggtactgcctgagcagcagactgagagtgtccgccaccttctggcagaacccccggaaccacttcagatgccaggtgcagttctacggcctgagcgagaacgacgagtggacccaggacagagccaagcccgtgacccagatcgtgtctgccgaagcctggggcagagccgattgcggctttaccagcgagagctaccagcagggcgtgctgagcgccaccaacctgagcgtgatcggcttcagaatcctgctgctgaaagtggccggctttaacctgctgatgaccctgcggctgtggtccagcagggccaagcgatctggatctggagcaacaaacttctcactactcaaacaagcaggtgacgtggaggagaatcccgggcctactagtatggactggatttggcgcatccttttccttgtcggcgctgctaccggcgcgcattccttcgaacaagttcagcttcaacagcctggcgctgagctggtcaaacctggcgcttctgtgaagatgagctgcaaagccagcggctacgccttcagcagctactggatcaactggatgaagcagaaacccggccagggactcgaatggatcggccaaatctatcccggcgacggcgacaccaactacaacggcaagttcaagggcagagccacactgaccgccgatacctctagcagcacagcctacatgcagctgagcagcctgaccagcgaagatagcgccgtgtacttctgtgcccggtccatcacaacagtcgtgggctgcgctatggactattggggccagggaacaagcgtgaccgtgtctagtacgcgtatccagaaccctgatcctgccgtgtaccagctgcgggatagcaagagcagcgacaagagcgtgtgtctgttcaccgacttcgacagccagaccaacgtgtcccagagcaaggactccgacgtgtacatcaccgataagtgcgtgctggacatgcggagcatggacttcaagagcaactccgccgtggcctggtccaacaagtccgatttcgcctgcgccaacgccttcaacaacagcattatccccgaggacacattcttcccaagccccgagagcagctgcgacgtgaagctggtggaaaagagcttcgagacagacaccaacctgaacttccagatcctgtacgagatcctgctgggcaaggccaccctgtacgccgtgctggtgtctgccctggtgctgatggctatggtcaagcggaaggacagccgggga

SEQ ID NO: 5970 - DNA, 2205 bp, synthetic construct
  source 1..2205: mol_type = other DNA
atggccttaccagtgaccgccttgctcctgccgctggccttgctgctccacgccgccaggccgatgctgcccgctcctaagaatctggtggtgtccagaatcaccgaggacagcgccagactgtcttggacagctcctgatgccgccttcgacagcttccccatccggtacatcgagacactgatctggggcgaagccatctggctggatgtgcctggaagcgagagaagctacgacctgaccggactgaagcctggcacagagtatgccgtggtcatcaccggcgtgaaaggcggcagattctctagccctctggtggcctctttcaccaccggtaccggcggaggcggatctggcggcggaggtagcggtggcggaggatctgaattcgacatccagatgacacagagccctagcagcctgtctgccagcgtgggagacagagtgaccatcacatgcaaggccagcgaccacatcaacaactggctggcctggtatcagcagaagcctggacaggcccctaagctgctgatctacggcgctaccacactggaaacaggcgtgcccagcagattttctggcagcggctctggcaccgactacaccctgacaatatccagcctccagcctgaggacttcgccacctactactgtcagcagagctggaacaccccttggacattcggccagggcaccaagctggaaatcaagagactcgagatccagaaccctgatcctgccgtgtaccagctgcgggatagcaagagcagcgacaagagcgtgtgtctgttcaccgacttcgacagccagaccaacgtgtcccagagcaaggactccgacgtgtacatcaccgataagtgcgtgctggacatgcggagcatggacttcaagagcaactccgccgtggcctggtccaacaagtccgatttcgcctgcgccaacgccttcaacaacagcattatccccgaggacacattcttcccaagccccgagagcagctgcgacgtgaagctggtggaaaagagcttcgagacagacaccaacctgaacttccagatcctgtacgagatcctgctgggcaaggccaccctgtacgccgtgctggtgtctgccctggtgctgatggctatggtcaagcggaaggacagccggggacgcgccaagagaagcggatctggcgtgaagcagaccctgaatttcgacctgctgaagctggctggcgacgtggaatccaacccaggccctactagtatggactggatttggcgcatccttttccttgtcggcgctgctaccggcgcgcattccttcgaacaagttcagcttcaacagcctggcgctgagctggtcaaacctggcgcttctgtgaagatgagctgcaaagccagcggctacgccttcagcagctactggatcaactggatgaagcagaaacccggccagggactcgaatggatcggccaaatctatcccggcgacggcgacaccaactacaacggcaagttcaagggcagagccacactgaccgccgatacctctagcagcacagcctacatgcagctgagcagcctgaccagcgaagatagcgccgtgtacttctgtgcccggtccatcacaacagtcgtgggctgcgctatggactattggggccagggaacaagcgtgaccgtgtctagtacgcgtgaggacctgaagaacgtgttcccacctgaggtggccgtgttcgagcctagcgaggccgagatcagccacacccagaaagccaccctcgtgtgcctggctaccggcttctaccccgaccatgtggaactgtcttggtgggtcaacggcaaagaggtgcacagcggcgtgtgtaccgacccccagccactgaaagaacagcccgccctgaacgacagccggtactgcctgagcagcagactgagagtgtccgccaccttctggcagaacccccggaaccacttcagatgccaggtgcagttctacggcctgagcgagaacgacgagtggacccaggacagagccaagcccgtgacccagatcgtgtctgccgaagcctggggcagagccgattgcggctttaccagcgagagctaccagcagggcgtgctgagcgccaccaacctgagcgtgatcggcttcagaatcctgctgctgaaagtggccggctttaacctgctgatgaccctgcggctgtggtccagc

SEQ ID NO: 5971 - DNA, 2280 bp, synthetic construct
  source 1..2280: mol_type = other DNA
atggccttaccagtgaccgccttgctcctgccgctggccttgctgctccacgccgccaggccggaggtgcagctggttgaatctggcggaggactggttcagcctggcggatctctgagactgtcttgtgccgccagcggcttcaacatcaaggatacctgtatcggctgggttcgcagagcccctggcaaagaggaagaactggtcgccaaaatctgcaagtacagcggccacaccagatacgccgacagcgtgaagggcagattcaccatcagcgccgacaccagcaagaacaccgcctacctccagatgaacagcctgagagccgaggacaccgccgtgtactattgtgccgctgtgtccgtcagagatgggcactacaattactggggccagggcaccaccgtgaccgtttcttcaggtaccggcggaggcggatctggcggcggaggtagcggtggcggaggatctgaattcgacatccagatgacacagagccctagcagcctgtctgccagcgtgggagacagagtgaccatcacatgcaaggccagcgaccacatcaacaactggctggcctggtatcagcagaagcctggacaggcccctaagctgctgatctacggcgctaccacactggaaacaggcgtgcccagcagattttctggcagcggctctggcaccgactacaccctgacaatatccagcctccagcctgaggacttcgccacctactactgtcagcagagctggaacaccccttggacattcggccagggcaccaagctggaaatcaagagactcgaggacctgaagaacgtgttcccacctgaggtggccgtgttcgagcctagcgaggccgagatcagccacacccagaaagccaccctcgtgtgcctggctaccggcttctaccccgaccatgtggaactgtcttggtgggtcaacggcaaagaggtgcacagcggcgtgtgtaccgacccccagccactgaaagaacagcccgccctgaacgacagccggtactgcctgagcagcagactgagagtgtccgccaccttctggcagaacccccggaaccacttcagatgccaggtgcagttctacggcctgagcgagaacgacgagtggacccaggacagagccaagcccgtgacccagatcgtgtctgccgaagcctggggcagagccgattgcggctttaccagcgagagctaccagcagggcgtgctgagcgccaccaacctgagcgtgatcggcttcagaatcctgctgctgaaagtggccggctttaacctgctgatgaccctgcggctgtggtccagcagggccaagcgatctggatctggagcaacaaacttctcactactcaaacaagcaggtgacgtggaggagaatcccgggcctactagtatggactggatttggcgcatccttttccttgtcggcgctgctaccggcgcgcattccttcgaacaagttcagcttcaacagcctggcgctgagctggtcaaacctggcgcttctgtgaagatgagctgcaaagccagcggctacgccttcagcagctactggatcaactggatgaagcagaaacccggccagggactcgaatggatcggccaaatctatcccggcgacggcgacaccaactacaacggcaagttcaagggcagagccacactgaccgccgatacctctagcagcacagcctacatgcagctgagcagcctgaccagcgaagatagcgccgtgtacttctgtgcccggtccatcacaacagtcgtgggctgcgctatggactattggggccagggaacaagcgtgaccgtgtctagtacgcgtatccagaaccctgatcctgccgtgtaccagctgcgggatagcaagagcagcgacaagagcgtgtgtctgttcaccgacttcgacagccagaccaacgtgtcccagagcaaggactccgacgtgtacatcaccgataagtgcgtgctggacatgcggagcatggacttcaagagcaactccgccgtggcctggtccaacaagtccgatttcgcctgcgccaacgccttcaacaacagcattatccccgaggacacattcttcccaagccccgagagcagctgcgacgtgaagctggtggaaaagagcttcgagacagacaccaacctgaacttccagatcctgtacgagatcctgctgggcaaggccaccctgtacgccgtgctggtgtctgccctggtgctgatggctatggtcaagcggaaggacagccgggga

SEQ ID NO: 5972 - DNA, 2292 bp, synthetic construct
  source 1..2292: mol_type = other DNA
atggccttaccagtgaccgccttgctcctgccgctggccttgctgctccacgccgccaggccggaggtgcagctggttgaatctggcggaggactggttcagcctggcggatctctgagactgtcttgtgccgccagcggcttcaacatcaaggatacctgtatcggctgggttcgcagagcccctggcaaagaggaagaactggtcgccaaaatctgcaagtacagcggccacaccagatacgccgacagcgtgaagggcagattcaccatcagcgccgacaccagcaagaacaccgcctacctccagatgaacagcctgagagccgaggacaccgccgtgtactattgtgccgctgtgtccgtcagagatgggcactacaattactggggccagggcaccaccgtgaccgtttcttcaggtaccggcggaggcggatctggcggcggaggtagcggtggcggaggatctgaattcgacatccagatgacacagagccctagcagcctgtctgccagcgtgggagacagagtgaccatcacatgcaaggccagcgaccacatcaacaactggctggcctggtatcagcagaagcctggacaggcccctaagctgctgatctacggcgctaccacactggaaacaggcgtgcccagcagattttctggcagcggctctggcaccgactacaccctgacaatatccagcctccagcctgaggacttcgccacctactactgtcagcagagctggaacaccccttggacattcggccagggcaccaagctggaaatcaagagactcgagatccagaaccctgatcctgccgtgtaccagctgcgggatagcaagagcagcgacaagagcgtgtgtctgttcaccgacttcgacagccagaccaacgtgtcccagagcaaggactccgacgtgtacatcaccgataagtgcgtgctggacatgcggagcatggacttcaagagcaactccgccgtggcctggtccaacaagtccgatttcgcctgcgccaacgccttcaacaacagcattatccccgaggacacattcttcccaagccccgagagcagctgcgacgtgaagctggtggaaaagagcttcgagacagacaccaacctgaacttccagatcctgtacgagatcctgctgggcaaggccaccctgtacgccgtgctggtgtctgccctggtgctgatggctatggtcaagcggaaggacagccggggacgcgccaagagaagcggatctggcgtgaagcagaccctgaatttcgacctgctgaagctggctggcgacgtggaatccaacccaggccctactagtatggactggatttggcgcatccttttccttgtcggcgctgctaccggcgcgcattccttcgaacaagttcagcttcaacagcctggcgctgagctggtcaaacctggcgcttctgtgaagatgagctgcaaagccagcggctacgccttcagcagctactggatcaactggatgaagcagaaacccggccagggactcgaatggatcggccaaatctatcccggcgacggcgacaccaactacaacggcaagttcaagggcagagccacactgaccgccgatacctctagcagcacagcctacatgcagctgagcagcctgaccagcgaagatagcgccgtgtacttctgtgcccggtccatcacaacagtcgtgggctgcgctatggactattggggccagggaacaagcgtgaccgtgtctagtacgcgtgaggacctgaagaacgtgttcccacctgaggtggccgtgttcgagcctagcgaggccgagatcagccacacccagaaagccaccctcgtgtgcctggctaccggcttctaccccgaccatgtggaactgtcttggtgggtcaacggcaaagaggtgcacagcggcgtgtgtaccgacccccagccactgaaagaacagcccgccctgaacgacagccggtactgcctgagcagcagactgagagtgtccgccaccttctggcagaacccccggaaccacttcagatgccaggtgcagttctacggcctgagcgagaacgacgagtggacccaggacagagccaagcccgtgacccagatcgtgtctgccgaagcctggggcagagccgattgcggctttaccagcgagagctaccagcagggcgtgctgagcgccaccaacctgagcgtgatcggcttcagaatcctgctgctgaaagtggccggctttaacctgctgatgaccctgcggctgtggtccagc

SEQ ID NO: 5973 - DNA, 1911 bp, synthetic construct
  source 1..1911: mol_type = other DNA
atggccttaccagtgaccgccttgctcctgccgctggccttgctgctccacgccgccaggccgcagctccagctgcaagagtctggacctggcctggtcaagcctagcgagacactgagcctgacctgtaccgtgtccggcgatagcatcagcagcggcgattactactggggctggatcagacagcctcctggcaaaggactggaatggatcggccacatctactacagcggcgtgacctactacaaccccagcctgaagtccagagtgaccatcagcgtggacaccagccggaaccagttctccctgaagctgtctagcgtgacagccgccgataccgccgtgtactactgcaccagagaggacagcagcaactggcggagtagaggccagggaacactggtcacagttagctctctcgaggacctgaagaacgtgttcccacctgaggtggccgtgttcgagcctagcgaggccgagatcagccacacccagaaagccaccctcgtgtgcctggctaccggcttctaccccgaccatgtggaactgtcttggtgggtcaacggcaaagaggtgcacagcggcgtgtgtaccgacccccagccactgaaagaacagcccgccctgaacgacagccggtactgcctgagcagcagactgagagtgtccgccaccttctggcagaacccccggaaccacttcagatgccaggtgcagttctacggcctgagcgagaacgacgagtggacccaggacagagccaagcccgtgacccagatcgtgtctgccgaagcctggggcagagccgattgcggctttaccagcgagagctaccagcagggcgtgctgagcgccaccaacctgagcgtgatcggcttcagaatcctgctgctgaaagtggccggctttaacctgctgatgaccctgcggctgtggtccagcagggccaagcgatctggatctggagcaacaaacttctcactactcaaacaagcaggtgacgtggaggagaatcccgggcctactagtatggactggatttggcgcatccttttccttgtcggcgctgctaccggcgcgcattccttcgaagttcagttggtagagtctggaggcggagtggtacaaccggggcggtctcttagacttagttgcgcagcaagcggtttctctttctctggctatgggatgcactgggtgagacaggcccctgggaaaggactggagtgggtggcctacatttcatacgacgggagtaataaatactatgcagactccgttaagggcaggttcacgatctctcgggacaattccaagaatacattgtatcttcagatgaatagtctccgagctgaagacacggcggtttactactgcgctaaagacccggcctggggacttcgacttggagagagttctagctacgattttgacatttggggacaagggacaatggtcactgtctcaagtacgcgtatccagaaccctgatcctgccgtgtaccagctgcgggatagcaagagcagcgacaagagcgtgtgtctgttcaccgacttcgacagccagaccaacgtgtcccagagcaaggactccgacgtgtacatcaccgataagtgcgtgctggacatgcggagcatggacttcaagagcaactccgccgtggcctggtccaacaagtccgatttcgcctgcgccaacgccttcaacaacagcattatccccgaggacacattcttcccaagccccgagagcagctgcgacgtgaagctggtggaaaagagcttcgagacagacaccaacctgaacttccagatcctgtacgagatcctgctgggcaaggccaccctgtacgccgtgctggtgtctgccctggtgctgatggctatggtcaagcggaaggacagccgggga

SEQ ID NO: 5974 - DNA, 1923 bp, synthetic construct
  source 1..1923: mol_type = other DNA
atggccttaccagtgaccgccttgctcctgccgctggccttgctgctccacgccgccaggccgcagctccagctgcaagagtctggacctggcctggtcaagcctagcgagacactgagcctgacctgtaccgtgtccggcgatagcatcagcagcggcgattactactggggctggatcagacagcctcctggcaaaggactggaatggatcggccacatctactacagcggcgtgacctactacaaccccagcctgaagtccagagtgaccatcagcgtggacaccagccggaaccagttctccctgaagctgtctagcgtgacagccgccgataccgccgtgtactactgcaccagagaggacagcagcaactggcggagtagaggccagggaacactggtcacagttagctctctcgagatccagaaccctgatcctgccgtgtaccagctgcgggatagcaagagcagcgacaagagcgtgtgtctgttcaccgacttcgacagccagaccaacgtgtcccagagcaaggactccgacgtgtacatcaccgataagtgcgtgctggacatgcggagcatggacttcaagagcaactccgccgtggcctggtccaacaagtccgatttcgcctgcgccaacgccttcaacaacagcattatccccgaggacacattcttcccaagccccgagagcagctgcgacgtgaagctggtggaaaagagcttcgagacagacaccaacctgaacttccagatcctgtacgagatcctgctgggcaaggccaccctgtacgccgtgctggtgtctgccctggtgctgatggctatggtcaagcggaaggacagccggggacgcgccaagagaagcggatctggcgtgaagcagaccctgaatttcgacctgctgaagctggctggcgacgtggaatccaacccaggccctactagtatggactggatttggcgcatccttttccttgtcggcgctgctaccggcgcgcattccttcgaagttcagttggtagagtctggaggcggagtggtacaaccggggcggtctcttagacttagttgcgcagcaagcggtttctctttctctggctatgggatgcactgggtgagacaggcccctgggaaaggactggagtgggtggcctacatttcatacgacgggagtaataaatactatgcagactccgttaagggcaggttcacgatctctcgggacaattccaagaatacattgtatcttcagatgaatagtctccgagctgaagacacggcggtttactactgcgctaaagacccggcctggggacttcgacttggagagagttctagctacgattttgacatttggggacaagggacaatggtcactgtctcaagtacgcgtgaggacctgaagaacgtgttcccacctgaggtggccgtgttcgagcctagcgaggccgagatcagccacacccagaaagccaccctcgtgtgcctggctaccggcttctaccccgaccatgtggaactgtcttggtgggtcaacggcaaagaggtgcacagcggcgtgtgtaccgacccccagccactgaaagaacagcccgccctgaacgacagccggtactgcctgagcagcagactgagagtgtccgccaccttctggcagaacccccggaaccacttcagatgccaggtgcagttctacggcctgagcgagaacgacgagtggacccaggacagagccaagcccgtgacccagatcgtgtctgccgaagcctggggcagagccgattgcggctttaccagcgagagctaccagcagggcgtgctgagcgccaccaacctgagcgtgatcggcttcagaatcctgctgctgaaagtggccggctttaacctgctgatgaccctgcggctgtggtccagc

SEQ ID NO: 5975 - DNA, 1878 bp, synthetic construct
  source 1..1878: mol_type = other DNA
atggccttaccagtgaccgccttgctcctgccgctggccttgctgctccacgccgccaggccgcagctccagctgcaagagtctggacctggcctggtcaagcctagcgagacactgagcctgacctgtaccgtgtccggcgatagcatcagcagcggcgattactactggggctggatcagacagcctcctggcaaaggactggaatggatcggccacatctactacagcggcgtgacctactacaaccccagcctgaagtccagagtgaccatcagcgtggacaccagccggaaccagttctccctgaagctgtctagcgtgacagccgccgataccgccgtgtactactgcaccagagaggacagcagcaactggcggagtagaggccagggaacactggtcacagttagctctctcgaggacctgaagaacgtgttcccacctgaggtggccgtgttcgagcctagcgaggccgagatcagccacacccagaaagccaccctcgtgtgcctggctaccggcttctaccccgaccatgtggaactgtcttggtgggtcaacggcaaagaggtgcacagcggcgtgtgtaccgacccccagccactgaaagaacagcccgccctgaacgacagccggtactgcctgagcagcagactgagagtgtccgccaccttctggcagaacccccggaaccacttcagatgccaggtgcagttctacggcctgagcgagaacgacgagtggacccaggacagagccaagcccgtgacccagatcgtgtctgccgaagcctggggcagagccgattgcggctttaccagcgagagctaccagcagggcgtgctgagcgccaccaacctgagcgtgatcggcttcagaatcctgctgctgaaagtggccggctttaacctgctgatgaccctgcggctgtggtccagcagggccaagcgatctggatctggagcaacaaacttctcactactcaaacaagcaggtgacgtggaggagaatcccgggcctactagtatggactggatttggcgcatccttttccttgtcggcgctgctaccggcgcgcattccttcgaagtgcagctggttgaatctggcggaggactggttcagcctggcggatctctgagactgtcttgtgccgccagcggcttcagcttcagcgacttttggatgagctgggtccgacaggcccctggcaaaggacttgaatgggtcgccacaatcagccaggccggcagcgagaaggactacgtggactctgtgaagggcagattcaccatcagccgggacaacgccaagaagtccctgtacctccagatgaacagcctgagagccgaggacaccgccgtgtactattgtgcctctggcgtgtacagcttcgactacagaggccagggcaccctggtcacagtctcttctacgcgtatccagaaccctgatcctgccgtgtaccagctgcgggatagcaagagcagcgacaagagcgtgtgtctgttcaccgacttcgacagccagaccaacgtgtcccagagcaaggactccgacgtgtacatcaccgataagtgcgtgctggacatgcggagcatggacttcaagagcaactccgccgtggcctggtccaacaagtccgatttcgcctgcgccaacgccttcaacaacagcattatccccgaggacacattcttcccaagccccgagagcagctgcgacgtgaagctggtggaaaagagcttcgagacagacaccaacctgaacttccagatcctgtacgagatcctgctgggcaaggccaccctgtacgccgtgctggtgtctgccctggtgctgatggctatggtcaagcggaaggacagccgggga

SEQ ID NO: 5976 - DNA, 1890 bp, synthetic construct
  source 1..1890: mol_type = other DNA
atggccttaccagtgaccgccttgctcctgccgctggccttgctgctccacgccgccaggccgcagctccagctgcaagagtctggacctggcctggtcaagcctagcgagacactgagcctgacctgtaccgtgtccggcgatagcatcagcagcggcgattactactggggctggatcagacagcctcctggcaaaggactggaatggatcggccacatctactacagcggcgtgacctactacaaccccagcctgaagtccagagtgaccatcagcgtggacaccagccggaaccagttctccctgaagctgtctagcgtgacagccgccgataccgccgtgtactactgcaccagagaggacagcagcaactggcggagtagaggccagggaacactggtcacagttagctctctcgagatccagaaccctgatcctgccgtgtaccagctgcgggatagcaagagcagcgacaagagcgtgtgtctgttcaccgacttcgacagccagaccaacgtgtcccagagcaaggactccgacgtgtacatcaccgataagtgcgtgctggacatgcggagcatggacttcaagagcaactccgccgtggcctggtccaacaagtccgatttcgcctgcgccaacgccttcaacaacagcattatccccgaggacacattcttcccaagccccgagagcagctgcgacgtgaagctggtggaaaagagcttcgagacagacaccaacctgaacttccagatcctgtacgagatcctgctgggcaaggccaccctgtacgccgtgctggtgtctgccctggtgctgatggctatggtcaagcggaaggacagccggggacgcgccaagagaagcggatctggcgtgaagcagaccctgaatttcgacctgctgaagctggctggcgacgtggaatccaacccaggccctactagtatggactggatttggcgcatccttttccttgtcggcgctgctaccggcgcgcattccttcgaagtgcagctggttgaatctggcggaggactggttcagcctggcggatctctgagactgtcttgtgccgccagcggcttcagcttcagcgacttttggatgagctgggtccgacaggcccctggcaaaggacttgaatgggtcgccacaatcagccaggccggcagcgagaaggactacgtggactctgtgaagggcagattcaccatcagccgggacaacgccaagaagtccctgtacctccagatgaacagcctgagagccgaggacaccgccgtgtactattgtgcctctggcgtgtacagcttcgactacagaggccagggcaccctggtcacagtctcttctacgcgtgaggacctgaagaacgtgttcccacctgaggtggccgtgttcgagcctagcgaggccgagatcagccacacccagaaagccaccctcgtgtgcctggctaccggcttctaccccgaccatgtggaactgtcttggtgggtcaacggcaaagaggtgcacagcggcgtgtgtaccgacccccagccactgaaagaacagcccgccctgaacgacagccggtactgcctgagcagcagactgagagtgtccgccaccttctggcagaacccccggaaccacttcagatgccaggtgcagttctacggcctgagcgagaacgacgagtggacccaggacagagccaagcccgtgacccagatcgtgtctgccgaagcctggggcagagccgattgcggctttaccagcgagagctaccagcagggcgtgctgagcgccaccaacctgagcgtgatcggcttcagaatcctgctgctgaaagtggccggctttaacctgctgatgaccctgcggctgtggtccagc

SEQ ID NO: 5977 - DNA, 1884 bp, synthetic construct
  source 1..1884: mol_type = other DNA
atggccttaccagtgaccgccttgctcctgccgctggccttgctgctccacgccgccaggccgcagctccagctgcaagagtctggacctggcctggtcaagcctagcgagacactgagcctgacctgtaccgtgtccggcgatagcatcagcagcggcgattactactggggctggatcagacagcctcctggcaaaggactggaatggatcggccacatctactacagcggcgtgacctactacaaccccagcctgaagtccagagtgaccatcagcgtggacaccagccggaaccagttctccctgaagctgtctagcgtgacagccgccgataccgccgtgtactactgcaccagagaggacagcagcaactggcggagtagaggccagggaacactggtcacagttagctctctcgaggacctgaagaacgtgttcccacctgaggtggccgtgttcgagcctagcgaggccgagatcagccacacccagaaagccaccctcgtgtgcctggctaccggcttctaccccgaccatgtggaactgtcttggtgggtcaacggcaaagaggtgcacagcggcgtgtgtaccgacccccagccactgaaagaacagcccgccctgaacgacagccggtactgcctgagcagcagactgagagtgtccgccaccttctggcagaacccccggaaccacttcagatgccaggtgcagttctacggcctgagcgagaacgacgagtggacccaggacagagccaagcccgtgacccagatcgtgtctgccgaagcctggggcagagccgattgcggctttaccagcgagagctaccagcagggcgtgctgagcgccaccaacctgagcgtgatcggcttcagaatcctgctgctgaaagtggccggctttaacctgctgatgaccctgcggctgtggtccagcagggccaagcgatctggatctggagcaacaaacttctcactactcaaacaagcaggtgacgtggaggagaatcccgggcctactagtatggactggatttggcgcatccttttccttgtcggcgctgctaccggcgcgcattccttccaggtgcagctggttgaatctggcggaggactggttcagcctggcggatctctgagactgtcttgtgccgccagcggcttcaccttcaccaatcacgccatgagctgggtccgacaggcccctggaaaaggactggaactggtgtctagcatcagcggcaacggcagaaccacctactacgccgatagcgtgaagggcagattcaccatcagccgggacatcagcaagaacaccctggacctccagatgaacagcctgagagccgaggataccgccgtgtactactgtgccaaggatggcggagagacactggtggatagcagaggccagggcacactggtcacagtgtcatctacgcgtatccagaaccctgatcctgccgtgtaccagctgcgggatagcaagagcagcgacaagagcgtgtgtctgttcaccgacttcgacagccagaccaacgtgtcccagagcaaggactccgacgtgtacatcaccgataagtgcgtgctggacatgcggagcatggacttcaagagcaactccgccgtggcctggtccaacaagtccgatttcgcctgcgccaacgccttcaacaacagcattatccccgaggacacattcttcccaagccccgagagcagctgcgacgtgaagctggtggaaaagagcttcgagacagacaccaacctgaacttccagatcctgtacgagatcctgctgggcaaggccaccctgtacgccgtgctggtgtctgccctggtgctgatggctatggtcaagcggaaggacagccgggga

SEQ ID NO: 5978 - DNA, 1896 bp, synthetic construct
  source 1..1896: mol_type = other DNA
atggccttaccagtgaccgccttgctcctgccgctggccttgctgctccacgccgccaggccgcagctccagctgcaagagtctggacctggcctggtcaagcctagcgagacactgagcctgacctgtaccgtgtccggcgatagcatcagcagcggcgattactactggggctggatcagacagcctcctggcaaaggactggaatggatcggccacatctactacagcggcgtgacctactacaaccccagcctgaagtccagagtgaccatcagcgtggacaccagccggaaccagttctccctgaagctgtctagcgtgacagccgccgataccgccgtgtactactgcaccagagaggacagcagcaactggcggagtagaggccagggaacactggtcacagttagctctctcgagatccagaaccctgatcctgccgtgtaccagctgcgggatagcaagagcagcgacaagagcgtgtgtctgttcaccgacttcgacagccagaccaacgtgtcccagagcaaggactccgacgtgtacatcaccgataagtgcgtgctggacatgcggagcatggacttcaagagcaactccgccgtggcctggtccaacaagtccgatttcgcctgcgccaacgccttcaacaacagcattatccccgaggacacattcttcccaagccccgagagcagctgcgacgtgaagctggtggaaaagagcttcgagacagacaccaacctgaacttccagatcctgtacgagatcctgctgggcaaggccaccctgtacgccgtgctggtgtctgccctggtgctgatggctatggtcaagcggaaggacagccggggacgcgccaagagaagcggatctggcgtgaagcagaccctgaatttcgacctgctgaagctggctggcgacgtggaatccaacccaggccctactagtatggactggatttggcgcatccttttccttgtcggcgctgctaccggcgcgcattccttccaggtgcagctggttgaatctggcggaggactggttcagcctggcggatctctgagactgtcttgtgccgccagcggcttcaccttcaccaatcacgccatgagctgggtccgacaggcccctggaaaaggactggaactggtgtctagcatcagcggcaacggcagaaccacctactacgccgatagcgtgaagggcagattcaccatcagccgggacatcagcaagaacaccctggacctccagatgaacagcctgagagccgaggataccgccgtgtactactgtgccaaggatggcggagagacactggtggatagcagaggccagggcacactggtcacagtgtcatctacgcgtgaggacctgaagaacgtgttcccacctgaggtggccgtgttcgagcctagcgaggccgagatcagccacacccagaaagccaccctcgtgtgcctggctaccggcttctaccccgaccatgtggaactgtcttggtgggtcaacggcaaagaggtgcacagcggcgtgtgtaccgacccccagccactgaaagaacagcccgccctgaacgacagccggtactgcctgagcagcagactgagagtgtccgccaccttctggcagaacccccggaaccacttcagatgccaggtgcagttctacggcctgagcgagaacgacgagtggacccaggacagagccaagcccgtgacccagatcgtgtctgccgaagcctggggcagagccgattgcggctttaccagcgagagctaccagcagggcgtgctgagcgccaccaacctgagcgtgatcggcttcagaatcctgctgctgaaagtggccggctttaacctgctgatgaccctgcggctgtggtccagc

SEQ ID NO: 5979 - DNA, 1881 bp, synthetic construct
  source 1..1881: mol_type = other DNA
atggccttaccagtgaccgccttgctcctgccgctggccttgctgctccacgccgccaggccggaagtgcagctgcttgaaagtggcggcggactgattcagcctggcggatctctgagactgagctgtgccgccagcggcttcaccttttctagccacgccatgacctgggtccgacaggcacctggaaaagggcttgaatgggtgtccgccatcagcggctctggcgattacacacactacgccgacagcgtgaagggcagattcaccatcagcagagacaacagcaagaacaccgtgtacctccagatgaacagcctgagagccgaggacagcgccgtgtattattgcgccaaggatgaggatggcggcagcctgcttggacacagaggacaaggcaccctggtcaccgtttcttccctcgaggacctgaagaacgtgttcccacctgaggtggccgtgttcgagcctagcgaggccgagatcagccacacccagaaagccaccctcgtgtgcctggctaccggcttctaccccgaccatgtggaactgtcttggtgggtcaacggcaaagaggtgcacagcggcgtgtgtaccgacccccagccactgaaagaacagcccgccctgaacgacagccggtactgcctgagcagcagactgagagtgtccgccaccttctggcagaacccccggaaccacttcagatgccaggtgcagttctacggcctgagcgagaacgacgagtggacccaggacagagccaagcccgtgacccagatcgtgtctgccgaagcctggggcagagccgattgcggctttaccagcgagagctaccagcagggcgtgctgagcgccaccaacctgagcgtgatcggcttcagaatcctgctgctgaaagtggccggctttaacctgctgatgaccctgcggctgtggtccagcagggccaagcgatctggatctggagcaacaaacttctcactactcaaacaagcaggtgacgtggaggagaatcccgggcctactagtatggactggatttggcgcatccttttccttgtcggcgctgctaccggcgcgcattccttcgaagtgcagctggttgaatctggcggaggactggttcagcctggcggatctctgagactgtcttgtgccgccagcggcttcagcttcagcgacttttggatgagctgggtccgacaggcccctggcaaaggacttgaatgggtcgccacaatcagccaggccggcagcgagaaggactacgtggactctgtgaagggcagattcaccatcagccgggacaacgccaagaagtccctgtacctccagatgaacagcctgagagccgaggacaccgccgtgtactattgtgcctctggcgtgtacagcttcgactacagaggccagggcaccctggtcacagtctcttctacgcgtatccagaaccctgatcctgccgtgtaccagctgcgggatagcaagagcagcgacaagagcgtgtgtctgttcaccgacttcgacagccagaccaacgtgtcccagagcaaggactccgacgtgtacatcaccgataagtgcgtgctggacatgcggagcatggacttcaagagcaactccgccgtggcctggtccaacaagtccgatttcgcctgcgccaacgccttcaacaacagcattatccccgaggacacattcttcccaagccccgagagcagctgcgacgtgaagctggtggaaaagagcttcgagacagacaccaacctgaacttccagatcctgtacgagatcctgctgggcaaggccaccctgtacgccgtgctggtgtctgccctggtgctgatggctatggtcaagcggaaggacagccgggga

SEQ ID NO: 5980 - DNA, 1893 bp, synthetic construct
  source 1..1893: mol_type = other DNA
atggccttaccagtgaccgccttgctcctgccgctggccttgctgctccacgccgccaggccggaagtgcagctgcttgaaagtggcggcggactgattcagcctggcggatctctgagactgagctgtgccgccagcggcttcaccttttctagccacgccatgacctgggtccgacaggcacctggaaaagggcttgaatgggtgtccgccatcagcggctctggcgattacacacactacgccgacagcgtgaagggcagattcaccatcagcagagacaacagcaagaacaccgtgtacctccagatgaacagcctgagagccgaggacagcgccgtgtattattgcgccaaggatgaggatggcggcagcctgcttggacacagaggacaaggcaccctggtcaccgtttcttccctcgagatccagaaccctgatcctgccgtgtaccagctgcgggatagcaagagcagcgacaagagcgtgtgtctgttcaccgacttcgacagccagaccaacgtgtcccagagcaaggactccgacgtgtacatcaccgataagtgcgtgctggacatgcggagcatggacttcaagagcaactccgccgtggcctggtccaacaagtccgatttcgcctgcgccaacgccttcaacaacagcattatccccgaggacacattcttcccaagccccgagagcagctgcgacgtgaagctggtggaaaagagcttcgagacagacaccaacctgaacttccagatcctgtacgagatcctgctgggcaaggccaccctgtacgccgtgctggtgtctgccctggtgctgatggctatggtcaagcggaaggacagccggggacgcgccaagagaagcggatctggcgtgaagcagaccctgaatttcgacctgctgaagctggctggcgacgtggaatccaacccaggccctactagtatggactggatttggcgcatccttttccttgtcggcgctgctaccggcgcgcattccttcgaagtgcagctggttgaatctggcggaggactggttcagcctggcggatctctgagactgtcttgtgccgccagcggcttcagcttcagcgacttttggatgagctgggtccgacaggcccctggcaaaggacttgaatgggtcgccacaatcagccaggccggcagcgagaaggactacgtggactctgtgaagggcagattcaccatcagccgggacaacgccaagaagtccctgtacctccagatgaacagcctgagagccgaggacaccgccgtgtactattgtgcctctggcgtgtacagcttcgactacagaggccagggcaccctggtcacagtctcttctacgcgtgaggacctgaagaacgtgttcccacctgaggtggccgtgttcgagcctagcgaggccgagatcagccacacccagaaagccaccctcgtgtgcctggctaccggcttctaccccgaccatgtggaactgtcttggtgggtcaacggcaaagaggtgcacagcggcgtgtgtaccgacccccagccactgaaagaacagcccgccctgaacgacagccggtactgcctgagcagcagactgagagtgtccgccaccttctggcagaacccccggaaccacttcagatgccaggtgcagttctacggcctgagcgagaacgacgagtggacccaggacagagccaagcccgtgacccagatcgtgtctgccgaagcctggggcagagccgattgcggctttaccagcgagagctaccagcagggcgtgctgagcgccaccaacctgagcgtgatcggcttcagaatcctgctgctgaaagtggccggctttaacctgctgatgaccctgcggctgtggtccagc

SEQ ID NO: 5981 - DNA, 1899 bp, synthetic construct
  source 1..1899: mol_type = other DNA
atggccttaccagtgaccgccttgctcctgccgctggccttgctgctccacgccgccaggccgcaggtgcagctggttgaatctggcggaggactggttcagcctggcggatctctgagactgtcttgtgccgccagcggcttcaccttcaccaatcacgccatgagctgggtccgacaggcccctggaaaaggactggaactggtgtctagcatcagcggcaacggcagaaccacctactacgccgatagcgtgaagggcagattcaccatcagccgggacatcagcaagaacaccctggacctccagatgaacagcctgagagccgaggataccgccgtgtactactgtgccaaggatggcggagagacactggtggatagcagaggccagggcacactggtcacagtgtcatctctcgaggacctgaagaacgtgttcccacctgaggtggccgtgttcgagcctagcgaggccgagatcagccacacccagaaagccaccctcgtgtgcctggctaccggcttctaccccgaccatgtggaactgtcttggtgggtcaacggcaaagaggtgcacagcggcgtgtgtaccgacccccagccactgaaagaacagcccgccctgaacgacagccggtactgcctgagcagcagactgagagtgtccgccaccttctggcagaacccccggaaccacttcagatgccaggtgcagttctacggcctgagcgagaacgacgagtggacccaggacagagccaagcccgtgacccagatcgtgtctgccgaagcctggggcagagccgattgcggctttaccagcgagagctaccagcagggcgtgctgagcgccaccaacctgagcgtgatcggcttcagaatcctgctgctgaaagtggccggctttaacctgctgatgaccctgcggctgtggtccagcagggccaagcgatctggatctggagcaacaaacttctcactactcaaacaagcaggtgacgtggaggagaatcccgggcctactagtatggactggatttggcgcatccttttccttgtcggcgctgctaccggcgcgcattccttcgaagaagttcagctgcttgagtctggcggaggactggttcaacctggcggaagcctgagactgtcttgtgccgccagcggcttcatcttcagcagctacgccatgagctgggtccgacaggctcctggaaagggccaagaatgggtttccggcgttagcggcacaggcgtgaacacctactacgccgatagcgtgaagggcagattcaccatcagccgggacaacagcaagaacaccctgtacctccagatgaacagcctgagagccgaggacaccgccgtgtactattgtgcctctggcaaaggctgggacagcggctcttggtacgaggactatagaggccagggcaccctggtcacagtttcttcaacgcgtatccagaaccctgatcctgccgtgtaccagctgcgggatagcaagagcagcgacaagagcgtgtgtctgttcaccgacttcgacagccagaccaacgtgtcccagagcaaggactccgacgtgtacatcaccgataagtgcgtgctggacatgcggagcatggacttcaagagcaactccgccgtggcctggtccaacaagtccgatttcgcctgcgccaacgccttcaacaacagcattatccccgaggacacattcttcccaagccccgagagcagctgcgacgtgaagctggtggaaaagagcttcgagacagacaccaacctgaacttccagatcctgtacgagatcctgctgggcaaggccaccctgtacgccgtgctggtgtctgccctggtgctgatggctatggtcaagcggaaggacagccgggga

SEQ ID NO: 5982 - DNA, 1911 bp, synthetic construct
  source 1..1911: mol_type = other DNA
atggccttaccagtgaccgccttgctcctgccgctggccttgctgctccacgccgccaggccgcaggtgcagctggttgaatctggcggaggactggttcagcctggcggatctctgagactgtcttgtgccgccagcggcttcaccttcaccaatcacgccatgagctgggtccgacaggcccctggaaaaggactggaactggtgtctagcatcagcggcaacggcagaaccacctactacgccgatagcgtgaagggcagattcaccatcagccgggacatcagcaagaacaccctggacctccagatgaacagcctgagagccgaggataccgccgtgtactactgtgccaaggatggcggagagacactggtggatagcagaggccagggcacactggtcacagtgtcatctctcgagatccagaaccctgatcctgccgtgtaccagctgcgggatagcaagagcagcgacaagagcgtgtgtctgttcaccgacttcgacagccagaccaacgtgtcccagagcaaggactccgacgtgtacatcaccgataagtgcgtgctggacatgcggagcatggacttcaagagcaactccgccgtggcctggtccaacaagtccgatttcgcctgcgccaacgccttcaacaacagcattatccccgaggacacattcttcccaagccccgagagcagctgcgacgtgaagctggtggaaaagagcttcgagacagacaccaacctgaacttccagatcctgtacgagatcctgctgggcaaggccaccctgtacgccgtgctggtgtctgccctggtgctgatggctatggtcaagcggaaggacagccggggacgcgccaagagaagcggatctggcgtgaagcagaccctgaatttcgacctgctgaagctggctggcgacgtggaatccaacccaggccctactagtatggactggatttggcgcatccttttccttgtcggcgctgctaccggcgcgcattccttcgaagaagttcagctgcttgagtctggcggaggactggttcaacctggcggaagcctgagactgtcttgtgccgccagcggcttcatcttcagcagctacgccatgagctgggtccgacaggctcctggaaagggccaagaatgggtttccggcgttagcggcacaggcgtgaacacctactacgccgatagcgtgaagggcagattcaccatcagccgggacaacagcaagaacaccctgtacctccagatgaacagcctgagagccgaggacaccgccgtgtactattgtgcctctggcaaaggctgggacagcggctcttggtacgaggactatagaggccagggcaccctggtcacagtttcttcaacgcgtgaggacctgaagaacgtgttcccacctgaggtggccgtgttcgagcctagcgaggccgagatcagccacacccagaaagccaccctcgtgtgcctggctaccggcttctaccccgaccatgtggaactgtcttggtgggtcaacggcaaagaggtgcacagcggcgtgtgtaccgacccccagccactgaaagaacagcccgccctgaacgacagccggtactgcctgagcagcagactgagagtgtccgccaccttctggcagaacccccggaaccacttcagatgccaggtgcagttctacggcctgagcgagaacgacgagtggacccaggacagagccaagcccgtgacccagatcgtgtctgccgaagcctggggcagagccgattgcggctttaccagcgagagctaccagcagggcgtgctgagcgccaccaacctgagcgtgatcggcttcagaatcctgctgctgaaagtggccggctttaacctgctgatgaccctgcggctgtggtccagc

SEQ ID NO: 5983 - DNA, 1887 bp, synthetic construct
  source 1..1887: mol_type = other DNA
atggccttaccagtgaccgccttgctcctgccgctggccttgctgctccacgccgccaggccggaagtgcagctggttgaatctggcggaggactggttcaggctggcggatctctgagactgtcttgtgccgccagcggcagaacctttagcatgggctggtttagacaggcccctggcaaagagagagagttcgtcgccgccatcacatactctggcggcagcccttactacgccgactctgtgaagggcagattcaccatcagccgggacaacgccaagaacaccgtgtacctccagatgaacagcctgaagcctgaggacaccgccgtgtactactgcgccgccaatccaacatacggcagcgactggaacgccgagaattggggccagggaacccaagtgacagtgtctagcctcgaggacctgaagaacgtgttcccacctgaggtggccgtgttcgagcctagcgaggccgagatcagccacacccagaaagccaccctcgtgtgcctggctaccggcttctaccccgaccatgtggaactgtcttggtgggtcaacggcaaagaggtgcacagcggcgtgtgtaccgacccccagccactgaaagaacagcccgccctgaacgacagccggtactgcctgagcagcagactgagagtgtccgccaccttctggcagaacccccggaaccacttcagatgccaggtgcagttctacggcctgagcgagaacgacgagtggacccaggacagagccaagcccgtgacccagatcgtgtctgccgaagcctggggcagagccgattgcggctttaccagcgagagctaccagcagggcgtgctgagcgccaccaacctgagcgtgatcggcttcagaatcctgctgctgaaagtggccggctttaacctgctgatgaccctgcggctgtggtccagcagggccaagcgatctggatctggagcaacaaacttctcactactcaaacaagcaggtgacgtggaggagaatcccgggcctactagtatggactggatttggcgcatccttttccttgtcggcgctgctaccggcgcgcattccttcgaacaactgcaactgcaagagtctggccctggcctggtcaagccttctgaaaccctgagcctgacctgtaccgtgtccggcggctctatcagcagcggcgattactactggggctggatcagacagcctccaggcaagggactcgaatggatcggcagcatcagctacagcggctccacctactacaacccaagcctgaagtccagagtgaccatcagcgtggacaccagcagaaaccagttctccctgaagctgagcagcgtgacagccgccgatacagccgtgtattattgcaccagagaggacagcagcaactggcggagtagaggacagggcacactggtcacagtgtcctctacgcgtatccagaaccctgatcctgccgtgtaccagctgcgggatagcaagagcagcgacaagagcgtgtgtctgttcaccgacttcgacagccagaccaacgtgtcccagagcaaggactccgacgtgtacatcaccgataagtgcgtgctggacatgcggagcatggacttcaagagcaactccgccgtggcctggtccaacaagtccgatttcgcctgcgccaacgccttcaacaacagcattatccccgaggacacattcttcccaagccccgagagcagctgcgacgtgaagctggtggaaaagagcttcgagacagacaccaacctgaacttccagatcctgtacgagatcctgctgggcaaggccaccctgtacgccgtgctggtgtctgccctggtgctgatggctatggtcaagcggaaggacagccgggga

SEQ ID NO: 5984 - DNA, 1899 bp, synthetic construct
  source 1..1899: mol_type = other DNA
atggccttaccagtgaccgccttgctcctgccgctggccttgctgctccacgccgccaggccggaagtgcagctggttgaatctggcggaggactggttcaggctggcggatctctgagactgtcttgtgccgccagcggcagaacctttagcatgggctggtttagacaggcccctggcaaagagagagagttcgtcgccgccatcacatactctggcggcagcccttactacgccgactctgtgaagggcagattcaccatcagccgggacaacgccaagaacaccgtgtacctccagatgaacagcctgaagcctgaggacaccgccgtgtactactgcgccgccaatccaacatacggcagcgactggaacgccgagaattggggccagggaacccaagtgacagtgtctagcctcgagatccagaaccctgatcctgccgtgtaccagctgcgggatagcaagagcagcgacaagagcgtgtgtctgttcaccgacttcgacagccagaccaacgtgtcccagagcaaggactccgacgtgtacatcaccgataagtgcgtgctggacatgcggagcatggacttcaagagcaactccgccgtggcctggtccaacaagtccgatttcgcctgcgccaacgccttcaacaacagcattatccccgaggacacattcttcccaagccccgagagcagctgcgacgtgaagctggtggaaaagagcttcgagacagacaccaacctgaacttccagatcctgtacgagatcctgctgggcaaggccaccctgtacgccgtgctggtgtctgccctggtgctgatggctatggtcaagcggaaggacagccggggacgcgccaagagaagcggatctggcgtgaagcagaccctgaatttcgacctgctgaagctggctggcgacgtggaatccaacccaggccctactagtatggactggatttggcgcatccttttccttgtcggcgctgctaccggcgcgcattccttcgaacaactgcaactgcaagagtctggccctggcctggtcaagccttctgaaaccctgagcctgacctgtaccgtgtccggcggctctatcagcagcggcgattactactggggctggatcagacagcctccaggcaagggactcgaatggatcggcagcatcagctacagcggctccacctactacaacccaagcctgaagtccagagtgaccatcagcgtggacaccagcagaaaccagttctccctgaagctgagcagcgtgacagccgccgatacagccgtgtattattgcaccagagaggacagcagcaactggcggagtagaggacagggcacactggtcacagtgtcctctacgcgtgaggacctgaagaacgtgttcccacctgaggtggccgtgttcgagcctagcgaggccgagatcagccacacccagaaagccaccctcgtgtgcctggctaccggcttctaccccgaccatgtggaactgtcttggtgggtcaacggcaaagaggtgcacagcggcgtgtgtaccgacccccagccactgaaagaacagcccgccctgaacgacagccggtactgcctgagcagcagactgagagtgtccgccaccttctggcagaacccccggaaccacttcagatgccaggtgcagttctacggcctgagcgagaacgacgagtggacccaggacagagccaagcccgtgacccagatcgtgtctgccgaagcctggggcagagccgattgcggctttaccagcgagagctaccagcagggcgtgctgagcgccaccaacctgagcgtgatcggcttcagaatcctgctgctgaaagtggccggctttaacctgctgatgaccctgcggctgtggtccagc

SEQ ID NO: 5985 - DNA, 3396 bp, synthetic construct
  source 1..3396: mol_type = other DNA
atggccttaccagtgaccgccttgctcctgccgctggccttgctgctccacgccgccaggccggaagtgcagctggttgaatctggcggaggactggttcaggctggcggatctctgagactgtcttgtgccgccagcggcagaacctttagcatgggctggtttagacaggcccctggcaaagagagagagttcgtcgccgccatcacatactctggcggcagcccttactacgccgactctgtgaagggcagattcaccatcagccgggacaacgccaagaacaccgtgtacctccagatgaacagcctgaagcctgaggacaccgccgtgtactactgcgccgccaatccaacatacggcagcgactggaacgccgagaattggggccagggaacccaagtgacagtgtctagcggtaccggcggaggcggatctggcggcggaggtagcggtggcggaggatctgaattcgacatccagatgacacagagccctagcagcctgtctgccagcgtgggagacagagtgaccatcacatgcaaggccagcgaccacatcaacaactggctggcctggtatcagcagaagcctggacaggcccctaagctgctgatctacggcgctaccacactggaaacaggcgtgcccagcagattttctggcagcggctctggcaccgactacaccctgacaatatccagcctccagcctgaggacttcgccacctactactgtcagcagagctggaacaccccttggacattcggccagggcaccaagctggaaatcaagagactcgaggacctgaagaacgtgttcccacctgaggtggccgtgttcgagcctagcgaggccgagatcagccacacccagaaagccaccctcgtgtgcctggctaccggcttctaccccgaccatgtggaactgtcttggtgggtcaacggcaaagaggtgcacagcggcgtgtgtaccgacccccagccactgaaagaacagcccgccctgaacgacagccggtactgcctgagcagcagactgagagtgtccgccaccttctggcagaacccccggaaccacttcagatgccaggtgcagttctacggcctgagcgagaacgacgagtggacccaggacagagccaagcccgtgacccagatcgtgtctgccgaagcctggggcagagccgattgcggctttaccagcgagagctaccagcagggcgtgctgagcgccaccaacctgagcgtgatcggcttcagaatcctgctgctgaaagtggccggctttaacctgctgatgaccctgcggctgtggtccagcagggccaagcgatctggatctggagcaacaaacttctcactactcaaacaagcaggtgacgtggaggagaatcccgggcctactagtgccaccatggactggatttggcgcatccttttccttgtcggcgctgctaccggcgcccattccgggcccgaagtgcaactggttgaatccggtggcggcctggtgcaagcaggcggatctctcagacttagctgtgccgcctccggcagaaccttcacaatgggatggtttaggcaggctccagggaaagagagagagttcgtcgccgccatctctctgtctcccacactggcctactacgccgactctgtgaaaggccggttcaccatctccagagataatgccaagaacaccgtggtgctgcaaatgaactctctgaaacccgaggatacagccctgtactattgtgccgctgaccggaagtccgtgatgagcatcagacccgattactggggacagggcacacaagtcacagtgtcctctggatccggcggcggaggatctggcggaggcggatctgggggcggaggctctttcgaacaagttcagcttcaacagcctggcgctgagctggtcaaacctggcgcttctgtgaagatgagctgcaaagccagcggctacgccttcagcagctactggatcaactggatgaagcagaaacccggccagggactcgaatggatcggccaaatctatcccggcgacggcgacaccaactacaacggcaagttcaagggcagagccacactgaccgccgatacctctagcagcacagcctacatgcagctgagcagcctgaccagcgaagatagcgccgtgtacttctgtgcccggtccatcacaacagtcgtgggctgcgctatggactattggggccagggaacaagcgtgaccgtgtctagtacgcgtatccagaaccctgatcctgccgtgtaccagctgcgggatagcaagagcagcgacaagagcgtgtgtctgttcaccgacttcgacagccagaccaacgtgtcccagagcaaggactccgacgtgtacatcaccgataagtgcgtgctggacatgcggagcatggacttcaagagcaactccgccgtggcctggtccaacaagtccgatttcgcctgcgccaacgccttcaacaacagcattatccccgaggacacattcttcccaagccccgagagcagctgcgacgtgaagctggtggaaaagagcttcgagacagacaccaacctgaacttccagatcctgtacgagatcctgctgggcaaggccaccctgtacgccgtgctggtgtctgccctggtgctgatggctatggtcaagcggaaggacagccggggacgcgccaagagaagcggatctggcgtgaagcagaccctgaatttcgacctgctgaagctggctggcgacgtggaatccaacccaggcccttctagaggccatatgaccgagtacaagcccacggtgcgcctcgccacccgcgacgacgtccccagggccgtacgcaccctcgccgccgcgttcgccgactaccccgccacgcgccacaccgtcgatccggaccgccacatcgagcgggtcaccgagctgcaagaactcttcctcacgcgcgtcgggctcgacatcggcaaggtgtgggtcgcggacgacggcgccgcggtggcggtctggaccacgccggagagcgtcgaagcgggggcggtgttcgccgagatcggcccgcgcatggccgagttgagcggttcccggctggccgcgcagcaacagatggaaggcctcctggcgccgcaccggcccaaggagcccgcgtggttcctggccaccgtcggcgtctcgcccgaccaccagggcaagggtctgggcagcgccgtcgtgctccccggagtggaggcggccgagcgcgccggggtgcccgccttcctggagacctccgcgccccgcaacctccccttctacgagcggctcggcttcaccgtcaccgccgacgtcgaggtgcccgaaggaccgcgcacctggtgcatgacccgcaagcccggtgcctga

SEQ ID NO: 5986 - DNA, 2310 bp, synthetic construct
  source 1..2310: mol_type = other DNA
atggccttaccagtgaccgccttgctcctgccgctggccttgctgctccacgccgccaggccggaagtgcagctggttgaatctggcggaggactggttcagcctggcggatctctgagactgtcttgtgccgcctctggcttcgccagcgactactatatcatcggctggttcagacaggcccctggcaaagagagagagggcgtcagctgtatcagcagcagatacgccaacaccaactacgccgacagcgtgaagggcagattcaccatcagccgggacaacgccaagaacaccgtgtacctccagatgaacagcctgaagcctgaggacaccgccgtgtactactgtgccgccgacaccagaagatacacctgtcctgacattgccaccatgcaccggaacttcgattcttggggccagggcacactggtcaccgtttcttctggtaccggcggaggcggatctggcggcggaggtagcggtggcggaggatctgaattcgacatccagatgacacagagccctagcagcctgtctgccagcgtgggagacagagtgaccatcacatgcaaggccagcgaccacatcaacaactggctggcctggtatcagcagaagcctggacaggcccctaagctgctgatctacggcgctaccacactggaaacaggcgtgcccagcagattttctggcagcggctctggcaccgactacaccctgacaatatccagcctccagcctgaggacttcgccacctactactgtcagcagagctggaacaccccttggacattcggccagggcaccaagctggaaatcaagagactcgaggacctgaagaacgtgttcccacctgaggtggccgtgttcgagcctagcgaggccgagatcagccacacccagaaagccaccctcgtgtgcctggctaccggcttctaccccgaccatgtggaactgtcttggtgggtcaacggcaaagaggtgcacagcggcgtgtgtaccgacccccagccactgaaagaacagcccgccctgaacgacagccggtactgcctgagcagcagactgagagtgtccgccaccttctggcagaacccccggaaccacttcagatgccaggtgcagttctacggcctgagcgagaacgacgagtggacccaggacagagccaagcccgtgacccagatcgtgtctgccgaagcctggggcagagccgattgcggctttaccagcgagagctaccagcagggcgtgctgagcgccaccaacctgagcgtgatcggcttcagaatcctgctgctgaaagtggccggctttaacctgctgatgaccctgcggctgtggtccagcagggccaagcgatctggatctggagcaacaaacttctcactactcaaacaagcaggtgacgtggaggagaatcccgggcctactagtatggactggatttggcgcatccttttccttgtcggcgctgctaccggcgcgcattccttcgaacaagttcagcttcaacagcctggcgctgagctggtcaaacctggcgcttctgtgaagatgagctgcaaagccagcggctacgccttcagcagctactggatcaactggatgaagcagaaacccggccagggactcgaatggatcggccaaatctatcccggcgacggcgacaccaactacaacggcaagttcaagggcagagccacactgaccgccgatacctctagcagcacagcctacatgcagctgagcagcctgaccagcgaagatagcgccgtgtacttctgtgcccggtccatcacaacagtcgtgggctgcgctatggactattggggccagggaacaagcgtgaccgtgtctagtacgcgtatccagaaccctgatcctgccgtgtaccagctgcgggatagcaagagcagcgacaagagcgtgtgtctgttcaccgacttcgacagccagaccaacgtgtcccagagcaaggactccgacgtgtacatcaccgataagtgcgtgctggacatgcggagcatggacttcaagagcaactccgccgtggcctggtccaacaagtccgatttcgcctgcgccaacgccttcaacaacagcattatccccgaggacacattcttcccaagccccgagagcagctgcgacgtgaagctggtggaaaagagcttcgagacagacaccaacctgaacttccagatcctgtacgagatcctgctgggcaaggccaccctgtacgccgtgctggtgtctgccctggtgctgatggctatggtcaagcggaaggacagccggggataa

SEQ ID NO: 5987 - DNA, 2310 bp, synthetic construct
  source 1..2310: mol_type = other DNA
atggccttaccagtgaccgccttgctcctgccgctggccttgctgctccacgccgccaggccggaagtgcagctggttgaatctggcggaggactggttcagcctggcggatctctgagactgagctgtgaagccagcggcttcgccagcgacgattacatcatcggctggttcagacaggcccctggcaaagagagagagggcgtcagctgcatcagctctaagtacgccaacaccgtgtacaccgacagcgtgaagggcagattcagactgagcagaggcaccgccaagaataccgtgtacctccagatgagcgccctgaagcctgaggataccgccgtgtactactgcgctatggacagccgcagagtgacatgccctgagatcagcaccatgcaccggaacttcgattcttggggccagggcacactggtcacagtgtcatctggtaccggcggaggcggatctggcggcggaggtagcggtggcggaggatctgaattcgacatccagatgacacagagccctagcagcctgtctgccagcgtgggagacagagtgaccatcacatgcaaggccagcgaccacatcaacaactggctggcctggtatcagcagaagcctggacaggcccctaagctgctgatctacggcgctaccacactggaaacaggcgtgcccagcagattttctggcagcggctctggcaccgactacaccctgacaatatccagcctccagcctgaggacttcgccacctactactgtcagcagagctggaacaccccttggacattcggccagggcaccaagctggaaatcaagagactcgaggacctgaagaacgtgttcccacctgaggtggccgtgttcgagcctagcgaggccgagatcagccacacccagaaagccaccctcgtgtgcctggctaccggcttctaccccgaccatgtggaactgtcttggtgggtcaacggcaaagaggtgcacagcggcgtgtgtaccgacccccagccactgaaagaacagcccgccctgaacgacagccggtactgcctgagcagcagactgagagtgtccgccaccttctggcagaacccccggaaccacttcagatgccaggtgcagttctacggcctgagcgagaacgacgagtggacccaggacagagccaagcccgtgacccagatcgtgtctgccgaagcctggggcagagccgattgcggctttaccagcgagagctaccagcagggcgtgctgagcgccaccaacctgagcgtgatcggcttcagaatcctgctgctgaaagtggccggctttaacctgctgatgaccctgcggctgtggtccagcagggccaagcgatctggatctggagcaacaaacttctcactactcaaacaagcaggtgacgtggaggagaatcccgggcctactagtatggactggatttggcgcatccttttccttgtcggcgctgctaccggcgcgcattccttcgaacaagttcagcttcaacagcctggcgctgagctggtcaaacctggcgcttctgtgaagatgagctgcaaagccagcggctacgccttcagcagctactggatcaactggatgaagcagaaacccggccagggactcgaatggatcggccaaatctatcccggcgacggcgacaccaactacaacggcaagttcaagggcagagccacactgaccgccgatacctctagcagcacagcctacatgcagctgagcagcctgaccagcgaagatagcgccgtgtacttctgtgcccggtccatcacaacagtcgtgggctgcgctatggactattggggccagggaacaagcgtgaccgtgtctagtacgcgtatccagaaccctgatcctgccgtgtaccagctgcgggatagcaagagcagcgacaagagcgtgtgtctgttcaccgacttcgacagccagaccaacgtgtcccagagcaaggactccgacgtgtacatcaccgataagtgcgtgctggacatgcggagcatggacttcaagagcaactccgccgtggcctggtccaacaagtccgatttcgcctgcgccaacgccttcaacaacagcattatccccgaggacacattcttcccaagccccgagagcagctgcgacgtgaagctggtggaaaagagcttcgagacagacaccaacctgaacttccagatcctgtacgagatcctgctgggcaaggccaccctgtacgccgtgctggtgtctgccctggtgctgatggctatggtcaagcggaaggacagccggggataa

SEQ ID NO: 5988 - DNA, 2322 bp, synthetic construct
  source 1..2322: mol_type = other DNA
atggccttaccagtgaccgccttgctcctgccgctggccttgctgctccacgccgccaggccggaagtgcagctggttgaatctggcggaggactggttcagcctggcggatctctgagactgtcttgtgccgcctctggcttcgccagcgactactatatcatcggctggttcagacaggcccctggcaaagagagagagggcgtcagctgtatcagcagcagatacgccaacaccaactacgccgacagcgtgaagggcagattcaccatcagccgggacaacgccaagaacaccgtgtacctccagatgaacagcctgaagcctgaggacaccgccgtgtactactgtgccgccgacaccagaagatacacctgtcctgacattgccaccatgcaccggaacttcgattcttggggccagggcacactggtcaccgtttcttctggtaccggcggaggcggatctggcggcggaggtagcggtggcggaggatctgaattcgacatccagatgacacagagccctagcagcctgtctgccagcgtgggagacagagtgaccatcacatgcaaggccagcgaccacatcaacaactggctggcctggtatcagcagaagcctggacaggcccctaagctgctgatctacggcgctaccacactggaaacaggcgtgcccagcagattttctggcagcggctctggcaccgactacaccctgacaatatccagcctccagcctgaggacttcgccacctactactgtcagcagagctggaacaccccttggacattcggccagggcaccaagctggaaatcaagagactcgagatccagaaccctgatcctgccgtgtaccagctgcgggatagcaagagcagcgacaagagcgtgtgtctgttcaccgacttcgacagccagaccaacgtgtcccagagcaaggactccgacgtgtacatcaccgataagtgcgtgctggacatgcggagcatggacttcaagagcaactccgccgtggcctggtccaacaagtccgatttcgcctgcgccaacgccttcaacaacagcattatccccgaggacacattcttcccaagccccgagagcagctgcgacgtgaagctggtggaaaagagcttcgagacagacaccaacctgaacttccagatcctgtacgagatcctgctgggcaaggccaccctgtacgccgtgctggtgtctgccctggtgctgatggctatggtcaagcggaaggacagccggggacgcgccaagagaagcggatctggcgtgaagcagaccctgaatttcgacctgctgaagctggctggcgacgtggaatccaacccaggccctactagtatggactggatttggcgcatccttttccttgtcggcgctgctaccggcgcgcattccttcgaacaagttcagcttcaacagcctggcgctgagctggtcaaacctggcgcttctgtgaagatgagctgcaaagccagcggctacgccttcagcagctactggatcaactggatgaagcagaaacccggccagggactcgaatggatcggccaaatctatcccggcgacggcgacaccaactacaacggcaagttcaagggcagagccacactgaccgccgatacctctagcagcacagcctacatgcagctgagcagcctgaccagcgaagatagcgccgtgtacttctgtgcccggtccatcacaacagtcgtgggctgcgctatggactattggggccagggaacaagcgtgaccgtgtctagtacgcgtgaggacctgaagaacgtgttcccacctgaggtggccgtgttcgagcctagcgaggccgagatcagccacacccagaaagccaccctcgtgtgcctggctaccggcttctaccccgaccatgtggaactgtcttggtgggtcaacggcaaagaggtgcacagcggcgtgtgtaccgacccccagccactgaaagaacagcccgccctgaacgacagccggtactgcctgagcagcagactgagagtgtccgccaccttctggcagaacccccggaaccacttcagatgccaggtgcagttctacggcctgagcgagaacgacgagtggacccaggacagagccaagcccgtgacccagatcgtgtctgccgaagcctggggcagagccgattgcggctttaccagcgagagctaccagcagggcgtgctgagcgccaccaacctgagcgtgatcggcttcagaatcctgctgctgaaagtggccggctttaacctgctgatgaccctgcggctgtggtccagctaa

SEQ ID NO: 5989 - DNA, 2322 bp, synthetic construct
  source 1..2322: mol_type = other DNA
atggccttaccagtgaccgccttgctcctgccgctggccttgctgctccacgccgccaggccggaagtgcagctggttgaatctggcggaggactggttcagcctggcggatctctgagactgagctgtgaagccagcggcttcgccagcgacgattacatcatcggctggttcagacaggcccctggcaaagagagagagggcgtcagctgcatcagctctaagtacgccaacaccgtgtacaccgacagcgtgaagggcagattcagactgagcagaggcaccgccaagaataccgtgtacctccagatgagcgccctgaagcctgaggataccgccgtgtactactgcgctatggacagccgcagagtgacatgccctgagatcagcaccatgcaccggaacttcgattcttggggccagggcacactggtcacagtgtcatctggtaccggcggaggcggatctggcggcggaggtagcggtggcggaggatctgaattcgacatccagatgacacagagccctagcagcctgtctgccagcgtgggagacagagtgaccatcacatgcaaggccagcgaccacatcaacaactggctggcctggtatcagcagaagcctggacaggcccctaagctgctgatctacggcgctaccacactggaaacaggcgtgcccagcagattttctggcagcggctctggcaccgactacaccctgacaatatccagcctccagcctgaggacttcgccacctactactgtcagcagagctggaacaccccttggacattcggccagggcaccaagctggaaatcaagagactcgagatccagaaccctgatcctgccgtgtaccagctgcgggatagcaagagcagcgacaagagcgtgtgtctgttcaccgacttcgacagccagaccaacgtgtcccagagcaaggactccgacgtgtacatcaccgataagtgcgtgctggacatgcggagcatggacttcaagagcaactccgccgtggcctggtccaacaagtccgatttcgcctgcgccaacgccttcaacaacagcattatccccgaggacacattcttcccaagccccgagagcagctgcgacgtgaagctggtggaaaagagcttcgagacagacaccaacctgaacttccagatcctgtacgagatcctgctgggcaaggccaccctgtacgccgtgctggtgtctgccctggtgctgatggctatggtcaagcggaaggacagccggggacgcgccaagagaagcggatctggcgtgaagcagaccctgaatttcgacctgctgaagctggctggcgacgtggaatccaacccaggccctactagtatggactggatttggcgcatccttttccttgtcggcgctgctaccggcgcgcattccttcgaacaagttcagcttcaacagcctggcgctgagctggtcaaacctggcgcttctgtgaagatgagctgcaaagccagcggctacgccttcagcagctactggatcaactggatgaagcagaaacccggccagggactcgaatggatcggccaaatctatcccggcgacggcgacaccaactacaacggcaagttcaagggcagagccacactgaccgccgatacctctagcagcacagcctacatgcagctgagcagcctgaccagcgaagatagcgccgtgtacttctgtgcccggtccatcacaacagtcgtgggctgcgctatggactattggggccagggaacaagcgtgaccgtgtctagtacgcgtgaggacctgaagaacgtgttcccacctgaggtggccgtgttcgagcctagcgaggccgagatcagccacacccagaaagccaccctcgtgtgcctggctaccggcttctaccccgaccatgtggaactgtcttggtgggtcaacggcaaagaggtgcacagcggcgtgtgtaccgacccccagccactgaaagaacagcccgccctgaacgacagccggtactgcctgagcagcagactgagagtgtccgccaccttctggcagaacccccggaaccacttcagatgccaggtgcagttctacggcctgagcgagaacgacgagtggacccaggacagagccaagcccgtgacccagatcgtgtctgccgaagcctggggcagagccgattgcggctttaccagcgagagctaccagcagggcgtgctgagcgccaccaacctgagcgtgatcggcttcagaatcctgctgctgaaagtggccggctttaacctgctgatgaccctgcggctgtggtccagctaa

SEQ ID NO: 5990 - DNA, 2280 bp, synthetic construct; identical to SEQ ID NO: 4954
  source 1..2280: mol_type = other DNA

SEQ ID NO: 5991 - DNA, 2286 bp, synthetic construct
  source 1..2286: mol_type = other DNA
atggccttaccagtgaccgccttgctcctgccgctggccttgctgctccacgccgccaggccggacatccagatgacacagagccctagcagcctgtctgccagcgtgggagacagagtgaccatcacatgcaaggccagcgaccacatcaacaactggctggcctggtatcagcagaagcctggacaggcccctaagctgctgatctacggcgctaccacactggaaacaggcgtgcccagcagattttctggcagcggctctggcaccgactacaccctgacaatatccagcctccagcctgaggacttcgccacctactactgtcagcagagctggaacaccccttggacattcggccagggcaccaagctggaaatcaagagactcgaggacctgaagaacgtgttcccacctgaggtggccgtgttcgagcctagcgaggccgagatcagccacacccagaaagccaccctcgtgtgcctggctaccggcttctaccccgaccatgtggaactgtcttggtgggtcaacggcaaagaggtgcacagcggcgtgtgtaccgacccccagccactgaaagaacagcccgccctgaacgacagccggtactgcctgagcagcagactgagagtgtccgccaccttctggcagaacccccggaaccacttcagatgccaggtgcagttctacggcctgagcgagaacgacgagtggacccaggacagagccaagcccgtgacccagatcgtgtctgccgaagcctggggcagagccgattgcggctttaccagcgagagctaccagcagggcgtgctgagcgccaccaacctgagcgtgatcggcttcagaatcctgctgctgaaagtggccggctttaacctgctgatgaccctgcggctgtggtccagcagggccaagcgatctggatctggagcaacaaacttctcactactcaaacaagcaggtgacgtggaggagaatcccgggcctactagtgccaccatggactggatttggcgcatccttttccttgtcggcgctgctaccggcgcccattccgggcccgaagtgcagctggttgaatctggcggaggactggttcaggctggcggatctctgagactgtcttgtgccgccagcggcagaacctttagcatgggctggtttagacaggcccctggcaaagagagagagttcgtcgccgccatcacatactctggcggcagcccttactacgccgactctgtgaagggcagattcaccatcagccgggacaacgccaagaacaccgtgtacctccagatgaacagcctgaagcctgaggacaccgccgtgtactactgcgccgccaatccaacatacggcagcgactggaacgccgagaattggggccagggaacccaagtgacagtgtctagcggatccggcggcggaggatctggcggaggcggatctgggggcggaggctctttcgaacaagttcagcttcaacagcctggcgctgagctggtcaaacctggcgcttctgtgaagatgagctgcaaagccagcggctacgccttcagcagctactggatcaactggatgaagcagaaacccggccagggactcgaatggatcggccaaatctatcccggcgacggcgacaccaactacaacggcaagttcaagggcagagccacactgaccgccgatacctctagcagcacagcctacatgcagctgagcagcctgaccagcgaagatagcgccgtgtacttctgtgcccggtccatcacaacagtcgtgggctgcgctatggactattggggccagggaacaagcgtgaccgtgtctagtacgcgtatccagaaccctgatcctgccgtgtaccagctgcgggatagcaagagcagcgacaagagcgtgtgtctgttcaccgacttcgacagccagaccaacgtgtcccagagcaaggactccgacgtgtacatcaccgataagtgcgtgctggacatgcggagcatggacttcaagagcaactccgccgtggcctggtccaacaagtccgatttcgcctgcgccaacgccttcaacaacagcattatccccgaggacacattcttcccaagccccgagagcagctgcgacgtgaagctggtggaaaagagcttcgagacagacaccaacctgaacttccagatcctgtacgagatcctgctgggcaaggccaccctgtacgccgtgctggtgtctgccctggtgctgatggctatggtcaagcggaaggacagccggggataa

SEQ ID NO: 5992 - DNA, 2289 bp, synthetic construct
  source 1..2289: mol_type = other DNA
atggccttaccagtgaccgccttgctcctgccgctggccttgctgctccacgccgccaggccggacatccagatgacacagagccctagcagcctgtctgccagcgtgggagacagagtgaccatcacatgcaaggccagcgaccacatcaacaactggctggcctggtatcagcagaagcctggacaggcccctaagctgctgatctacggcgctaccacactggaaacaggcgtgcccagcagattttctggcagcggctctggcaccgactacaccctgacaatatccagcctccagcctgaggacttcgccacctactactgtcagcagagctggaacaccccttggacattcggccagggcaccaagctggaaatcaagagactcgaggacctgaagaacgtgttcccacctgaggtggccgtgttcgagcctagcgaggccgagatcagccacacccagaaagccaccctcgtgtgcctggctaccggcttctaccccgaccatgtggaactgtcttggtgggtcaacggcaaagaggtgcacagcggcgtgtgtaccgacccccagccactgaaagaacagcccgccctgaacgacagccggtactgcctgagcagcagactgagagtgtccgccaccttctggcagaacccccggaaccacttcagatgccaggtgcagttctacggcctgagcgagaacgacgagtggacccaggacagagccaagcccgtgacccagatcgtgtctgccgaagcctggggcagagccgattgcggctttaccagcgagagctaccagcagggcgtgctgagcgccaccaacctgagcgtgatcggcttcagaatcctgctgctgaaagtggccggctttaacctgctgatgaccctgcggctgtggtccagcagggccaagcgatctggatctggagcaacaaacttctcactactcaaacaagcaggtgacgtggaggagaatcccgggcctactagtgccaccatggactggatttggcgcatccttttccttgtcggcgctgctaccggcgcccattccgggcccgaagtgcaactggtggaatctgggggcggactggtgcagccaggcggaagtctgaggctgtcttgtgccgcctccggcagcatcttcggcttcaacgacatggcctggtatcggcaggctcccggaaaacagcgcgagctggtggctctgattagcagagtgggcgtgaccagcagcgccgactctgtgaagggcagattcacaatctccagagtgaacgccaaggatacagtgtacctccagatgaactctctgaaacctgaggatacagcagtgtactattgctacatggaccagcggctggacggcagcacactggcctactggggacagggaactcaagtgacagtgtctagcggatccggcggcggaggatctggcggaggcggatctgggggcggaggctctttcgaacaagttcagcttcaacagcctggcgctgagctggtcaaacctggcgcttctgtgaagatgagctgcaaagccagcggctacgccttcagcagctactggatcaactggatgaagcagaaacccggccagggactcgaatggatcggccaaatctatcccggcgacggcgacaccaactacaacggcaagttcaagggcagagccacactgaccgccgatacctctagcagcacagcctacatgcagctgagcagcctgaccagcgaagatagcgccgtgtacttctgtgcccggtccatcacaacagtcgtgggctgcgctatggactattggggccagggaacaagcgtgaccgtgtctagtacgcgtatccagaaccctgatcctgccgtgtaccagctgcgggatagcaagagcagcgacaagagcgtgtgtctgttcaccgacttcgacagccagaccaacgtgtcccagagcaaggactccgacgtgtacatcaccgataagtgcgtgctggacatgcggagcatggacttcaagagcaactccgccgtggcctggtccaacaagtccgatttcgcctgcgccaacgccttcaacaacagcattatccccgaggacacattcttcccaagccccgagagcagctgcgacgtgaagctggtggaaaagagcttcgagacagacaccaacctgaacttccagatcctgtacgagatcctgctgggcaaggccaccctgtacgccgtgctggtgtctgccctggtgctgatggctatggtcaagcggaaggacagccggggataa

SEQ ID NO: 5993 - DNA, 2277 bp, synthetic construct
  source 1..2277: mol_type = other DNA
atggccttaccagtgaccgccttgctcctgccgctggccttgctgctccacgccgccaggccggacatccagatgacacagagccctagcagcctgtctgccagcgtgggagacagagtgaccatcacatgcaaggccagcgaccacatcaacaactggctggcctggtatcagcagaagcctggacaggcccctaagctgctgatctacggcgctaccacactggaaacaggcgtgcccagcagattttctggcagcggctctggcaccgactacaccctgacaatatccagcctccagcctgaggacttcgccacctactactgtcagcagagctggaacaccccttggacattcggccagggcaccaagctggaaatcaagagactcgaggacctgaagaacgtgttcccacctgaggtggccgtgttcgagcctagcgaggccgagatcagccacacccagaaagccaccctcgtgtgcctggctaccggcttctaccccgaccatgtggaactgtcttggtgggtcaacggcaaagaggtgcacagcggcgtgtgtaccgacccccagccactgaaagaacagcccgccctgaacgacagccggtactgcctgagcagcagactgagagtgtccgccaccttctggcagaacccccggaaccacttcagatgccaggtgcagttctacggcctgagcgagaacgacgagtggacccaggacagagccaagcccgtgacccagatcgtgtctgccgaagcctggggcagagccgattgcggctttaccagcgagagctaccagcagggcgtgctgagcgccaccaacctgagcgtgatcggcttcagaatcctgctgctgaaagtggccggctttaacctgctgatgaccctgcggctgtggtccagcagggccaagcgatctggatctggagcaacaaacttctcactactcaaacaagcaggtgacgtggaggagaatcccgggcctactagtgccaccatggactggatttggcgcatccttttccttgtcggcgctgctaccggcgcccattccgggcccgaggtgcagctggttgaatctggcggaggactggttcaggctggcggatctctgagactgtcttgtgccgccagcggctctgtgttcagcggcaatgtgatgggctggtacagacaggcccctggcaaagaaagagagtgggttgccgccattgccagcggcggcagcatctactacagagactctgtgaagggcagattcaccatcagccgggacaacgccaagaacaccgtgtacctccagatgaacagcctgaagcctgaggacaccgccgtgtactactgcaactctcaccctcctacactgccctattggggcctgggaacccaagtgacagtgtcctctggatccggcggcggaggatctggcggaggcggatctgggggcggaggctctttcgaacaagttcagcttcaacagcctggcgctgagctggtcaaacctggcgcttctgtgaagatgagctgcaaagccagcggctacgccttcagcagctactggatcaactggatgaagcagaaacccggccagggactcgaatggatcggccaaatctatcccggcgacggcgacaccaactacaacggcaagttcaagggcagagccacactgaccgccgatacctctagcagcacagcctacatgcagctgagcagcctgaccagcgaagatagcgccgtgtacttctgtgcccggtccatcacaacagtcgtgggctgcgctatggactattggggccagggaacaagcgtgaccgtgtctagtacgcgtatccagaaccctgatcctgccgtgtaccagctgcgggatagcaagagcagcgacaagagcgtgtgtctgttcaccgacttcgacagccagaccaacgtgtcccagagcaaggactccgacgtgtacatcaccgataagtgcgtgctggacatgcggagcatggacttcaagagcaactccgccgtggcctggtccaacaagtccgatttcgcctgcgccaacgccttcaacaacagcattatccccgaggacacattcttcccaagccccgagagcagctgcgacgtgaagctggtggaaaagagcttcgagacagacaccaacctgaacttccagatcctgtacgagatcctgctgggcaaggccaccctgtacgccgtgctggtgtctgccctggtgctgatggctatggtcaagcggaaggacagccggggataa

SEQ ID NO: 5994 - DNA, 2271 bp, synthetic construct
  source 1..2271: mol_type = other DNA
atggccttaccagtgaccgccttgctcctgccgctggccttgctgctccacgccgccaggccggacatccagatgacacagagccctagcagcctgtctgccagcgtgggagacagagtgaccatcacatgcaaggccagcgaccacatcaacaactggctggcctggtatcagcagaagcctggacaggcccctaagctgctgatctacggcgctaccacactggaaacaggcgtgcccagcagattttctggcagcggctctggcaccgactacaccctgacaatatccagcctccagcctgaggacttcgccacctactactgtcagcagagctggaacaccccttggacattcggccagggcaccaagctggaaatcaagagactcgaggacctgaagaacgtgttcccacctgaggtggccgtgttcgagcctagcgaggccgagatcagccacacccagaaagccaccctcgtgtgcctggctaccggcttctaccccgaccatgtggaactgtcttggtgggtcaacggcaaagaggtgcacagcggcgtgtgtaccgacccccagccactgaaagaacagcccgccctgaacgacagccggtactgcctgagcagcagactgagagtgtccgccaccttctggcagaacccccggaaccacttcagatgccaggtgcagttctacggcctgagcgagaacgacgagtggacccaggacagagccaagcccgtgacccagatcgtgtctgccgaagcctggggcagagccgattgcggctttaccagcgagagctaccagcagggcgtgctgagcgccaccaacctgagcgtgatcggcttcagaatcctgctgctgaaagtggccggctttaacctgctgatgaccctgcggctgtggtccagcagggccaagcgatctggatctggagcaacaaacttctcactactcaaacaagcaggtgacgtggaggagaatcccgggcctactagtgccaccatggactggatttggcgcatccttttccttgtcggcgctgctaccggcgcccattccgggcccgaagttcagctgctggaatctggcggaggactcgttcaacctggcggctctctgagactgagctgtgccgcttctggcttcagcttctctagctacgccctgagctgggttcgacaagctcccggaaagggccttgaatgggtgtccagcatcggcgagaatgacggcaccacagactatgccgatgccgtgaaaggccggtttaccatcagcagagacaattccaagaacacgctctatctgcaaatgaactccctgcgcgtggaagatacagccgtgtattattgcgtgaaggacggcatccactggggacagggaaccctggttacagtgtctagcggatccggcggcggaggatctggcggaggcggatctgggggcggaggctctttcgaacaagttcagcttcaacagcctggcgctgagctggtcaaacctggcgcttctgtgaagatgagctgcaaagccagcggctacgccttcagcagctactggatcaactggatgaagcagaaacccggccagggactcgaatggatcggccaaatctatcccggcgacggcgacaccaactacaacggcaagttcaagggcagagccacactgaccgccgatacctctagcagcacagcctacatgcagctgagcagcctgaccagcgaagatagcgccgtgtacttctgtgcccggtccatcacaacagtcgtgggctgcgctatggactattggggccagggaacaagcgtgaccgtgtctagtacgcgtatccagaaccctgatcctgccgtgtaccagctgcgggatagcaagagcagcgacaagagcgtgtgtctgttcaccgacttcgacagccagaccaacgtgtcccagagcaaggactccgacgtgtacatcaccgataagtgcgtgctggacatgcggagcatggacttcaagagcaactccgccgtggcctggtccaacaagtccgatttcgcctgcgccaacgccttcaacaacagcattatccccgaggacacattcttcccaagccccgagagcagctgcgacgtgaagctggtggaaaagagcttcgagacagacaccaacctgaacttccagatcctgtacgagatcctgctgggcaaggccaccctgtacgccgtgctggtgtctgccctggtgctgatggctatggtcaagcggaaggacagccggggataa

SEQ ID NO: 5995 - DNA, 3378 bp, synthetic construct
  source 1..3378: mol_type = other DNA
atgggacccagactgctgttttgggctctgctgtgtctgctcggcacaggacctgttgaagctggcgtgacacagagccccacacacctgattaagaccagaggccagcaggccacactgagatgcagccctatcagcggccacaccagcgtgtactggtatcagcaggctctcggactgggcctccagttcctgctttggtacgacgagggcgaagagagaaaccggggcaacttccctcctcggttttccggcagacagttccccaactacagcagcgagctgaacgtgaacgccctggaactggaagatagcgccctgtacctgtgtgcctcttctcttggtggacctcgcggactggctggactgagaggggatgagcagtttttcggccctggcaccagactgaccgtgctggaaggtaccggcggaggcggatctggcggcggagaattcgacatccagatgacacagagccctagcagcctgtctgccagcgtgggagacagagtgaccatcacatgcaaggccagcgaccacatcaacaactggctggcctggtatcagcagaagcctggacaggcccctaagctgctgatctacggcgctaccacactggaaacaggcgtgcccagcagattttctggcagcggctctggcaccgactacaccctgacaatatccagcctccagcctgaggacttcgccacctactactgtcagcagagctggaacaccccttggacattcggccagggcaccaagctggaaatcaagagactcgaggacctgaagaacgtgttcccacctgaggtggccgtgttcgagcctagcgaggccgagatcagccacacccagaaagccaccctcgtgtgcctggctaccggcttctaccccgaccatgtggaactgtcttggtgggtcaacggcaaagaggtgcacagcggcgtgtgtaccgacccccagccactgaaagaacagcccgccctgaacgacagccggtactgcctgagcagcagactgagagtgtccgccaccttctggcagaacccccggaaccacttcagatgccaggtgcagttctacggcctgagcgagaacgacgagtggacccaggacagagccaagcccgtgacccagatcgtgtctgccgaagcctggggcagagccgattgcggctttaccagcgagagctaccagcagggcgtgctgagcgccaccaacctgagcgtgatcggcttcagaatcctgctgctgaaagtggccggctttaacctgctgatgaccctgcggctgtggtccagcagggccaagcgatctggatctggagcaacaaacttctcactactcaaacaagcaggtgacgtggaggagaatcccgggcctactagtgccaccatggactggatttggcgcatccttttccttgtcggcgctgctaccggcgcccattccgggcccgaagtgcagctggttgaatctggcggaggactggttcaggctggcggatctctgagactgtcttgtgccgccagcggcagaacctttagcatgggctggtttagacaggcccctggcaaagagagagagttcgtcgccgccatcacatactctggcggcagcccttactacgccgactctgtgaagggcagattcaccatcagccgggacaacgccaagaacaccgtgtacctccagatgaacagcctgaagcctgaggacaccgccgtgtactactgcgccgccaatccaacatacggcagcgactggaacgccgagaattggggccagggaacccaagtgacagtgtctagcggatccggcggcggaggatctggcggaggcggatctgggggcggaggctctttcgaacaagttcagcttcaacagcctggcgctgagctggtcaaacctggcgcttctgtgaagatgagctgcaaagccagcggctacgccttcagcagctactggatcaactggatgaagcagaaacccggccagggactcgaatggatcggccaaatctatcccggcgacggcgacaccaactacaacggcaagttcaagggcagagccacactgaccgccgatacctctagcagcacagcctacatgcagctgagcagcctgaccagcgaagatagcgccgtgtacttctgtgcccggtccatcacaacagtcgtgggctgcgctatggactattggggccagggaacaagcgtgaccgtgtctagtacgcgtatccagaaccctgatcctgccgtgtaccagctgcgggatagcaagagcagcgacaagagcgtgtgtctgttcaccgacttcgacagccagaccaacgtgtcccagagcaaggactccgacgtgtacatcaccgataagtgcgtgctggacatgcggagcatggacttcaagagcaactccgccgtggcctggtccaacaagtccgatttcgcctgcgccaacgccttcaacaacagcattatccccgaggacacattcttcccaagccccgagagcagctgcgacgtgaagctggtggaaaagagcttcgagacagacaccaacctgaacttccagatcctgtacgagatcctgctgggcaaggccaccctgtacgccgtgctggtgtctgccctggtgctgatggctatggtcaagcggaaggacagccggggacgcgccaagagaagcggatctggcgtgaagcagaccctgaatttcgacctgctgaagctggctggcgacgtggaatccaacccaggcccttctagaggccatatgaccgagtacaagcccacggtgcgcctcgccacccgcgacgacgtccccagggccgtacgcaccctcgccgccgcgttcgccgactaccccgccacgcgccacaccgtcgatccggaccgccacatcgagcgggtcaccgagctgcaagaactcttcctcacgcgcgtcgggctcgacatcggcaaggtgtgggtcgcggacgacggcgccgcggtggcggtctggaccacgccggagagcgtcgaagcgggggcggtgttcgccgagatcggcccgcgcatggccgagttgagcggttcccggctggccgcgcagcaacagatggaaggcctcctggcgccgcaccggcccaaggagcccgcgtggttcctggccaccgtcggcgtctcgcccgaccaccagggcaagggtctgggcagcgccgtcgtgctccccggagtggaggcggccgagcgcgccggggtgcccgccttcctggagacctccgcgccccgcaacctccccttctacgagcggctcggcttcaccgtcaccgccgacgtcgaggtgcccgaaggaccgcgcacctggtgcatgacccgcaagcccggtgcctga

SEQ ID NO: 5996 - DNA, 3375 bp, synthetic construct
  source 1..3375: mol_type = other DNA
atgggacccagactgctgttttgggctctgctgtgtctgctcggcacaggacctgttgaagctggcgtgacacagagccccacacacctgattaagaccagaggccagcaggccacactgagatgcagccctatcagcggccacaccagcgtgtactggtatcagcaggctctcggactgggcctccagttcctgctttggtacgacgagggcgaagagagaaaccggggcaacttccctcctcggttttccggcagacagttccccaactacagcagcgagctgaacgtgaacgccctggaactggaagatagcgccctgtacctgtgtgccagctctctcggcggagatgaactgggagccgatggcaacgagcagttctttggccctggcaccagactgaccgtgctggaaggtaccggcggaggcggatctggcggcggaagcgaattcgacatccagatgacacagagccctagcagcctgtctgccagcgtgggagacagagtgaccatcacatgcaaggccagcgaccacatcaacaactggctggcctggtatcagcagaagcctggacaggcccctaagctgctgatctacggcgctaccacactggaaacaggcgtgcccagcagattttctggcagcggctctggcaccgactacaccctgacaatatccagcctccagcctgaggacttcgccacctactactgtcagcagagctggaacaccccttggacattcggccagggcaccaagctggaaatcaagagactcgaggacctgaagaacgtgttcccacctgaggtggccgtgttcgagcctagcgaggccgagatcagccacacccagaaagccaccctcgtgtgcctggctaccggcttctaccccgaccatgtggaactgtcttggtgggtcaacggcaaagaggtgcacagcggcgtgtgtaccgacccccagccactgaaagaacagcccgccctgaacgacagccggtactgcctgagcagcagactgagagtgtccgccaccttctggcagaacccccggaaccacttcagatgccaggtgcagttctacggcctgagcgagaacgacgagtggacccaggacagagccaagcccgtgacccagatcgtgtctgccgaagcctggggcagagccgattgcggctttaccagcgagagctaccagcagggcgtgctgagcgccaccaacctgagcgtgatcggcttcagaatcctgctgctgaaagtggccggctttaacctgctgatgaccctgcggctgtggtccagcagggccaagcgatctggatctggagcaacaaacttctcactactcaaacaagcaggtgacgtggaggagaatcccgggcctactagtgccaccatggactggatttggcgcatccttttccttgtcggcgctgctaccggcgcccattccgggcccgaagtgcagctggttgaatctggcggaggactggttcaggctggcggatctctgagactgtcttgtgccgccagcggcagaacctttagcatgggctggtttagacaggcccctggcaaagagagagagttcgtcgccgccatcacatactctggcggcagcccttactacgccgactctgtgaagggcagattcaccatcagccgggacaacgccaagaacaccgtgtacctccagatgaacagcctgaagcctgaggacaccgccgtgtactactgcgccgccaatccaacatacggcagcgactggaacgccgagaattggggccagggaacccaagtgacagtgtctagcggatccggcggcggaggatctggcggaggcggatctgggggcggaggctctttcgaacaagttcagcttcaacagcctggcgctgagctggtcaaacctggcgcttctgtgaagatgagctgcaaagccagcggctacgccttcagcagctactggatcaactggatgaagcagaaacccggccagggactcgaatggatcggccaaatctatcccggcgacggcgacaccaactacaacggcaagttcaagggcagagccacactgaccgccgatacctctagcagcacagcctacatgcagctgagcagcctgaccagcgaagatagcgccgtgtacttctgtgcccggtccatcacaacagtcgtgggctgcgctatggactattggggccagggaacaagcgtgaccgtgtctagtacgcgtatccagaaccctgatcctgccgtgtaccagctgcgggatagcaagagcagcgacaagagcgtgtgtctgttcaccgacttcgacagccagaccaacgtgtcccagagcaaggactccgacgtgtacatcaccgataagtgcgtgctggacatgcggagcatggacttcaagagcaactccgccgtggcctggtccaacaagtccgatttcgcctgcgccaacgccttcaacaacagcattatccccgaggacacattcttcccaagccccgagagcagctgcgacgtgaagctggtggaaaagagcttcgagacagacaccaacctgaacttccagatcctgtacgagatcctgctgggcaaggccaccctgtacgccgtgctggtgtctgccctggtgctgatggctatggtcaagcggaaggacagccggggacgcgccaagagaagcggatctggcgtgaagcagaccctgaatttcgacctgctgaagctggctggcgacgtggaatccaacccaggcccttctagaggccatatgaccgagtacaagcccacggtgcgcctcgccacccgcgacgacgtccccagggccgtacgcaccctcgccgccgcgttcgccgactaccccgccacgcgccacaccgtcgatccggaccgccacatcgagcgggtcaccgagctgcaagaactcttcctcacgcgcgtcgggctcgacatcggcaaggtgtgggtcgcggacgacggcgccgcggtggcggtctggaccacgccggagagcgtcgaagcgggggcggtgttcgccgagatcggcccgcgcatggccgagttgagcggttcccggctggccgcgcagcaacagatggaaggcctcctggcgccgcaccggcccaaggagcccgcgtggttcctggccaccgtcggcgtctcgcccgaccaccagggcaagggtctgggcagcgccgtcgtgctccccggagtggaggcggccgagcgcgccggggtgcccgccttcctggagacctccgcgccccgcaacctccccttctacgagcggctcggcttcaccgtcaccgccgacgtcgaggtgcccgaaggaccgcgcacctggtgcatgacccgcaagcccggtgcctga

SEQ ID NO: 5997 - DNA, 2700 bp, synthetic construct
  source 1..2700: mol_type = other DNA
atggccttaccagtgaccgccttgctcctgccgctggccttgctgctccacgccgccaggccggcatgcctgttcaatcaagaggtgcagatccctctgaccgagagctactgtggcccctgtcctaagaactggatctgctacaagaacaactgctaccagttcttcgacgagagcaagaattggtacgagagccaggccagctgcatgagccagaatgccagcctgctgaaggtgtacagcaaagaggaccaggacctgctgaaactggtcaagagcgcccactggatgggccttgtgcacatccccaccaatggctcttggcagtgggaggacggcagcattctgagccctaacctgctgaccatcatcgagatgcagaagggcgactgcgccctgtacgccagcagctttaagggctacatcgagaattgcagcaccccgaacacctacatctgtatgcagagaaccgttctcgaggacctgaagaacgtgttcccacctgaggtggccgtgttcgagcctagcgaggccgagatcagccacacccagaaagccaccctcgtgtgcctggctaccggcttctaccccgaccatgtggaactgtcttggtgggtcaacggcaaagaggtgcacagcggcgtgtgtaccgacccccagccactgaaagaacagcccgccctgaacgacagccggtactgcctgagcagcagactgagagtgtccgccaccttctggcagaacccccggaaccacttcagatgccaggtgcagttctacggcctgagcgagaacgacgagtggacccaggacagagccaagcccgtgacccagatcgtgtctgccgaagcctggggcagagccgattgcggctttaccagcgagagctaccagcagggcgtgctgagcgccaccaacctgagcgtgatcggcttcagaatcctgctgctgaaagtggccggctttaacctgctgatgaccctgcggctgtggtccagcagggccaagcgatctggatctggagcaacaaacttctcactactcaaacaagcaggtgacgtggaggagaatcccgggcctactagtatggactggatttggcgcatccttttccttgtcggcgctgctaccggcgcgcattccttcgaagacctctttaatcaagaagtccagattccactcaccgaatcctactgcggaccttgtccaaaaaattggatttgttataagaacaactgttatcaattctttgatgagtctaaaaattggtatgagtcccaggcttcctgcatgtctcagaacgcttctctgctgaaagtctactctaaagaagatcaggatctcctgaagctcgtcaagtctgcccattggatggggctcgtccacattcctaccaacggaagctggcaatgggaagatggctccatcctgtctccaaatctgctcacgattattgaaatgcagaaaggggattgtgctctctacgccagctccttcaagggatttattgagaactgtagcacgcccaatacttatatctgtatgcaacggaccgtgacgcgtatccagaaccctgatcctgccgtgtaccagctgcgggatagcaagagcagcgacaagagcgtgtgtctgttcaccgacttcgacagccagaccaacgtgtcccagagcaaggactccgacgtgtacatcaccgataagtgcgtgctggacatgcggagcatggacttcaagagcaactccgccgtggcctggtccaacaagtccgatttcgcctgcgccaacgccttcaacaacagcattatccccgaggacacattcttcccaagccccgagagcagctgcgacgtgaagctggtggaaaagagcttcgagacagacaccaacctgaacttccagatcctgtacgagatcctgctgggcaaggccaccctgtacgccgtgctggtgtctgccctggtgctgatggctatggtcaagcggaaggacagccggggacgcgccaagagaagcggatctggcgtgaagcagaccctgaatttcgacctgctgaagctggctggcgacgtggaatccaacccaggcccttctagaggccatatgaccgagtacaagcccacggtgcgcctcgccacccgcgacgacgtccccagggccgtacgcaccctcgccgccgcgttcgccgactaccccgccacgcgccacaccgtcgatccggaccgccacatcgagcgggtcaccgagctgcaagaactcttcctcacgcgcgtcgggctcgacatcggcaaggtgtgggtcgcggacgacggcgccgcggtggcggtctggaccacgccggagagcgtcgaagcgggggcggtgttcgccgagatcggcccgcgcatggccgagttgagcggttcccggctggccgcgcagcaacagatggaaggcctcctggcgccgcaccggcccaaggagcccgcgtggttcctggccaccgtcggcgtctcgcccgaccaccagggcaagggtctgggcagcgccgtcgtgctccccggagtggaggcggccgagcgcgccggggtgcccgccttcctggagacctccgcgccccgcaacctccccttctacgagcggctcggcttcaccgtcaccgccgacgtcgaggtgcccgaaggaccgcgcacctggtgcatgacccgcaagcccggtgcctga

SEQ ID NO: 5998 - DNA, 2850 bp, synthetic construct
  source 1..2850: mol_type = other DNA
atggccttaccagtgaccgccttgctcctgccgctggccttgctgctccacgccgccaggccggacatccagatgacacagagccctagcagcctgtctgccagcgtgggagacagagtgaccatcacatgcaaggccagcgaccacatcaacaactggctggcctggtatcagcagaagcctggacaggcccctaagctgctgatctacggcgctaccacactggaaacaggcgtgcccagcagattttctggcagcggctctggcaccgactacaccctgacaatatccagcctccagcctgaggacttcgccacctactactgtcagcagagctggaacaccccttggacattcggccagggcaccaagctggaaatcaagagactcgaggacctgaagaacgtgttcccacctgaggtggccgtgttcgagcctagcgaggccgagatcagccacacccagaaagccaccctcgtgtgcctggctaccggcttctaccccgaccatgtggaactgtcttggtgggtcaacggcaaagaggtgcacagcggcgtgtgtaccgacccccagccactgaaagaacagcccgccctgaacgacagccggtactgcctgagcagcagactgagagtgtccgccaccttctggcagaacccccggaaccacttcagatgccaggtgcagttctacggcctgagcgagaacgacgagtggacccaggacagagccaagcccgtgacccagatcgtgtctgccgaagcctggggcagagccgattgcggctttaccagcgagagctaccagcagggcgtgctgagcgccaccaacctgagcgtgatcggcttcagaatcctgctgctgaaagtggccggctttaacctgctgatgaccctgcggctgtggtccagcagggccaagcgatctggatctggagcaacaaacttctcactactcaaacaagcaggtgacgtggaggagaatcccgggcctactagtgccaccatggactggatttggcgcatccttttccttgtcggcgctgctaccggcgcccattccgggcccatgggaagctggcttgagttctaccacagactcaacgccattgacagcaggctgtgggcacttggcggaagcgaagctgaactcgccgcttttgaaaaagaaattgccgctttcgagtccgagcttcaggcttacaaaggcaaagggaatcctgaggtcgagagcctgagagatcacgctgcccacattagagagtggttgcaggcataccggcacaatggatccggcggcggaggatctggcggaggcggatctgggggcggaggctctttcgaacaagttcagcttcaacagcctggcgctgagctggtcaaacctggcgcttctgtgaagatgagctgcaaagccagcggctacgccttcagcagctactggatcaactggatgaagcagaaacccggccagggactcgaatggatcggccaaatctatcccggcgacggcgacaccaactacaacggcaagttcaagggcagagccacactgaccgccgatacctctagcagcacagcctacatgcagctgagcagcctgaccagcgaagatagcgccgtgtacttctgtgcccggtccatcacaacagtcgtgggctgcgctatggactattggggccagggaacaagcgtgaccgtgtctagtacgcgtatccagaaccctgatcctgccgtgtaccagctgcgggatagcaagagcagcgacaagagcgtgtgtctgttcaccgacttcgacagccagaccaacgtgtcccagagcaaggactccgacgtgtacatcaccgataagtgcgtgctggacatgcggagcatggacttcaagagcaactccgccgtggcctggtccaacaagtccgatttcgcctgcgccaacgccttcaacaacagcattatccccgaggacacattcttcccaagccccgagagcagctgcgacgtgaagctggtggaaaagagcttcgagacagacaccaacctgaacttccagatcctgtacgagatcctgctgggcaaggccaccctgtacgccgtgctggtgtctgccctggtgctgatggctatggtcaagcggaaggacagccggggacgcgccaagagaagcggatctggcgtgaagcagaccctgaatttcgacctgctgaagctggctggcgacgtggaatccaacccaggcccttctagaggccatatgaccgagtacaagcccacggtgcgcctcgccacccgcgacgacgtccccagggccgtacgcaccctcgccgccgcgttcgccgactaccccgccacgcgccacaccgtcgatccggaccgccacatcgagcgggtcaccgagctgcaagaactcttcctcacgcgcgtcgggctcgacatcggcaaggtgtgggtcgcggacgacggcgccgcggtggcggtctggaccacgccggagagcgtcgaagcgggggcggtgttcgccgagatcggcccgcgcatggccgagttgagcggttcccggctggccgcgcagcaacagatggaaggcctcctggcgccgcaccggcccaaggagcccgcgtggttcctggccaccgtcggcgtctcgcccgaccaccagggcaagggtctgggcagcgccgtcgtgctccccggagtggaggcggccgagcgcgccggggtgcccgccttcctggagacctccgcgccccgcaacctccccttctacgagcggctcggcttcaccgtcaccgccgacgtcgaggtgcccgaaggaccgcgcacctggtgcatgacccgcaagcccggtgcctga

SEQ ID NO: 5999 - DNA, 2850 bp, synthetic construct
  source 1..2850: mol_type = other DNA
atggccttaccagtgaccgccttgctcctgccgctggccttgctgctccacgccgccaggccggcatgcatgggcagttggttcgagttctacgaccggctgaatgccatcgacgccagactgtgggctctcggaggatctgaagctgagctggccgccttcgagaaagagatcgccgcctttgagagcgagctgcaagcctacaaaggcaagggcaaccccgaggtggaaaacctgagagtgcacgccgctgccatcagagaatggctccaggcttacagacacaacggtaccggcggaggcggatctggcggcggaggtagcggtggcggaggatctgaattcgacatccagatgacacagagccctagcagcctgtctgccagcgtgggagacagagtgaccatcacatgcaaggccagcgaccacatcaacaactggctggcctggtatcagcagaagcctggacaggcccctaagctgctgatctacggcgctaccacactggaaacaggcgtgcccagcagattttctggcagcggctctggcaccgactacaccctgacaatatccagcctccagcctgaggacttcgccacctactactgtcagcagagctggaacaccccttggacattcggccagggcaccaagctggaaatcaagagactcgaggacctgaagaacgtgttcccacctgaggtggccgtgttcgagcctagcgaggccgagatcagccacacccagaaagccaccctcgtgtgcctggctaccggcttctaccccgaccatgtggaactgtcttggtgggtcaacggcaaagaggtgcacagcggcgtgtgtaccgacccccagccactgaaagaacagcccgccctgaacgacagccggtactgcctgagcagcagactgagagtgtccgccaccttctggcagaacccccggaaccacttcagatgccaggtgcagttctacggcctgagcgagaacgacgagtggacccaggacagagccaagcccgtgacccagatcgtgtctgccgaagcctggggcagagccgattgcggctttaccagcgagagctaccagcagggcgtgctgagcgccaccaacctgagcgtgatcggcttcagaatcctgctgctgaaagtggccggctttaacctgctgatgaccctgcggctgtggtccagcagggccaagcgatctggatctggagcaacaaacttctcactactcaaacaagcaggtgacgtggaggagaatcccgggcctactagtatggactggatttggcgcatccttttccttgtcggcgctgctaccggcgcgcattccttcgaacaagttcagcttcaacagcctggcgctgagctggtcaaacctggcgcttctgtgaagatgagctgcaaagccagcggctacgccttcagcagctactggatcaactggatgaagcagaaacccggccagggactcgaatggatcggccaaatctatcccggcgacggcgacaccaactacaacggcaagttcaagggcagagccacactgaccgccgatacctctagcagcacagcctacatgcagctgagcagcctgaccagcgaagatagcgccgtgtacttctgtgcccggtccatcacaacagtcgtgggctgcgctatggactattggggccagggaacaagcgtgaccgtgtctagtacgcgtatccagaaccctgatcctgccgtgtaccagctgcgggatagcaagagcagcgacaagagcgtgtgtctgttcaccgacttcgacagccagaccaacgtgtcccagagcaaggactccgacgtgtacatcaccgataagtgcgtgctggacatgcggagcatggacttcaagagcaactccgccgtggcctggtccaacaagtccgatttcgcctgcgccaacgccttcaacaacagcattatccccgaggacacattcttcccaagccccgagagcagctgcgacgtgaagctggtggaaaagagcttcgagacagacaccaacctgaacttccagatcctgtacgagatcctgctgggcaaggccaccctgtacgccgtgctggtgtctgccctggtgctgatggctatggtcaagcggaaggacagccggggacgcgccaagagaagcggatctggcgtgaagcagaccctgaatttcgacctgctgaagctggctggcgacgtggaatccaacccaggcccttctagaggccatatgaccgagtacaagcccacggtgcgcctcgccacccgcgacgacgtccccagggccgtacgcaccctcgccgccgcgttcgccgactaccccgccacgcgccacaccgtcgatccggaccgccacatcgagcgggtcaccgagctgcaagaactcttcctcacgcgcgtcgggctcgacatcggcaaggtgtgggtcgcggacgacggcgccgcggtggcggtctggaccacgccggagagcgtcgaagcgggggcggtgttcgccgagatcggcccgcgcatggccgagttgagcggttcccggctggccgcgcagcaacagatggaaggcctcctggcgccgcaccggcccaaggagcccgcgtggttcctggccaccgtcggcgtctcgcccgaccaccagggcaagggtctgggcagcgccgtcgtgctccccggagtggaggcggccgagcgcgccggggtgcccgccttcctggagacctccgcgccccgcaacctccccttctacgagcggctcggcttcaccgtcaccgccgacgtcgaggtgcccgaaggaccgcgcacctggtgcatgacccgcaagcccggtgcctga

SEQ ID NO: 6000 - DNA, 3201 bp, synthetic construct
  source 1..3201: mol_type = other DNA
atggccttaccagtgaccgccttgctcctgccgctggccttgctgctccacgccgccaggccggcatgcatggaccccgacctggaaatcagagccgccttcctgcggcagagaaacacagccctgagaacagaggtggccgagctggaacaagaggtgcagcggctggaaaacgaggtgtcccagtacgagacaagatacggccctctcggaggcggaaaaggtaccggcggaggcggatctggcggcggaggtagcggtggcggaggatctgaattcgacatccagatgacacagagccctagcagcctgtctgccagcgtgggagacagagtgaccatcacatgcaaggccagcgaccacatcaacaactggctggcctggtatcagcagaagcctggacaggcccctaagctgctgatctacggcgctaccacactggaaacaggcgtgcccagcagattttctggcagcggctctggcaccgactacaccctgacaatatccagcctccagcctgaggacttcgccacctactactgtcagcagagctggaacaccccttggacattcggccagggcaccaagctggaaatcaagagactcgaggacctgaagaacgtgttcccacctgaggtggccgtgttcgagcctagcgaggccgagatcagccacacccagaaagccaccctcgtgtgcctggctaccggcttctaccccgaccatgtggaactgtcttggtgggtcaacggcaaagaggtgcacagcggcgtgtgtaccgacccccagccactgaaagaacagcccgccctgaacgacagccggtactgcctgagcagcagactgagagtgtccgccaccttctggcagaacccccggaaccacttcagatgccaggtgcagttctacggcctgagcgagaacgacgagtggacccaggacagagccaagcccgtgacccagatcgtgtctgccgaagcctggggcagagccgattgcggctttaccagcgagagctaccagcagggcgtgctgagcgccaccaacctgagcgtgatcggcttcagaatcctgctgctgaaagtggccggctttaacctgctgatgaccctgcggctgtggtccagcagggccaagcgatctggatctggagcaacaaacttctcactactcaaacaagcaggtgacgtggaggagaatcccgggcctactagtgccaccatggactggatttggcgcatccttttccttgtcggcgctgctaccggcgcccattccgggcccgaagtgcagctggttgaatctggcggaggactggttcaggctggcggatctctgagactgtcttgtgccgccagcggcagaacctttagcatgggctggtttagacaggcccctggcaaagagagagagttcgtcgccgccatcacatactctggcggcagcccttactacgccgactctgtgaagggcagattcaccatcagccgggacaacgccaagaacaccgtgtacctccagatgaacagcctgaagcctgaggacaccgccgtgtactactgcgccgccaatccaacatacggcagcgactggaacgccgagaattggggccagggaacccaagtgacagtgtctagcggatccggcggcggaggatctggcggaggcggatctgggggcggaggctctttcgaacaagttcagcttcaacagcctggcgctgagctggtcaaacctggcgcttctgtgaagatgagctgcaaagccagcggctacgccttcagcagctactggatcaactggatgaagcagaaacccggccagggactcgaatggatcggccaaatctatcccggcgacggcgacaccaactacaacggcaagttcaagggcagagccacactgaccgccgatacctctagcagcacagcctacatgcagctgagcagcctgaccagcgaagatagcgccgtgtacttctgtgcccggtccatcacaacagtcgtgggctgcgctatggactattggggccagggaacaagcgtgaccgtgtctagtacgcgtatccagaaccctgatcctgccgtgtaccagctgcgggatagcaagagcagcgacaagagcgtgtgtctgttcaccgacttcgacagccagaccaacgtgtcccagagcaaggactccgacgtgtacatcaccgataagtgcgtgctggacatgcggagcatggacttcaagagcaactccgccgtggcctggtccaacaagtccgatttcgcctgcgccaacgccttcaacaacagcattatccccgaggacacattcttcccaagccccgagagcagctgcgacgtgaagctggtggaaaagagcttcgagacagacaccaacctgaacttccagatcctgtacgagatcctgctgggcaaggccaccctgtacgccgtgctggtgtctgccctggtgctgatggctatggtcaagcggaaggacagccggggacgcgccaagagaagcggatctggcgtgaagcagaccctgaatttcgacctgctgaagctggctggcgacgtggaatccaacccaggcccttctagaggccatatgaccgagtacaagcccacggtgcgcctcgccacccgcgacgacgtccccagggccgtacgcaccctcgccgccgcgttcgccgactaccccgccacgcgccacaccgtcgatccggaccgccacatcgagcgggtcaccgagctgcaagaactcttcctcacgcgcgtcgggctcgacatcggcaaggtgtgggtcgcggacgacggcgccgcggtggcggtctggaccacgccggagagcgtcgaagcgggggcggtgttcgccgagatcggcccgcgcatggccgagttgagcggttcccggctggccgcgcagcaacagatggaaggcctcctggcgccgcaccggcccaaggagcccgcgtggttcctggccaccgtcggcgtctcgcccgaccaccagggcaagggtctgggcagcgccgtcgtgctccccggagtggaggcggccgagcgcgccggggtgcccgccttcctggagacctccgcgccccgcaacctccccttctacgagcggctcggcttcaccgtcaccgccgacgtcgaggtgcccgaaggaccgcgcacctggtgcatgacccgcaagcccggtgcctga

SEQ ID NO: 6001 - DNA, 2850 bp, synthetic construct
  source 1..2850: mol_type = other DNA
atggccttaccagtgaccgccttgctcctgccgctggccttgctgctccacgccgccaggccggacatccagatgacacagagccctagcagcctgtctgccagcgtgggagacagagtgaccatcacatgcaaggccagcgaccacatcaacaactggctggcctggtatcagcagaagcctggacaggcccctaagctgctgatctacggcgctaccacactggaaacaggcgtgcccagcagattttctggcagcggctctggcaccgactacaccctgacaatatccagcctccagcctgaggacttcgccacctactactgtcagcagagctggaacaccccttggacattcggccagggcaccaagctggaaatcaagagactcgaggacctgaagaacgtgttcccacctgaggtggccgtgttcgagcctagcgaggccgagatcagccacacccagaaagccaccctcgtgtgcctggctaccggcttctaccccgaccatgtggaactgtcttggtgggtcaacggcaaagaggtgcacagcggcgtgtgtaccgacccccagccactgaaagaacagcccgccctgaacgacagccggtactgcctgagcagcagactgagagtgtccgccaccttctggcagaacccccggaaccacttcagatgccaggtgcagttctacggcctgagcgagaacgacgagtggacccaggacagagccaagcccgtgacccagatcgtgtctgccgaagcctggggcagagccgattgcggctttaccagcgagagctaccagcagggcgtgctgagcgccaccaacctgagcgtgatcggcttcagaatcctgctgctgaaagtggccggctttaacctgctgatgaccctgcggctgtggtccagcagggccaagcgatctggatctggagcaacaaacttctcactactcaaacaagcaggtgacgtggaggagaatcccgggcctactagtgccaccatggactggatttggcgcatccttttccttgtcggcgctgctaccggcgcccattccgggcccatgggatcttggagcgagttttacgatcggctgcacgccattcaccaccggctgtatgctctcggaggaagcgaagctgagctggccgcttttgaaaaagaaattgccgctttcgagtccgagcttcaggcttacaaaggcaaagggaatcctgaggtcgaggccctgagagataccgccgccttcatcagaacccggttgcaggcataccggcacaacggatccggcggcggaggatctggcggaggcggatctgggggcggaggctctttcgaacaagttcagcttcaacagcctggcgctgagctggtcaaacctggcgcttctgtgaagatgagctgcaaagccagcggctacgccttcagcagctactggatcaactggatgaagcagaaacccggccagggactcgaatggatcggccaaatctatcccggcgacggcgacaccaactacaacggcaagttcaagggcagagccacactgaccgccgatacctctagcagcacagcctacatgcagctgagcagcctgaccagcgaagatagcgccgtgtacttctgtgcccggtccatcacaacagtcgtgggctgcgctatggactattggggccagggaacaagcgtgaccgtgtctagtacgcgtatccagaaccctgatcctgccgtgtaccagctgcgggatagcaagagcagcgacaagagcgtgtgtctgttcaccgacttcgacagccagaccaacgtgtcccagagcaaggactccgacgtgtacatcaccgataagtgcgtgctggacatgcggagcatggacttcaagagcaactccgccgtggcctggtccaacaagtccgatttcgcctgcgccaacgccttcaacaacagcattatccccgaggacacattcttcccaagccccgagagcagctgcgacgtgaagctggtggaaaagagcttcgagacagacaccaacctgaacttccagatcctgtacgagatcctgctgggcaaggccaccctgtacgccgtgctggtgtctgccctggtgctgatggctatggtcaagcggaaggacagccggggacgcgccaagagaagcggatctggcgtgaagcagaccctgaatttcgacctgctgaagctggctggcgacgtggaatccaacccaggcccttctagaggccatatgaccgagtacaagcccacggtgcgcctcgccacccgcgacgacgtccccagggccgtacgcaccctcgccgccgcgttcgccgactaccccgccacgcgccacaccgtcgatccggaccgccacatcgagcgggtcaccgagctgcaagaactcttcctcacgcgcgtcgggctcgacatcggcaaggtgtgggtcgcggacgacggcgccgcggtggcggtctggaccacgccggagagcgtcgaagcgggggcggtgttcgccgagatcggcccgcgcatggccgagttgagcggttcccggctggccgcgcagcaacagatggaaggcctcctggcgccgcaccggcccaaggagcccgcgtggttcctggccaccgtcggcgtctcgcccgaccaccagggcaagggtctgggcagcgccgtcgtgctccccggagtggaggcggccgagcgcgccggggtgcccgccttcctggagacctccgcgccccgcaacctccccttctacgagcggctcggcttcaccgtcaccgccgacgtcgaggtgcccgaaggaccgcgcacctggtgcatgacccgcaagcccggtgcctga

SEQ ID NO: 6002 - DNA, 3480 bp, synthetic construct
  source 1..3480: mol_type = other DNA
atggccttaccagtgaccgccttgctcctgccgctggccttgctgctccacgccgccaggccggacatccagatgacacagagccctagcagcctgtctgccagcgtgggagacagagtgaccatcacatgcaaggccagcgaccacatcaacaactggctggcctggtatcagcagaagcctggacaggcccctaagctgctgatctacggcgctaccacactggaaacaggcgtgcccagcagattttctggcagcggctctggcaccgactacaccctgacaatatccagcctccagcctgaggacttcgccacctactactgtcagcagagctggaacaccccttggacattcggccagggcaccaagctggaaatcaagagactcgaggacctgaagaacgtgttcccacctgaggtggccgtgttcgagcctagcgaggccgagatcagccacacccagaaagccaccctcgtgtgcctggctaccggcttctaccccgaccatgtggaactgtcttggtgggtcaacggcaaagaggtgcacagcggcgtgtgtaccgacccccagccactgaaagaacagcccgccctgaacgacagccggtactgcctgagcagcagactgagagtgtccgccaccttctggcagaacccccggaaccacttcagatgccaggtgcagttctacggcctgagcgagaacgacgagtggacccaggacagagccaagcccgtgacccagatcgtgtctgccgaagcctggggcagagccgattgcggctttaccagcgagagctaccagcagggcgtgctgagcgccaccaacctgagcgtgatcggcttcagaatcctgctgctgaaagtggccggctttaacctgctgatgaccctgcggctgtggtccagcagggccaagcgatctggatctggagcaacaaacttctcactactcaaacaagcaggtgacgtggaggagaatcccgggcctactagtaccatggactggatttggcgcatccttttccttgtcggcgctgctaccggcgcccattccctgttcaatcaagaggtgcagatccctctgaccgagagctactgtggcccctgtcctaagaactggatctgctacaagaacaactgctaccagttcttcgacgagagcaagaattggtacgagagccaggccagctgcatgagccagaatgccagcctgctgaaggtgtacagcaaagaggaccaggacctgctgaaactggtcaagagcgcccactggatgggccttgtgcacatccccaccaatggctcttggcagtgggaggacggcagcattctgagccctaacctgctgaccatcatcgagatgcagaagggcgactgcgccctgtacgccagcagctttaagggctacatcgagaattgcagcaccccgaacacctacatctgtatgcagagaaccgtttctggcggaggcggctctggaggaggcggaagtggcggcggaggcgacctctttaatcaagaagtccagattccactcaccgaatcctactgcggaccttgtccaaaaaattggatttgttataagaacaactgttatcaattctttgatgagtctaaaaattggtatgagtcccaggcttcctgcatgtctcagaacgcttctctgctgaaagtctactctaaagaagatcaggatctcctgaagctcgtcaagtctgcccattggatggggctcgtccacattcctaccaacggaagctggcaatgggaagatggctccatcctgtctccaaatctgctcacgattattgaaatgcagaaaggggattgtgctctctacgccagctccttcaagggatatattgagaactgtagcacgcccaatacttatatctgtatgcaacggaccgtgggatccggcggcggaggatctggcggaggcggatctgggggcggaggctctttcgaacaagttcagcttcaacagcctggcgctgagctggtcaaacctggcgcttctgtgaagatgagctgcaaagccagcggctacgccttcagcagctactggatcaactggatgaagcagaaacccggccagggactcgaatggatcggccaaatctatcccggcgacggcgacaccaactacaacggcaagttcaagggcagagccacactgaccgccgatacctctagcagcacagcctacatgcagctgagcagcctgaccagcgaagatagcgccgtgtacttctgtgcccggtccatcacaacagtcgtgggctgcgctatggactattggggccagggaacaagcgtgaccgtgtctagtacgcgtatccagaaccctgatcctgccgtgtaccagctgcgggatagcaagagcagcgacaagagcgtgtgtctgttcaccgacttcgacagccagaccaacgtgtcccagagcaaggactccgacgtgtacatcaccgataagtgcgtgctggacatgcggagcatggacttcaagagcaactccgccgtggcctggtccaacaagtccgatttcgcctgcgccaacgccttcaacaacagcattatccccgaggacacattcttcccaagccccgagagcagctgcgacgtgaagctggtggaaaagagcttcgagacagacaccaacctgaacttccagatcctgtacgagatcctgctgggcaaggccaccctgtacgccgtgctggtgtctgccctggtgctgatggctatggtcaagcggaaggacagccggggacgcgccaagagaagcggatctggcgtgaagcagaccctgaatttcgacctgctgaagctggctggcgacgtggaatccaacccaggcccttctagaggccatatgaccgagtacaagcccacggtgcgcctcgccacccgcgacgacgtccccagggccgtacgcaccctcgccgccgcgttcgccgactaccccgccacgcgccacaccgtcgatccggaccgccacatcgagcgggtcaccgagctgcaagaactcttcctcacgcgcgtcgggctcgacatcggcaaggtgtgggtcgcggacgacggcgccgcggtggcggtctggaccacgccggagagcgtcgaagcgggggcggtgttcgccgagatcggcccgcgcatggccgagttgagcggttcccggctggccgcgcagcaacagatggaaggcctcctggcgccgcaccggcccaaggagcccgcgtggttcctggccaccgtcggcgtctcgcccgaccaccagggcaagggtctgggcagcgccgtcgtgctccccggagtggaggcggccgagcgcgccggggtgcccgccttcctggagacctccgcgccccgcaacctccccttctacgagcggctcggcttcaccgtcaccgccgacgtcgaggtgcccgaaggaccgcgcacctggtgcatgacccgcaagcccggtgcctga

SEQ ID NO: 6003 - DNA, 2169 bp, synthetic construct
  source 1..2169: mol_type = other DNA
atggccttaccagtgaccgccttgctcctgccgctggccttgctgctccacgccgccaggccggacatccagatgacacagactacatcctccctgtctgcctctctgggagacagagtcaccatcagttgcagggcaagtcaggacattagtaagtacctgaactggtatcagcagaaaccagatggaactgttaaactcctgatctaccatacatcaagattacactcaggagtcccatcaaggttcagtggcagtgggtctggaacagattattctctcaccattagcaacctggagcaagaagatattgccacttacttttgccaacagggtaatacgcttccgtacacgttcggaggggggaccaagctggagatcacactcgaggacctgaagaacgtgttcccacctgaggtggccgtgttcgagcctagcgaggccgagatcagccacacccagaaagccaccctcgtgtgcctggctaccggcttctaccccgaccatgtggaactgtcttggtgggtcaacggcaaagaggtgcacagcggcgtgtgtaccgacccccagccactgaaagaacagcccgccctgaacgacagccggtactgcctgagcagcagactgagagtgtccgccaccttctggcagaacccccggaaccacttcagatgccaggtgcagttctacggcctgagcgagaacgacgagtggacccaggacagagccaagcccgtgacccagatcgtgtctgccgaagcctggggcagagccgatgatgtgattaagatccactggcaggaaaagaagtccaacaccatcctgggcagccaggaaggcaacaccatgaagaccaacgacacctacatgaagttcagctggctgaccgtgcccgagaagtccctggacaaagaacacagatgcatcgtgcggcacgaaaacaacaagaacggcgtggaccaggaaatcatcttcccacccatcaagaccgatgtgattacaatggaccccaaggacaactgctccaaggacgccaacgataccctgctgctccagctgaccaacaccagcgcctactacatgtacttgttgctgctgctgaagtccgtggtgtacttcgccatcatcacatgctgcctgctgatggctatggtcaagcggaaggacagccggggaagggccaagcgatctggatctggagcaacaaacttctcactactcaaacaagcaggtgacgtggaggagaatcccgggcctactagtatggactggatttggcgcatccttttccttgtcggcgctgctaccggcgcgcattccttcgaagtgaaactgcaggagtcaggacctggcctggtggcgccctcacagagcctgtccgtcacatgcactgtctcaggggtctcattacccgactatggtgtaagctggattcgccagcctccacgaaagggtctggagtggctgggagtaatatggggtagtgaaaccacatactataattcagctctcaaatccagactgaccatcatcaaggacaactccaagagccaagttttcttaaaaatgaacagtctgcaaactgatgacacagccatttactactgtgccaaacattattactacggtggtagctatgctatggactactggggccaaggaacctcagtcaccgtctcctcaacgcgtatccagaaccctgatcctgccgtgtaccagctgcgggatagcaagagcagcgacaagagcgtgtgtctgttcaccgacttcgacagccagaccaacgtgtcccagagcaaggactccgacgtgtacatcaccgataagtgcgtgctggacatgcggagcatggacttcaagagcaactccgccgtggcctggtccaacaagtccgatttcgcctgcgccaacgccttcaacaacagcattatccccgaggacacattcttcccaagccccgagagcagcgactccaccgaccacgtgaagcccaaagagacagagaacaccaagcagcccagcaagagctgccacaagcccaaggccatcgtgcacaccgagaaagtgaacatgatgagcctgaccgtgctgggcctgcggatgctgttcgccaaaaccgtggccgtgaacttcctgctgaccgccaagctgttcttcctcctcaccgcc

SEQ ID NO: 6004 - DNA, 2172 bp, synthetic construct
  source 1..2172: mol_type = other DNA
atggccttaccagtgaccgccttgctcctgccgctggccttgctgctccacgccgccaggccggagatcgtgatgacccagagccctgccaccctgtctctgagccctggcgaaagagccaccctgagctgtagagccagccaggacatcagcaagtacctgaactggtatcagcagaagcccggccaggcccccagactgctgatctaccacaccagcagactgcacagcggcatccccgccagattttctggctctggcagcggcaccgactacaccctgacaatcagcagcctccagcccgaggacttcgccgtgtacttctgtcagcaaggcaacaccctgccctacaccttcggccagggcaccaagctggaaatcaagctcgaggacctgaagaacgtgttcccacctgaggtggccgtgttcgagcctagcgaggccgagatcagccacacccagaaagccaccctcgtgtgcctggctaccggcttctaccccgaccatgtggaactgtcttggtgggtcaacggcaaagaggtgcacagcggcgtgtgtaccgacccccagccactgaaagaacagcccgccctgaacgacagccggtactgcctgagcagcagactgagagtgtccgccaccttctggcagaacccccggaaccacttcagatgccaggtgcagttctacggcctgagcgagaacgacgagtggacccaggacagagccaagcccgtgacccagatcgtgtctgccgaagcctggggcagagccgatgatgtgattaagatccactggcaggaaaagaagtccaacaccatcctgggcagccaggaaggcaacaccatgaagaccaacgacacctacatgaagttcagctggctgaccgtgcccgagaagtccctggacaaagaacacagatgcatcgtgcggcacgaaaacaacaagaacggcgtggaccaggaaatcatcttcccacccatcaagaccgatgtgattacaatggaccccaaggacaactgctccaaggacgccaacgataccctgctgctccagctgaccaacaccagcgcctactacatgtacttgttgctgctgctgaagtccgtggtgtacttcgccatcatcacatgctgcctgctgatggctatggtcaagcggaaggacagccggggaagggccaagcgatctggatctggagcaacaaacttctcactactcaaacaagcaggtgacgtggaggagaatcccgggcctactagtatggactggatttggcgcatccttttccttgtcggcgctgctaccggcgcgcattccttcgaacaggtgcaactccaggaatctggccctggcctcgtgaagcccagcgagacactgagcctgacctgtaccgtgtccggcgtgtccctgcctgactatggcgtgtcctggatcagacagccccctggcaagggcctggaatggatcggagtgatttggggcagcgaaaccacctactacaacagctccctgaagtccagagtgaccatctccaaggacaactccaagaaccaggtgtccctgaagctgagcagcgtgacagccgccgacaccgccgtgtattactgcgccaagcactactactacggcggcagctacgctatggactactggggccagggaaccctcgtgaccgtgtctagtacgcgtatccagaaccctgatcctgccgtgtaccagctgcgggatagcaagagcagcgacaagagcgtgtgtctgttcaccgacttcgacagccagaccaacgtgtcccagagcaaggactccgacgtgtacatcaccgataagtgcgtgctggacatgcggagcatggacttcaagagcaactccgccgtggcctggtccaacaagtccgatttcgcctgcgccaacgccttcaacaacagcattatccccgaggacacattcttcccaagccccgagagcagcgactccaccgaccacgtgaagcccaaagagacagagaacaccaagcagcccagcaagagctgccacaagcccaaggccatcgtgcacaccgagaaagtgaacatgatgagcctgaccgtgctgggcctgcggatgctgttcgccaaaaccgtggccgtgaacttcctgctgaccgccaagctgttcttcctcctcaccgcc

SEQ ID NO: 6005 - DNA, 2175 bp, synthetic construct
  source 1..2175: mol_type = other DNA
atggccttaccagtgaccgccttgctcctgccgctggccttgctgctccacgccgccaggccggacgagatcgtgctgacacagagccccgccaccctgtcactgtctccaggcgaaagagccaccctgagctgtagcgccagcagcagcgtgtcctacatgcactggtatcagcagaagcccggccaggcccccagactgctgatctacgataccagcaagctggcctccggcatccccgccagattttctggcagcggctccggcaccgacttcaccctgacaatcagcagcctggaacccgaggacgtggccgtgtactactgttttcaaggcagcgtgtaccccttcaccttcggccagggcaccaagctggaaatcaagagactcgaggacctgaagaacgtgttcccacctgaggtggccgtgttcgagcctagcgaggccgagatcagccacacccagaaagccaccctcgtgtgcctggctaccggcttctaccccgaccatgtggaactgtcttggtgggtcaacggcaaagaggtgcacagcggcgtgtgtaccgacccccagccactgaaagaacagcccgccctgaacgacagccggtactgcctgagcagcagactgagagtgtccgccaccttctggcagaacccccggaaccacttcagatgccaggtgcagttctacggcctgagcgagaacgacgagtggacccaggacagagccaagcccgtgacccagatcgtgtctgccgaagcctggggcagagccgatgatgtgattaagatccactggcaggaaaagaagtccaacaccatcctgggcagccaggaaggcaacaccatgaagaccaacgacacctacatgaagttcagctggctgaccgtgcccgagaagtccctggacaaagaacacagatgcatcgtgcggcacgaaaacaacaagaacggcgtggaccaggaaatcatcttcccacccatcaagaccgatgtgattacaatggaccccaaggacaactgctccaaggacgccaacgataccctgctgctccagctgaccaacaccagcgcctactacatgtacttgttgctgctgctgaagtccgtggtgtacttcgccatcatcacatgctgcctgctgatggctatggtcaagcggaaggacagccggggaagggccaagcgatctggatctggagcaacaaacttctcactactcaaacaagcaggtgacgtggaggagaatcccgggcctactagtatggactggatttggcgcatccttttccttgtcggcgctgctaccggcgcgcattccttcgaacaggtgcagctccaggaatctggccctggcctcgtgaagcctagccagaccctgagcctgacctgtaccgtgtctggcggcagcatcagcacaagcggcatgggcgtgggctggatcagacagcaccctggcaagggcctggaatggatcggccacatttggtgggacgacgacaagcggtacaaccccgccctgaagtccagagtgaccatcagcgtggacaccagcaagaaccagttcagcctgaagctgagcagcgtgacagccgccgataccgccgtgtattattgcgcccggatggaactgtggtcctactacttcgactactggggccagggaaccctcgtgaccgtgtctagtacgcgtatccagaaccctgatcctgccgtgtaccagctgcgggatagcaagagcagcgacaagagcgtgtgtctgttcaccgacttcgacagccagaccaacgtgtcccagagcaaggactccgacgtgtacatcaccgataagtgcgtgctggacatgcggagcatggacttcaagagcaactccgccgtggcctggtccaacaagtccgatttcgcctgcgccaacgccttcaacaacagcattatccccgaggacacattcttcccaagccccgagagcagcgactccaccgaccacgtgaagcccaaagagacagagaacaccaagcagcccagcaagagctgccacaagcccaaggccatcgtgcacaccgagaaagtgaacatgatgagcctgaccgtgctgggcctgcggatgctgttcgccaaaaccgtggccgtgaacttcctgctgaccgccaagctgttcttcctcctcaccgcc

SEQ ID NO: 6006 - DNA, 2169 bp, synthetic construct
  source 1..2169: mol_type = other DNA
atggccttaccagtgaccgccttgctcctgccgctggccttgctgctccacgccgccaggccggactacatccacgtgacacagagccctagcagcctgtccgtgtccatcggcgatagagtgaccatcaactgccagacctctcaaggcgtgggcagcgacctgcactggtatcagcacaaacctggcagagcccctaagctgctgatccaccatgccagctctgtggaagatggcgtgcccagcagattttccggcaccggatttcacaccagcttcaacctgacaatcaacgacctccaggccgacgacatcggcacctactactgtcaagtgctccagagcttcggcagaggcagcagactggatacaaaactcgaggacctgaagaacgtgttcccacctgaggtggccgtgttcgagcctagcgaggccgagatcagccacacccagaaagccaccctcgtgtgcctggctaccggcttctaccccgaccatgtggaactgtcttggtgggtcaacggcaaagaggtgcacagcggcgtgtgtaccgacccccagccactgaaagaacagcccgccctgaacgacagccggtactgcctgagcagcagactgagagtgtccgccaccttctggcagaacccccggaaccacttcagatgccaggtgcagttctacggcctgagcgagaacgacgagtggacccaggacagagccaagcccgtgacccagatcgtgtctgccgaagcctggggcagagccgatgatgtgattaagatccactggcaggaaaagaagtccaacaccatcctgggcagccaggaaggcaacaccatgaagaccaacgacacctacatgaagttcagctggctgaccgtgcccgagaagtccctggacaaagaacacagatgcatcgtgcggcacgaaaacaacaagaacggcgtggaccaggaaatcatcttcccacccatcaagaccgatgtgattacaatggaccccaaggacaactgctccaaggacgccaacgataccctgctgctccagctgaccaacaccagcgcctactacatgtacttgttgctgctgctgaagtccgtggtgtacttcgccatcatcacatgctgcctgctgatggctatggtcaagcggaaggacagccggggaagggccaagcgatctggatctggagcaacaaacttctcactactcaaacaagcaggtgacgtggaggagaatcccgggcctactagtatggactggatttggcgcatccttttccttgtcggcgctgctaccggcgcgcattccttcgaaagggcacacctggtgcagtctggcaccgccatgaagaaacctggcgcttccgtcagagtgtcctgtcagacaagcggctacaccttcacagcccacatcctgttctggttcagacaggccccaggcagaggactggaatgggtcggatggatcaagccccagtacggggccgtgaatttcggcggaggcttcagagacagagtgaccctgaccagggacgtgtaccgggaaatcgcctacatggacatccggggcctgaagcctgatgacaccgccgtgtactactgcgccagggatagaagctacggcgacagctcttgggctctcgatgcttggggacagggcacaacagtggtggtgtctgctacgcgtatccagaaccctgatcctgccgtgtaccagctgcgggatagcaagagcagcgacaagagcgtgtgtctgttcaccgacttcgacagccagaccaacgtgtcccagagcaaggactccgacgtgtacatcaccgataagtgcgtgctggacatgcggagcatggacttcaagagcaactccgccgtggcctggtccaacaagtccgatttcgcctgcgccaacgccttcaacaacagcattatccccgaggacacattcttcccaagccccgagagcagcgactccaccgaccacgtgaagcccaaagagacagagaacaccaagcagcccagcaagagctgccacaagcccaaggccatcgtgcacaccgagaaagtgaacatgatgagcctgaccgtgctgggcctgcggatgctgttcgccaaaaccgtggccgtgaacttcctgctgaccgccaagctgttcttcctcctcaccgcc

SEQ ID NO: 6007 - DNA, 2199 bp, synthetic construct
  source 1..2199: mol_type = other DNA
atggccttaccagtgaccgccttgctcctgccgctggccttgctgctccacgccgccaggccggacgtgcagatgatccagacccccgatagcctggccgtgtccctgggacagagagccaccatctcttgcagagccagcgagagcgtggacaactacggcatcagcttcatgcactggtatcagcagaagcccggccagagccccaagctgctgatctacagagcctccaacctggaaagcggcatccccgccagattttccggcagcggcagcagaaccgacttcaccctgaccatcaaccccgtggaaaccgacgacgtggcaacctactactgccagcagaacaacaaggacccccccacctttggcggaggcaccaagctggaaatcaagctcgaggacctgaagaacgtgttcccacctgaggtggccgtgttcgagcctagcgaggccgagatcagccacacccagaaagccaccctcgtgtgcctggctaccggcttctaccccgaccatgtggaactgtcttggtgggtcaacggcaaagaggtgcacagcggcgtgtgtaccgacccccagccactgaaagaacagcccgccctgaacgacagccggtactgcctgagcagcagactgagagtgtccgccaccttctggcagaacccccggaaccacttcagatgccaggtgcagttctacggcctgagcgagaacgacgagtggacccaggacagagccaagcccgtgacccagatcgtgtctgccgaagcctggggcagagccgatgatgtgattaagatccactggcaggaaaagaagtccaacaccatcctgggcagccaggaaggcaacaccatgaagaccaacgacacctacatgaagttcagctggctgaccgtgcccgagaagtccctggacaaagaacacagatgcatcgtgcggcacgaaaacaacaagaacggcgtggaccaggaaatcatcttcccacccatcaagaccgatgtgattacaatggaccccaaggacaactgctccaaggacgccaacgataccctgctgctccagctgaccaacaccagcgcctactacatgtacttgttgctgctgctgaagtccgtggtgtacttcgccatcatcacatgctgcctgctgatggctatggtcaagcggaaggacagccggggaagggccaagcgatctggatctggagcaacaaacttctcactactcaaacaagcaggtgacgtggaggagaatcccgggcctactagtatggactggatttggcgcatccttttccttgtcggcgctgctaccggcgcgcattccttcgaagggggaggcggctctcaggtgcaactccagcagtctggcgctgagcttgtgaagcctggggccagcgtgaagattagctgcaaggccagcggctacgccttcagcagctactggatgaactgggtcaagcagcggcctggcaagggcctggaatggatcggccaaatctaccccggcgacggcgacaccacctacaacggcaagttcaagggcaaggccaccctgacagccgacaagagcagcagcaccgtgtacatgcaactgaacagcctgaccagcgaggacagcgccgtgtacttctgcgtgcggtactactacggcagctccggctacttcgactattggggccagggcaccacactgaccgtgtcctctacgcgtatccagaaccctgatcctgccgtgtaccagctgcgggatagcaagagcagcgacaagagcgtgtgtctgttcaccgacttcgacagccagaccaacgtgtcccagagcaaggactccgacgtgtacatcaccgataagtgcgtgctggacatgcggagcatggacttcaagagcaactccgccgtggcctggtccaacaagtccgatttcgcctgcgccaacgccttcaacaacagcattatccccgaggacacattcttcccaagccccgagagcagcgactccaccgaccacgtgaagcccaaagagacagagaacaccaagcagcccagcaagagctgccacaagcccaaggccatcgtgcacaccgagaaagtgaacatgatgagcctgaccgtgctgggcctgcggatgctgttcgccaaaaccgtggccgtgaacttcctgctgaccgccaagctgttcttcctcctcaccgcc

SEQ ID NO: 6008 - DNA, 2172 bp, synthetic construct
  source 1..2172: mol_type = other DNA
atggccttaccagtgaccgccttgctcctgccgctggccttgctgctccacgccgccaggccggacgtgcagatgatccagacccccagcagcctgtctgccagcctgggcgatagagtgaccatcagctgtcgggccagccaggacatcggcaactacctgaactggtatcagcagaaacccgacggcaccgtgaagctgctgatctactacaccagcagactgcacagcggcgtgcccagcagattttctggcagcggctctggcaccgagtacagcctgaccatctccaacctggaacaggaagatattgctacctacttctgtcagcaaggcagcgccctgccccctacatttggcggcggaacaaagctggaaatcaacctcgaggacctgaagaacgtgttcccacctgaggtggccgtgttcgagcctagcgaggccgagatcagccacacccagaaagccaccctcgtgtgcctggctaccggcttctaccccgaccatgtggaactgtcttggtgggtcaacggcaaagaggtgcacagcggcgtgtgtaccgacccccagccactgaaagaacagcccgccctgaacgacagccggtactgcctgagcagcagactgagagtgtccgccaccttctggcagaacccccggaaccacttcagatgccaggtgcagttctacggcctgagcgagaacgacgagtggacccaggacagagccaagcccgtgacccagatcgtgtctgccgaagcctggggcagagccgatgatgtgattaagatccactggcaggaaaagaagtccaacaccatcctgggcagccaggaaggcaacaccatgaagaccaacgacacctacatgaagttcagctggctgaccgtgcccgagaagtccctggacaaagaacacagatgcatcgtgcggcacgaaaacaacaagaacggcgtggaccaggaaatcatcttcccacccatcaagaccgatgtgattacaatggaccccaaggacaactgctccaaggacgccaacgataccctgctgctccagctgaccaacaccagcgcctactacatgtacttgttgctgctgctgaagtccgtggtgtacttcgccatcatcacatgctgcctgctgatggctatggtcaagcggaaggacagccggggaagggccaagcgatctggatctggagcaacaaacttctcactactcaaacaagcaggtgacgtggaggagaatcccgggcctactagtatggactggatttggcgcatccttttccttgtcggcgctgctaccggcgcgcattccttcgaagctctccagctccagcagtctggcgcagaactcgtgcggcctggcgcttctgtgaccctgagctgtaaagccagcggctacaccttcaccgactacgagatgcactgggtcaagcagacccctgtgcacggcctggaatggatcggagccatcgaccctgagacaggcggcaccgcctacaaccagaagttcgagggcaaggccatcctgaccgccgacaagagcagcagcacagcctacatggaactgcggagcctgacctccgaggacagccccgtgtactactgtgccagacggcggtactacggcagcagctccttcgactattggggccagggcaccaccctgaccgtgtctagtacgcgtatccagaaccctgatcctgccgtgtaccagctgcgggatagcaagagcagcgacaagagcgtgtgtctgttcaccgacttcgacagccagaccaacgtgtcccagagcaaggactccgacgtgtacatcaccgataagtgcgtgctggacatgcggagcatggacttcaagagcaactccgccgtggcctggtccaacaagtccgatttcgcctgcgccaacgccttcaacaacagcattatccccgaggacacattcttcccaagccccgagagcagcgactccaccgaccacgtgaagcccaaagagacagagaacaccaagcagcccagcaagagctgccacaagcccaaggccatcgtgcacaccgagaaagtgaacatgatgagcctgaccgtgctgggcctgcggatgctgttcgccaaaaccgtggccgtgaacttcctgctgaccgccaagctgttcttcctcctcaccgcc

SEQ ID NO: 6009 - DNA, 2184 bp, synthetic construct
  source 1..2184: mol_type = other DNA
atggccttaccagtgaccgccttgctcctgccgctggccttgctgctccacgccgccaggccggacatcgtcctgacccagtccccagccagcctggcggtgtccctgggtcaacgagctaccatttcctgcagagcctctaagtccgtatccacttccggctatagttacctgcattggtaccaacagaaaccagggcagccacccaagctgctcatctatctggcctcaaacctggagtccggcgtgcccgccagattctccggaagtgggagcggcaccgactttacattgaacatccacccagtcgaagaggaagatgctgccacttattactgtcagcactccagggagctgccatttacatttggctctggcacaaaactggagatcaaactcgaggacctgaagaacgtgttcccacctgaggtggccgtgttcgagcctagcgaggccgagatcagccacacccagaaagccaccctcgtgtgcctggctaccggcttctaccccgaccatgtggaactgtcttggtgggtcaacggcaaagaggtgcacagcggcgtgtgtaccgacccccagccactgaaagaacagcccgccctgaacgacagccggtactgcctgagcagcagactgagagtgtccgccaccttctggcagaacccccggaaccacttcagatgccaggtgcagttctacggcctgagcgagaacgacgagtggacccaggacagagccaagcccgtgacccagatcgtgtctgccgaagcctggggcagagccgatgatgtgattaagatccactggcaggaaaagaagtccaacaccatcctgggcagccaggaaggcaacaccatgaagaccaacgacacctacatgaagttcagctggctgaccgtgcccgagaagtccctggacaaagaacacagatgcatcgtgcggcacgaaaacaacaagaacggcgtggaccaggaaatcatcttcccacccatcaagaccgatgtgattacaatggaccccaaggacaactgctccaaggacgccaacgataccctgctgctccagctgaccaacaccagcgcctactacatgtacttgttgctgctgctgaagtccgtggtgtacttcgccatcatcacatgctgcctgctgatggctatggtcaagcggaaggacagccggggaagggccaagcgatctggatctggagcaacaaacttctcactactcaaacaagcaggtgacgtggaggagaatcccgggcctactagtatggactggatttggcgcatccttttccttgtcggcgctgctaccggcgcgcattccttcgaacaggttcagctggtcgagtccgggggaggtctggtacagccgggtggcagcctcaagctgtcatgtgccgcatctggttttgactttagcaggtattggatgagctgggtccgccaggccccgggcaagggacttgagtggattggagaaataaaccctacttccagcacaatcaacttcacaccttctttgaaagataaggtttttatctctcgggataacgctaaaaacacactgtacttgcagatgtctaaggtgcgaagcgaagacaccgccctctattattgcgcccggggtaattactaccgctatggggatgcgatggactattgggggcaaggtacctccgtcacggtctcaacgcgtatccagaaccctgatcctgccgtgtaccagctgcgggatagcaagagcagcgacaagagcgtgtgtctgttcaccgacttcgacagccagaccaacgtgtcccagagcaaggactccgacgtgtacatcaccgataagtgcgtgctggacatgcggagcatggacttcaagagcaactccgccgtggcctggtccaacaagtccgatttcgcctgcgccaacgccttcaacaacagcattatccccgaggacacattcttcccaagccccgagagcagcgactccaccgaccacgtgaagcccaaagagacagagaacaccaagcagcccagcaagagctgccacaagcccaaggccatcgtgcacaccgagaaagtgaacatgatgagcctgaccgtgctgggcctgcggatgctgttcgccaaaaccgtggccgtgaacttcctgctgaccgccaagctgttcttcctcctcaccgcc

SEQ ID NO: 6010 - DNA, 2178 bp, synthetic construct
  source 1..2178: mol_type = other DNA
atggccttaccagtgaccgccttgctcctgccgctggccttgctgctccacgccgccaggccggacatccagatgacccagagccctagctcactgagcgccagcgtgggcgacagggtgaccattacctgctccgccagccaggacatcagcaactacctgaactggtaccagcagaagcccggcaaggcccccaagctgctgatctactacacctccaacctgcactccggcgtgcccagcaggttcagcggaagcggcagcggcaccgatttcaccctgaccatctccagcctgcagcccgaggacttcgccacctactactgccagcagtacaggaagctcccctggactttcggccagggcaccaaactggagatcaagcgtctcgaggacctgaagaacgtgttcccacctgaggtggccgtgttcgagcctagcgaggccgagatcagccacacccagaaagccaccctcgtgtgcctggctaccggcttctaccccgaccatgtggaactgtcttggtgggtcaacggcaaagaggtgcacagcggcgtgtgtaccgacccccagccactgaaagaacagcccgccctgaacgacagccggtactgcctgagcagcagactgagagtgtccgccaccttctggcagaacccccggaaccacttcagatgccaggtgcagttctacggcctgagcgagaacgacgagtggacccaggacagagccaagcccgtgacccagatcgtgtctgccgaagcctggggcagagccgatgatgtgattaagatccactggcaggaaaagaagtccaacaccatcctgggcagccaggaaggcaacaccatgaagaccaacgacacctacatgaagttcagctggctgaccgtgcccgagaagtccctggacaaagaacacagatgcatcgtgcggcacgaaaacaacaagaacggcgtggaccaggaaatcatcttcccacccatcaagaccgatgtgattacaatggaccccaaggacaactgctccaaggacgccaacgataccctgctgctccagctgaccaacaccagcgcctactacatgtacttgttgctgctgctgaagtccgtggtgtacttcgccatcatcacatgctgcctgctgatggctatggtcaagcggaaggacagccggggaagggccaagcgatctggatctggagcaacaaacttctcactactcaaacaagcaggtgacgtggaggagaatcccgggcctactagtatggactggatttggcgcatccttttccttgtcggcgctgctaccggcgcgcattccttcgaacaggtgcagctggtccagagcggcgccgaagtgaagaagcccggcagctccgtgaaagtgagctgcaaggccagcggcggcaccttcagcaactactggatgcactgggtgaggcaggcccccggacagggcctggagtggatgggcgccacctacaggggccacagcgacacctactacaaccagaagttcaagggccgggtgaccatcaccgccgacaagagcaccagcaccgcctacatggaactgagcagcctcaggagcgaggacaccgctgtgtattactgcgccaggggcgccatctacgacggctacgacgtgctggacaactggggccagggcacactggtgaccgtgtccagcacgcgtatccagaaccctgatcctgccgtgtaccagctgcgggatagcaagagcagcgacaagagcgtgtgtctgttcaccgacttcgacagccagaccaacgtgtcccagagcaaggactccgacgtgtacatcaccgataagtgcgtgctggacatgcggagcatggacttcaagagcaactccgccgtggcctggtccaacaagtccgatttcgcctgcgccaacgccttcaacaacagcattatccccgaggacacattcttcccaagccccgagagcagcgactccaccgaccacgtgaagcccaaagagacagagaacaccaagcagcccagcaagagctgccacaagcccaaggccatcgtgcacaccgagaaagtgaacatgatgagcctgaccgtgctgggcctgcggatgctgttcgccaaaaccgtggccgtgaacttcctgctgaccgccaagctgttcttcctcctcaccgcc

SEQ ID NO: 6011 - DNA, 2178 bp, synthetic construct
  source 1..2178: mol_type = other DNA
atggccttaccagtgaccgccttgctcctgccgctggccttgctgctccacgccgccaggccggacatcgtgctgacacagagccctgccaccctgtctctgagccctggcgatagagccaccatcagctgtagagccagcgagagcgtgaccatcctgggcagccacctgatctactggtatcagcagaagcccggccagccccccagactgctgattcagctggcctccaatgtgcagaccggcgtgccagccagattttccggcagcggcagcagaaccgacttcaccctgaccatcagcagcgtggaacccgaggacttcgccgtgtactactgcctccagagccggaccatccccagaacattcggccagggcaccaagctggaaatcaagagactcgaggacctgaagaacgtgttcccacctgaggtggccgtgttcgagcctagcgaggccgagatcagccacacccagaaagccaccctcgtgtgcctggctaccggcttctaccccgaccatgtggaactgtcttggtgggtcaacggcaaagaggtgcacagcggcgtgtgtaccgacccccagccactgaaagaacagcccgccctgaacgacagccggtactgcctgagcagcagactgagagtgtccgccaccttctggcagaacccccggaaccacttcagatgccaggtgcagttctacggcctgagcgagaacgacgagtggacccaggacagagccaagcccgtgacccagatcgtgtctgccgaagcctggggcagagccgatgatgtgattaagatccactggcaggaaaagaagtccaacaccatcctgggcagccaggaaggcaacaccatgaagaccaacgacacctacatgaagttcagctggctgaccgtgcccgagaagtccctggacaaagaacacagatgcatcgtgcggcacgaaaacaacaagaacggcgtggaccaggaaatcatcttcccacccatcaagaccgatgtgattacaatggaccccaaggacaactgctccaaggacgccaacgataccctgctgctccagctgaccaacaccagcgcctactacatgtacttgttgctgctgctgaagtccgtggtgtacttcgccatcatcacatgctgcctgctgatggctatggtcaagcggaaggacagccggggaagggccaagcgatctggatctggagcaacaaacttctcactactcaaacaagcaggtgacgtggaggagaatcccgggcctactagtatggactggatttggcgcatccttttccttgtcggcgctgctaccggcgcgcattccttcgaacaggtgcagctggtgcagtctggccccgaagtgaagaaacccggcgagtccgtgaagatcagctgcaaggccagcggctacaccttccggcactacagcatgaactgggtcaagcaggccccaggccagggcctgaagtggatgggcagaatcaacaccgagagcggcgtgcccatctacgccgacgacttcaagggccggttcagcttcaccgtggacaccagcgccagcaccgcctacctggaaatctccagcctgaccagcgaggataccgccgtgtatttctgctccaacgactacctgtacagcctggatttctggggccagggaaccaccctgacagtgtcctctacgcgtatccagaaccctgatcctgccgtgtaccagctgcgggatagcaagagcagcgacaagagcgtgtgtctgttcaccgacttcgacagccagaccaacgtgtcccagagcaaggactccgacgtgtacatcaccgataagtgcgtgctggacatgcggagcatggacttcaagagcaactccgccgtggcctggtccaacaagtccgatttcgcctgcgccaacgccttcaacaacagcattatccccgaggacacattcttcccaagccccgagagcagcgactccaccgaccacgtgaagcccaaagagacagagaacaccaagcagcccagcaagagctgccacaagcccaaggccatcgtgcacaccgagaaagtgaacatgatgagcctgaccgtgctgggcctgcggatgctgttcgccaaaaccgtggccgtgaacttcctgctgaccgccaagctgttcttcctcctcaccgcc

SEQ ID NO: 6012 - DNA, 2181 bp, synthetic construct
  source 1..2181: mol_type = other DNA
atggccttaccagtgaccgccttgctcctgccgctggccttgctgctccacgccgccaggccgcagtctgtgctgacacagcctcctagtgtgtctggcgctcctggacagagagtgaccatcagctgtacaggcagcagcagcaatatcggagccggctttgacgtgcactggtatcagcagctgcctggcacagcccctaaactgctgatctacggcaacagcaacagacccagcggcgtgcccgatagattttccggctctaagagcggcacaagcgccagcctggctattactggactccaggccgaggacgaggccgactactactgtcagagctacgacagcagcctgagcggctacgttttcggcaccggcaccaaagtgacagtgcttggtctcgaggacctgaagaacgtgttcccacctgaggtggccgtgttcgagcctagcgaggccgagatcagccacacccagaaagccaccctcgtgtgcctggctaccggcttctaccccgaccatgtggaactgtcttggtgggtcaacggcaaagaggtgcacagcggcgtgtgtaccgacccccagccactgaaagaacagcccgccctgaacgacagccggtactgcctgagcagcagactgagagtgtccgccaccttctggcagaacccccggaaccacttcagatgccaggtgcagttctacggcctgagcgagaacgacgagtggacccaggacagagccaagcccgtgacccagatcgtgtctgccgaagcctggggcagagccgatgatgtgattaagatccactggcaggaaaagaagtccaacaccatcctgggcagccaggaaggcaacaccatgaagaccaacgacacctacatgaagttcagctggctgaccgtgcccgagaagtccctggacaaagaacacagatgcatcgtgcggcacgaaaacaacaagaacggcgtggaccaggaaatcatcttcccacccatcaagaccgatgtgattacaatggaccccaaggacaactgctccaaggacgccaacgataccctgctgctccagctgaccaacaccagcgcctactacatgtacttgttgctgctgctgaagtccgtggtgtacttcgccatcatcacatgctgcctgctgatggctatggtcaagcggaaggacagccggggaagggccaagcgatctggatctggagcaacaaacttctcactactcaaacaagcaggtgacgtggaggagaatcccgggcctactagtatggactggatttggcgcatccttttccttgtcggcgctgctaccggcgcgcattccttcgaacaagttcagctggttcagagcggagccgaagtgaagaaacctggggcctctgtgaaggtgtcctgcaaggcttccggctacacctttaccgattactacatgcactgggtccgacaggctcccggccaaagacttgaatggatgggctggatcaaccccaacagcggcggcacaaattacgcccagaagttccaggaccggatcaccgtgaccagagacaccagctccaacaccggctacatggaactgacccggctgagatccgatgacaccgccgtgtactactgcgctagaagcccttactccggcgtgctggataagtggggacagggcacactggtcaccgtgtcatctacgcgtatccagaaccctgatcctgccgtgtaccagctgcgggatagcaagagcagcgacaagagcgtgtgtctgttcaccgacttcgacagccagaccaacgtgtcccagagcaaggactccgacgtgtacatcaccgataagtgcgtgctggacatgcggagcatggacttcaagagcaactccgccgtggcctggtccaacaagtccgatttcgcctgcgccaacgccttcaacaacagcattatccccgaggacacattcttcccaagccccgagagcagcgactccaccgaccacgtgaagcccaaagagacagagaacaccaagcagcccagcaagagctgccacaagcccaaggccatcgtgcacaccgagaaagtgaacatgatgagcctgaccgtgctgggcctgcggatgctgttcgccaaaaccgtggccgtgaacttcctgctgaccgccaagctgttcttcctcctcaccgcc

SEQ ID NO: 6013 - DNA, 2172 bp, synthetic construct
  source 1..2172: mol_type = other DNA
atggccttaccagtgaccgccttgctcctgccgctggccttgctgctccacgccgccaggccgcaggctgttctgacacagcctccatctgcctctggcacacctggacagagagtgaccatctcctgtagcggcagcagcagcaacatcggcagctacaccgtgtcctggtatcagcagctccctggaacagcccctaagttcctgatctacagcaacaaccagcggcctagcggcgtgcccgatagattttctggcagcaagagcggcacaagcgccagcctggctatttctggactccagtctgaggacgaggccgactactattgtgccgcctgggacgatagcctgaacggctatgtgtttggcaccggcaccaaagtgacagtgcttggtctcgaggacctgaagaacgtgttcccacctgaggtggccgtgttcgagcctagcgaggccgagatcagccacacccagaaagccaccctcgtgtgcctggctaccggcttctaccccgaccatgtggaactgtcttggtgggtcaacggcaaagaggtgcacagcggcgtgtgtaccgacccccagccactgaaagaacagcccgccctgaacgacagccggtactgcctgagcagcagactgagagtgtccgccaccttctggcagaacccccggaaccacttcagatgccaggtgcagttctacggcctgagcgagaacgacgagtggacccaggacagagccaagcccgtgacccagatcgtgtctgccgaagcctggggcagagccgatgatgtgattaagatccactggcaggaaaagaagtccaacaccatcctgggcagccaggaaggcaacaccatgaagaccaacgacacctacatgaagttcagctggctgaccgtgcccgagaagtccctggacaaagaacacagatgcatcgtgcggcacgaaaacaacaagaacggcgtggaccaggaaatcatcttcccacccatcaagaccgatgtgattacaatggaccccaaggacaactgctccaaggacgccaacgataccctgctgctccagctgaccaacaccagcgcctactacatgtacttgttgctgctgctgaagtccgtggtgtacttcgccatcatcacatgctgcctgctgatggctatggtcaagcggaaggacagccggggaagggccaagcgatctggatctggagcaacaaacttctcactactcaaacaagcaggtgacgtggaggagaatcccgggcctactagtatggactggatttggcgcatccttttccttgtcggcgctgctaccggcgcgcattccttcgaagttcaactggttcagagcggagccgaagtgaagaagcctggcgagagcctgaagattagctgcaaaggcagcggctacgacttcaccacctactggatcggctgggtccgacagatgcctggcaaaggactggaatggatgggcatcatctaccccggcgacagcgacaccagatacagccctagcgttagaggccgcgtgaccatcagcgccgacaagtctatcaacaccgcctacctccagtggtccagcctggaagcctctgacaccgccatgtactactgcgccagaatgtggaccttcagccaggatggatggggccagggaacactggtcacagtgtcatctacgcgtatccagaaccctgatcctgccgtgtaccagctgcgggatagcaagagcagcgacaagagcgtgtgtctgttcaccgacttcgacagccagaccaacgtgtcccagagcaaggactccgacgtgtacatcaccgataagtgcgtgctggacatgcggagcatggacttcaagagcaactccgccgtggcctggtccaacaagtccgatttcgcctgcgccaacgccttcaacaacagcattatccccgaggacacattcttcccaagccccgagagcagcgactccaccgaccacgtgaagcccaaagagacagagaacaccaagcagcccagcaagagctgccacaagcccaaggccatcgtgcacaccgagaaagtgaacatgatgagcctgaccgtgctgggcctgcggatgctgttcgccaaaaccgtggccgtgaacttcctgctgaccgccaagctgttcttcctcctcaccgcc

SEQ ID NO: 6014 - DNA, 2181 bp, synthetic construct
  source 1..2181: mol_type = other DNA
atggccttaccagtgaccgccttgctcctgccgctggccttgctgctccacgccgccaggccggacatcgtgatgacccagagccccgatagcctggccgtgtctctgggagagagagccaccatcaactgcaagagcagccagagcatcctgtacagcagcaaccagaagaactacctggcctggtatcagcagaagcccggccagagccctaagctgctgatctactgggccagcaccagagaaagcggcgtgcccgatagattcagcggcagcggctctggcaccgacttcaccctgaccatcagttctcttcaggccgaggacgtggccgtgtactactgccaccagtacatcagctcctacaccttcggccagggcaccaagctggaaatcaagctcgaggacctgaagaacgtgttcccacctgaggtggccgtgttcgagcctagcgaggccgagatcagccacacccagaaagccaccctcgtgtgcctggctaccggcttctaccccgaccatgtggaactgtcttggtgggtcaacggcaaagaggtgcacagcggcgtgtgtaccgacccccagccactgaaagaacagcccgccctgaacgacagccggtactgcctgagcagcagactgagagtgtccgccaccttctggcagaacccccggaaccacttcagatgccaggtgcagttctacggcctgagcgagaacgacgagtggacccaggacagagccaagcccgtgacccagatcgtgtctgccgaagcctggggcagagccgatgatgtgattaagatccactggcaggaaaagaagtccaacaccatcctgggcagccaggaaggcaacaccatgaagaccaacgacacctacatgaagttcagctggctgaccgtgcccgagaagtccctggacaaagaacacagatgcatcgtgcggcacgaaaacaacaagaacggcgtggaccaggaaatcatcttcccacccatcaagaccgatgtgattacaatggaccccaaggacaactgctccaaggacgccaacgataccctgctgctccagctgaccaacaccagcgcctactacatgtacttgttgctgctgctgaagtccgtggtgtacttcgccatcatcacatgctgcctgctgatggctatggtcaagcggaaggacagccggggaagggccaagcgatctggatctggagcaacaaacttctcactactcaaacaagcaggtgacgtggaggagaatcccgggcctactagtatggactggatttggcgcatccttttccttgtcggcgctgctaccggcgcgcattccttcgaacaggtgcagctggtgcagtctggcgctgaagtgaagaaacctggggccagcgtgaaggtgtcctgcaaggccagcggctacacctttgccagccagtggatgcactggatgagacaggcccctggacagggcctggaatggatcggctggatcaaccccggcaacgtgaacaccaagtacaacgagaagttcaagggcagagccaccctgacagtggacaccagcaccaacaccgcctacatggaactgagcagcctgcggagcgaggacaccgccgtgtattattgcgccagaagcacctggtacagacccctggattattggggccagggaacccttgtgaccgtgtcctctacgcgtatccagaaccctgatcctgccgtgtaccagctgcgggatagcaagagcagcgacaagagcgtgtgtctgttcaccgacttcgacagccagaccaacgtgtcccagagcaaggactccgacgtgtacatcaccgataagtgcgtgctggacatgcggagcatggacttcaagagcaactccgccgtggcctggtccaacaagtccgatttcgcctgcgccaacgccttcaacaacagcattatccccgaggacacattcttcccaagccccgagagcagcgactccaccgaccacgtgaagcccaaagagacagagaacaccaagcagcccagcaagagctgccacaagcccaaggccatcgtgcacaccgagaaagtgaacatgatgagcctgaccgtgctgggcctgcggatgctgttcgccaaaaccgtggccgtgaacttcctgctgaccgccaagctgttcttcctcctcaccgcc

SEQ ID NO: 6015 - DNA, 2181 bp, synthetic construct
  source 1..2181: mol_type = other DNA
atggccttaccagtgaccgccttgctcctgccgctggccttgctgctccacgccgccaggccggaccacatcgtgctgacccagagccctagcagcctgtctgccagcctgggcgacagagtgaccatcagctgtagagccagccaggacatcagcacctacctgaactggtatcagcagaaacccgacggcaccgtgaagctgctgatcttctacaccagcagactgcacgccggggtgcccagcagattttctggcagcggctctggcacccaccacagcctgaccatctccaacctggaacaggaagatattgctacctacttctgtcagcaaggcaacagcctgcccttcaccttcggcagcggcaccaagctggaaatcaagagactcgaggacctgaagaacgtgttcccacctgaggtggccgtgttcgagcctagcgaggccgagatcagccacacccagaaagccaccctcgtgtgcctggctaccggcttctaccccgaccatgtggaactgtcttggtgggtcaacggcaaagaggtgcacagcggcgtgtgtaccgacccccagccactgaaagaacagcccgccctgaacgacagccggtactgcctgagcagcagactgagagtgtccgccaccttctggcagaacccccggaaccacttcagatgccaggtgcagttctacggcctgagcgagaacgacgagtggacccaggacagagccaagcccgtgacccagatcgtgtctgccgaagcctggggcagagccgatgatgtgattaagatccactggcaggaaaagaagtccaacaccatcctgggcagccaggaaggcaacaccatgaagaccaacgacacctacatgaagttcagctggctgaccgtgcccgagaagtccctggacaaagaacacagatgcatcgtgcggcacgaaaacaacaagaacggcgtggaccaggaaatcatcttcccacccatcaagaccgatgtgattacaatggaccccaaggacaactgctccaaggacgccaacgataccctgctgctccagctgaccaacaccagcgcctactacatgtacttgttgctgctgctgaagtccgtggtgtacttcgccatcatcacatgctgcctgctgatggctatggtcaagcggaaggacagccggggaagggccaagcgatctggatctggagcaacaaacttctcactactcaaacaagcaggtgacgtggaggagaatcccgggcctactagtatggactggatttggcgcatccttttccttgtcggcgctgctaccggcgcgcattccttcgaacaggtgcagctgaaagagagcggccctgagctggaaaagcctggggccagcgtgaagattagctgcaaggccagcggctacagcttcaccgcctacagcatgaactgggtcaagcagaacaacggcatgagcctggaatggatcggcagcatcgacccctactacggcgacaccaaatacgcccagaagttcaagggcaaggccaccctgaccgtggataaggccagcagcaccgcctacctccagctgaagtctctgaccagcgaggacagcgccgtgtactactgcgccagacggatgattaccaccggcgactggtacttcgacgtgtggggagccggaaccaccgtgacagtgtctagcacgcgtatccagaaccctgatcctgccgtgtaccagctgcgggatagcaagagcagcgacaagagcgtgtgtctgttcaccgacttcgacagccagaccaacgtgtcccagagcaaggactccgacgtgtacatcaccgataagtgcgtgctggacatgcggagcatggacttcaagagcaactccgccgtggcctggtccaacaagtccgatttcgcctgcgccaacgccttcaacaacagcattatccccgaggacacattcttcccaagccccgagagcagcgactccaccgaccacgtgaagcccaaagagacagagaacaccaagcagcccagcaagagctgccacaagcccaaggccatcgtgcacaccgagaaagtgaacatgatgagcctgaccgtgctgggcctgcggatgctgttcgccaaaaccgtggccgtgaacttcctgctgaccgccaagctgttcttcctcctcaccgcc

SEQ ID NO: 6016 - DNA, 2181 bp, synthetic construct; identical to SEQ ID NO: 6015
  source 1..2181: mol_type = other DNA

SEQ ID NO: 6017 - DNA, 2181 bp, synthetic construct
  source 1..2181: mol_type = other DNA
atggccttaccagtgaccgccttgctcctgccgctggccttgctgctccacgccgccaggccggacgagatcgtgctgacacagagccctgccaccctgtctctgagccctggcgaaagagccaccctgagctgtagagccagccagagcgtgtccagctacctggcctggtatcagcagaagcccggccaggctccccggctgctgatctacgatgccagcaatagagccaccggcatccccgccagattttccggctctggcagcggcaccgacttcaccctgaccatcagctccctggaacccgaggacttcgccgtgtactactgccagcagcggagcaactggcccatcacattcggccagggcacccggctggaaatcaaactcgaggacctgaagaacgtgttcccacctgaggtggccgtgttcgagcctagcgaggccgagatcagccacacccagaaagccaccctcgtgtgcctggctaccggcttctaccccgaccatgtggaactgtcttggtgggtcaacggcaaagaggtgcacagcggcgtgtgtaccgacccccagccactgaaagaacagcccgccctgaacgacagccggtactgcctgagcagcagactgagagtgtccgccaccttctggcagaacccccggaaccacttcagatgccaggtgcagttctacggcctgagcgagaacgacgagtggacccaggacagagccaagcccgtgacccagatcgtgtctgccgaagcctggggcagagccgatgatgtgattaagatccactggcaggaaaagaagtccaacaccatcctgggcagccaggaaggcaacaccatgaagaccaacgacacctacatgaagttcagctggctgaccgtgcccgagaagtccctggacaaagaacacagatgcatcgtgcggcacgaaaacaacaagaacggcgtggaccaggaaatcatcttcccacccatcaagaccgatgtgattacaatggaccccaaggacaactgctccaaggacgccaacgataccctgctgctccagctgaccaacaccagcgcctactacatgtacttgttgctgctgctgaagtccgtggtgtacttcgccatcatcacatgctgcctgctgatggctatggtcaagcggaaggacagccggggaagggccaagcgatctggatctggagcaacaaacttctcactactcaaacaagcaggtgacgtggaggagaatcccgggcctactagtatggactggatttggcgcatccttttccttgtcggcgctgctaccggcgcgcattccttcgaagaagtgcagctggtggaatcaggcggcggactggtgcagcctggcagaagcctgagactgagctgtgccgccagcggcttcaccttcaacgactacgccatgcactgggtgcgccaggcccctggaaaaggactggaatgggtgtccacaatcagctggaacagcggcagcatcggctacgccgatagcgtgaagggccggttcaccatcagccgggacaacgccaagaagtccctgtacctccagatgaacagcctgcgggccgaggacacagccctgtactattgcgccaaggacatccagtacggcaactactactacggcatggacgtgtggggccagggaaccaccgtgaccgtgtcatctacgcgtatccagaaccctgatcctgccgtgtaccagctgcgggatagcaagagcagcgacaagagcgtgtgtctgttcaccgacttcgacagccagaccaacgtgtcccagagcaaggactccgacgtgtacatcaccgataagtgcgtgctggacatgcggagcatggacttcaagagcaactccgccgtggcctggtccaacaagtccgatttcgcctgcgccaacgccttcaacaacagcattatccccgaggacacattcttcccaagccccgagagcagcgactccaccgaccacgtgaagcccaaagagacagagaacaccaagcagcccagcaagagctgccacaagcccaaggccatcgtgcacaccgagaaagtgaacatgatgagcctgaccgtgctgggcctgcggatgctgttcgccaaaaccgtggccgtgaacttcctgctgaccgccaagctgttcttcctcctcaccgcc

SEQ ID NO: 6018 - DNA, 2187 bp, synthetic construct
  source 1..2187: mol_type = other DNA
atggccttaccagtgaccgccttgctcctgccgctggccttgctgctccacgccgccaggccggacatcgtgatgacccagacccccctgagcctgcctgtgacacctggcgagcctgccagcatctcctgcagaagcagcaagagcctgctgcacagcaacggcatcacctacctgtactggtatctgcagaaacccggccagagcccccaactgctgatctaccagatgagcaacctggtgtccggcgtgcccgacagattttctggcagcggctccggcaccgacttcaccctgaagatcagccgggtggaagccgaggacgtgggcgtgtactactgcgcccagaacctggaactgccctacacctttggcggcggaacaaaggtggaaatcaagcggctcgaggacctgaagaacgtgttcccacctgaggtggccgtgttcgagcctagcgaggccgagatcagccacacccagaaagccaccctcgtgtgcctggctaccggcttctaccccgaccatgtggaactgtcttggtgggtcaacggcaaagaggtgcacagcggcgtgtgtaccgacccccagccactgaaagaacagcccgccctgaacgacagccggtactgcctgagcagcagactgagagtgtccgccaccttctggcagaacccccggaaccacttcagatgccaggtgcagttctacggcctgagcgagaacgacgagtggacccaggacagagccaagcccgtgacccagatcgtgtctgccgaagcctggggcagagccgatgatgtgattaagatccactggcaggaaaagaagtccaacaccatcctgggcagccaggaaggcaacaccatgaagaccaacgacacctacatgaagttcagctggctgaccgtgcccgagaagtccctggacaaagaacacagatgcatcgtgcggcacgaaaacaacaagaacggcgtggaccaggaaatcatcttcccacccatcaagaccgatgtgattacaatggaccccaaggacaactgctccaaggacgccaacgataccctgctgctccagctgaccaacaccagcgcctactacatgtacttgttgctgctgctgaagtccgtggtgtacttcgccatcatcacatgctgcctgctgatggctatggtcaagcggaaggacagccggggaagggccaagcgatctggatctggagcaacaaacttctcactactcaaacaagcaggtgacgtggaggagaatcccgggcctactagtatggactggatttggcgcatccttttccttgtcggcgctgctaccggcgcgcattccttcgaacaggtgcaactggtgcagagcggagccgaagtgaaaaagcccggcagcagcgtgaaggtgtcctgcaaggccagcggctacgccttcagctactcctggatcaactgggtgcgccaggcccctggacagggcctggaatggatgggcagaatcttccccggcgacggcgacaccgactacaacggcaagttcaagggcagagtgaccatcaccgccgacaagagcaccagcaccgcctacatggaactgagcagcctgcggagcgaggataccgccgtgtactattgtgccagaaacgtgttcgacggctactggctggtgtactggggccagggaacacttgtgaccgtgtccagcacgcgtatccagaaccctgatcctgccgtgtaccagctgcgggatagcaagagcagcgacaagagcgtgtgtctgttcaccgacttcgacagccagaccaacgtgtcccagagcaaggactccgacgtgtacatcaccgataagtgcgtgctggacatgcggagcatggacttcaagagcaactccgccgtggcctggtccaacaagtccgatttcgcctgcgccaacgccttcaacaacagcattatccccgaggacacattcttcccaagccccgagagcagcgactccaccgaccacgtgaagcccaaagagacagagaacaccaagcagcccagcaagagctgccacaagcccaaggccatcgtgcacaccgagaaagtgaacatgatgagcctgaccgtgctgggcctgcggatgctgttcgccaaaaccgtggccgtgaacttcctgctgaccgccaagctgttcttcctcctcaccgcc

SEQ ID NO: 6019 - DNA, 2190 bp, synthetic construct
  source 1..2190: mol_type = other DNA
atggccttaccagtgaccgccttgctcctgccgctggccttgctgctccacgccgccaggccggacatccagatgacccagagccccagcagcctgtctgccagcgtgggcgacagagtgaccatcacctgtcggagcagccagagcatcgtgcactccgtgggcaacaccttcctggaatggtatcagcagaagcccggcaaggcccccaagctgctgatctacaaggtgtccaacagattcagcggcgtgcccagcaggtttagcggctctggcagcggcaccgacttcaccctgaccatctctagcctccagcccgaggacttcgccacctactactgttttcaaggcagccagttcccctacaccttcggccagggaacaaaggtggaaatcaagcggctcgaggacctgaagaacgtgttcccacctgaggtggccgtgttcgagcctagcgaggccgagatcagccacacccagaaagccaccctcgtgtgcctggctaccggcttctaccccgaccatgtggaactgtcttggtgggtcaacggcaaagaggtgcacagcggcgtgtgtaccgacccccagccactgaaagaacagcccgccctgaacgacagccggtactgcctgagcagcagactgagagtgtccgccaccttctggcagaacccccggaaccacttcagatgccaggtgcagttctacggcctgagcgagaacgacgagtggacccaggacagagccaagcccgtgacccagatcgtgtctgccgaagcctggggcagagccgatgatgtgattaagatccactggcaggaaaagaagtccaacaccatcctgggcagccaggaaggcaacaccatgaagaccaacgacacctacatgaagttcagctggctgaccgtgcccgagaagtccctggacaaagaacacagatgcatcgtgcggcacgaaaacaacaagaacggcgtggaccaggaaatcatcttcccacccatcaagaccgatgtgattacaatggaccccaaggacaactgctccaaggacgccaacgataccctgctgctccagctgaccaacaccagcgcctactacatgtacttgttgctgctgctgaagtccgtggtgtacttcgccatcatcacatgctgcctgctgatggctatggtcaagcggaaggacagccggggaagggccaagcgatctggatctggagcaacaaacttctcactactcaaacaagcaggtgacgtggaggagaatcccgggcctactagtatggactggatttggcgcatccttttccttgtcggcgctgctaccggcgcgcattccttcgaagaagtgcaactggtggaaagcggaggcggcctggtgcagcctggcggatctctgagactgagctgtgccgccagcggctacgagttcagccggtcctggatgaactgggtgcgccaggcccctggcaagggactggaatgggtgggaagaatctaccccggcgacggcgacaccaactacagcggcaagttcaagggccggttcaccatcagcgccgacaccagcaagaacaccgcctacctccagatgaacagcctgcgggccgaggataccgccgtgtactactgtgccagagatggcagctcctgggactggtacttcgacgtgtggggacagggaacccttgtgaccgtgtccagcacgcgtatccagaaccctgatcctgccgtgtaccagctgcgggatagcaagagcagcgacaagagcgtgtgtctgttcaccgacttcgacagccagaccaacgtgtcccagagcaaggactccgacgtgtacatcaccgataagtgcgtgctggacatgcggagcatggacttcaagagcaactccgccgtggcctggtccaacaagtccgatttcgcctgcgccaacgccttcaacaacagcattatccccgaggacacattcttcccaagccccgagagcagcgactccaccgaccacgtgaagcccaaagagacagagaacaccaagcagcccagcaagagctgccacaagcccaaggccatcgtgcacaccgagaaagtgaacatgatgagcctgaccgtgctgggcctgcggatgctgttcgccaaaaccgtggccgtgaacttcctgctgaccgccaagctgttcttcctcctcaccgcc

SEQ ID NO: 6020 - DNA, 2184 bp, synthetic construct
  source 1..2184: mol_type = other DNA
atggccttaccagtgaccgccttgctcctgccgctggccttgctgctccacgccgccaggccggacatccagatgacccagagccccagcagcctgtctgccagcgtgggcgacagagtgaccatcacctgtagagccagccagaccatctggtcctacctgaactggtatcagcagaggcccggcaaggcccccaacctgctgatctatgccgccagctctctccagagcggcgtgcccagcagattttccggcagaggcagcggcaccgacttcaccctgaccatcagttccttgcaggccgaggacttcgccacctactactgccagcagagctacagcatcccccagattttcggccagggcaccaagctggaaatcaagctcgaggacctgaagaacgtgttcccacctgaggtggccgtgttcgagcctagcgaggccgagatcagccacacccagaaagccaccctcgtgtgcctggctaccggcttctaccccgaccatgtggaactgtcttggtgggtcaacggcaaagaggtgcacagcggcgtgtgtaccgacccccagccactgaaagaacagcccgccctgaacgacagccggtactgcctgagcagcagactgagagtgtccgccaccttctggcagaacccccggaaccacttcagatgccaggtgcagttctacggcctgagcgagaacgacgagtggacccaggacagagccaagcccgtgacccagatcgtgtctgccgaagcctggggcagagccgatgatgtgattaagatccactggcaggaaaagaagtccaacaccatcctgggcagccaggaaggcaacaccatgaagaccaacgacacctacatgaagttcagctggctgaccgtgcccgagaagtccctggacaaagaacacagatgcatcgtgcggcacgaaaacaacaagaacggcgtggaccaggaaatcatcttcccacccatcaagaccgatgtgattacaatggaccccaaggacaactgctccaaggacgccaacgataccctgctgctccagctgaccaacaccagcgcctactacatgtacttgttgctgctgctgaagtccgtggtgtacttcgccatcatcacatgctgcctgctgatggctatggtcaagcggaaggacagccggggaagggccaagcgatctggatctggagcaacaaacttctcactactcaaacaagcaggtgacgtggaggagaatcccgggcctactagtatggactggatttggcgcatccttttccttgtcggcgctgctaccggcgcgcattccttcgaacaggtgcagctccagcagtctggacccggcctcgtgaagcctagccagacactgagcctgacctgcgccatcagcggcgatagcgtgtccagcaatagcgccgcctggaactggatcagacagtccccctctcggggcctggaatggctgggccggacctactaccgcagcaagtggtacaacgactacgccgtgtccgtgaagtcccggatcaccatcaaccccgacaccagcaagaaccagttctccttgcaactgaacagcgtgacccccgaggacaccgccgtgtactactgcgccagagaagtgaccggcgacctggaagatgccttcgacatctggggccagggaacaatggtcacagtgtccagcacgcgtatccagaaccctgatcctgccgtgtaccagctgcgggatagcaagagcagcgacaagagcgtgtgtctgttcaccgacttcgacagccagaccaacgtgtcccagagcaaggactccgacgtgtacatcaccgataagtgcgtgctggacatgcggagcatggacttcaagagcaactccgccgtggcctggtccaacaagtccgatttcgcctgcgccaacgccttcaacaacagcattatccccgaggacacattcttcccaagccccgagagcagcgactccaccgaccacgtgaagcccaaagagacagagaacaccaagcagcccagcaagagctgccacaagcccaaggccatcgtgcacaccgagaaagtgaacatgatgagcctgaccgtgctgggcctgcggatgctgttcgccaaaaccgtggccgtgaacttcctgctgaccgccaagctgttcttcctcctcaccgcc

SEQ ID NO: 6021 - DNA, 2163 bp, synthetic construct
  source 1..2163: mol_type = other DNA
atggccttaccagtgaccgccttgctcctgccgctggccttgctgctccacgccgccaggccggacatccagatgacccagagccccgccaccatcgagaacacaagcctgtctgccagcgtgggcgacagagtgaccatcacctgtagagccagccagggcatcagctcttggctgacctggtatcagcagaagcccgagaaggcccccaagagcctgatctacgccgccagctctctgcagtctggcgtgcccagcagattttccggcagcggctctggcaccgacttcaccctgacaatcagcagcctgcagcccgaggacttcgccacctactactgccagcagtacgacagctaccccatcaccttcggccagggcacccggctggaaatcaagctcgaggacctgaagaacgtgttcccacctgaggtggccgtgttcgagcctagcgaggccgagatcagccacacccagaaagccaccctcgtgtgcctggctaccggcttctaccccgaccatgtggaactgtcttggtgggtcaacggcaaagaggtgcacagcggcgtgtgtaccgacccccagccactgaaagaacagcccgccctgaacgacagccggtactgcctgagcagcagactgagagtgtccgccaccttctggcagaacccccggaaccacttcagatgccaggtgcagttctacggcctgagcgagaacgacgagtggacccaggacagagccaagcccgtgacccagatcgtgtctgccgaagcctggggcagagccgatgatgtgattaagatccactggcaggaaaagaagtccaacaccatcctgggcagccaggaaggcaacaccatgaagaccaacgacacctacatgaagttcagctggctgaccgtgcccgagaagtccctggacaaagaacacagatgcatcgtgcggcacgaaaacaacaagaacggcgtggaccaggaaatcatcttcccacccatcaagaccgatgtgattacaatggaccccaaggacaactgctccaaggacgccaacgataccctgctgctccagctgaccaacaccagcgcctactacatgtacttgttgctgctgctgaagtccgtggtgtacttcgccatcatcacatgctgcctgctgatggctatggtcaagcggaaggacagccggggaagggccaagcgatctggatctggagcaacaaacttctcactactcaaacaagcaggtgacgtggaggagaatcccgggcctactagtatggactggatttggcgcatccttttccttgtcggcgctgctaccggcgcgcattccttcgaacaggtgcaactgcagcagtggggagccggactgctgaagcctagcgagacactgagcctgacctgcgccgtgtacggcggcagcttcagcgcctactattggagctggatcagacagccccctggcaagggcctggaatggatcggcgacatcaatcacggcggaggcaccaactacaaccccagcctgaagtcccgcgtgaccatctccgtggacaccagcaagaaccagttctccctgaagctgaacagcgtgacagccgccgacacagccgtgtactactgtgccagcctgaccgcctattggggccagggatctcttgtgaccgtgtccagcacgcgtatccagaaccctgatcctgccgtgtaccagctgcgggatagcaagagcagcgacaagagcgtgtgtctgttcaccgacttcgacagccagaccaacgtgtcccagagcaaggactccgacgtgtacatcaccgataagtgcgtgctggacatgcggagcatggacttcaagagcaactccgccgtggcctggtccaacaagtccgatttcgcctgcgccaacgccttcaacaacagcattatccccgaggacacattcttcccaagccccgagagcagcgactccaccgaccacgtgaagcccaaagagacagagaacaccaagcagcccagcaagagctgccacaagcccaaggccatcgtgcacaccgagaaagtgaacatgatgagcctgaccgtgctgggcctgcggatgctgttcgccaaaaccgtggccgtgaacttcctgctgaccgccaagctgttcttcctcctcaccgcc

SEQ ID NO: 6022 - DNA, 2178 bp, synthetic construct
  source 1..2178: mol_type = other DNA
atggccttaccagtgaccgccttgctcctgccgctggccttgctgctccacgccgccaggccggacgagatcgtgctgacccagagccctgatagcctggccgtgtctctgggcgagagagccaccatcaactgcaaggccagccagagcgtggacttcgacggcgacagctacctgaactggtatcagcagaagcccggccagccccccaaggtgctgatctatgccgccagcacactgcagagcggcgtgcccagcagattttctggcagcggctccggcaccgacttcaccctgaccatcaacagcctggaagccgaggacgccgccacctactactgccagcagagcaacgaggacccctggacctttggcggcggaacaaaggtggaaatcaagctcgaggacctgaagaacgtgttcccacctgaggtggccgtgttcgagcctagcgaggccgagatcagccacacccagaaagccaccctcgtgtgcctggctaccggcttctaccccgaccatgtggaactgtcttggtgggtcaacggcaaagaggtgcacagcggcgtgtgtaccgacccccagccactgaaagaacagcccgccctgaacgacagccggtactgcctgagcagcagactgagagtgtccgccaccttctggcagaacccccggaaccacttcagatgccaggtgcagttctacggcctgagcgagaacgacgagtggacccaggacagagccaagcccgtgacccagatcgtgtctgccgaagcctggggcagagccgatgatgtgattaagatccactggcaggaaaagaagtccaacaccatcctgggcagccaggaaggcaacaccatgaagaccaacgacacctacatgaagttcagctggctgaccgtgcccgagaagtccctggacaaagaacacagatgcatcgtgcggcacgaaaacaacaagaacggcgtggaccaggaaatcatcttcccacccatcaagaccgatgtgattacaatggaccccaaggacaactgctccaaggacgccaacgataccctgctgctccagctgaccaacaccagcgcctactacatgtacttgttgctgctgctgaagtccgtggtgtacttcgccatcatcacatgctgcctgctgatggctatggtcaagcggaaggacagccggggaagggccaagcgatctggatctggagcaacaaacttctcactactcaaacaagcaggtgacgtggaggagaatcccgggcctactagtatggactggatttggcgcatccttttccttgtcggcgctgctaccggcgcgcattccttcgaacaggtgcaactggtgcagtccggcgctgaagtgaagaaacctggggccagcgtgaaggtgtcctgcaaggtgtccggctacacctttaccgactactacattacctgggtgcgccaggcccctggacaggccctggaatggatgggctggatctaccccggcagcggcaacaccaagtacagccagaagttccagggcagattcgtgttcagcgtggacaccagcgccagcaccgcctacctgcaactgtctagcctgaaggccgaagataccgccgtgtactactgcgccaactacggcaactattggttcgcctattggggccagggaacccttgtgaccgtgtcctctacgcgtatccagaaccctgatcctgccgtgtaccagctgcgggatagcaagagcagcgacaagagcgtgtgtctgttcaccgacttcgacagccagaccaacgtgtcccagagcaaggactccgacgtgtacatcaccgataagtgcgtgctggacatgcggagcatggacttcaagagcaactccgccgtggcctggtccaacaagtccgatttcgcctgcgccaacgccttcaacaacagcattatccccgaggacacattcttcccaagccccgagagcagcgactccaccgaccacgtgaagcccaaagagacagagaacaccaagcagcccagcaagagctgccacaagcccaaggccatcgtgcacaccgagaaagtgaacatgatgagcctgaccgtgctgggcctgcggatgctgttcgccaaaaccgtggccgtgaacttcctgctgaccgccaagctgttcttcctcctcaccgcc

SEQ ID NO: 6023 - DNA, 2169 bp, synthetic construct
  source 1..2169: mol_type = other DNA
atggccttaccagtgaccgccttgctcctgccgctggccttgctgctccacgccgccaggccggacatccagatgacccagagccccagcagcctgtctgccagcgtgggcgacagagtgaccatcacctgtagagccagccagggcatcagctcttggctggcctggtatcagcagaagcccgagaaggcccccaagagcctgatctacgccgcctctagtctccagagcggcgtgcccagcagattttctggcagcggctccggcaccgacttcaccctgacaatcagctccctccagcccgaggacttcgccacctactactgccagcagtacaacagctaccctcccacctttggcggaggcaccaaggtggaaatcaagctcgaggacctgaagaacgtgttcccacctgaggtggccgtgttcgagcctagcgaggccgagatcagccacacccagaaagccaccctcgtgtgcctggctaccggcttctaccccgaccatgtggaactgtcttggtgggtcaacggcaaagaggtgcacagcggcgtgtgtaccgacccccagccactgaaagaacagcccgccctgaacgacagccggtactgcctgagcagcagactgagagtgtccgccaccttctggcagaacccccggaaccacttcagatgccaggtgcagttctacggcctgagcgagaacgacgagtggacccaggacagagccaagcccgtgacccagatcgtgtctgccgaagcctggggcagagccgatgatgtgattaagatccactggcaggaaaagaagtccaacaccatcctgggcagccaggaaggcaacaccatgaagaccaacgacacctacatgaagttcagctggctgaccgtgcccgagaagtccctggacaaagaacacagatgcatcgtgcggcacgaaaacaacaagaacggcgtggaccaggaaatcatcttcccacccatcaagaccgatgtgattacaatggaccccaaggacaactgctccaaggacgccaacgataccctgctgctccagctgaccaacaccagcgcctactacatgtacttgttgctgctgctgaagtccgtggtgtacttcgccatcatcacatgctgcctgctgatggctatggtcaagcggaaggacagccggggaagggccaagcgatctggatctggagcaacaaacttctcactactcaaacaagcaggtgacgtggaggagaatcccgggcctactagtatggactggatttggcgcatccttttccttgtcggcgctgctaccggcgcgcattccttcgaagaagtgcaactggtgcagtctggcggagggctggtgcatcctgggggaagcctgagactgagctgtgccggctctggcttcgccttcagcagcagcaccatgcactggatcagacaggcccctggcaagggcctggaatggatcagcctgatcggaagcggagggggcatctactacggcgacagcgtgaagggccggttcaccatcagccgggacaacgccaagaacagcctgtacctccagatgaactccctgcgggccgaggacatggccgtgtactattgtgtgcggggctacttcgactgggtggactacttcgattactggggccagggcaccctcgtgaccgtgtcatctacgcgtatccagaaccctgatcctgccgtgtaccagctgcgggatagcaagagcagcgacaagagcgtgtgtctgttcaccgacttcgacagccagaccaacgtgtcccagagcaaggactccgacgtgtacatcaccgataagtgcgtgctggacatgcggagcatggacttcaagagcaactccgccgtggcctggtccaacaagtccgatttcgcctgcgccaacgccttcaacaacagcattatccccgaggacacattcttcccaagccccgagagcagcgactccaccgaccacgtgaagcccaaagagacagagaacaccaagcagcccagcaagagctgccacaagcccaaggccatcgtgcacaccgagaaagtgaacatgatgagcctgaccgtgctgggcctgcggatgctgttcgccaaaaccgtggccgtgaacttcctgctgaccgccaagctgttcttcctcctcaccgcc

SEQ ID NO: 6024 - DNA, 2199 bp, synthetic construct
  source 1..2199: mol_type = other DNA
atggccttaccagtgaccgccttgctcctgccgctggccttgctgctccacgccgccaggccggacgacatcgtgatgacacagtcaccagatagcctcaccgtctccctgggggagcggaccaccattaattgtaaatccagccaaagcgtgctggactcaagcaagaacaagaatagcctcgcctggtatcagcagaagcccggtcagcctccaaagctgctgctttcttgggcctccaccagagagtccgggattcctgataggtttagtggttcaggctccggcacagattttactctgaccattgattctctccagccagaggattctgcaacttattactgccagcaaagcgcccactttcctataacttttggccagggaacccgacttgaaatcaagctcgaggacctgaagaacgtgttcccacctgaggtggccgtgttcgagcctagcgaggccgagatcagccacacccagaaagccaccctcgtgtgcctggctaccggcttctaccccgaccatgtggaactgtcttggtgggtcaacggcaaagaggtgcacagcggcgtgtgtaccgacccccagccactgaaagaacagcccgccctgaacgacagccggtactgcctgagcagcagactgagagtgtccgccaccttctggcagaacccccggaaccacttcagatgccaggtgcagttctacggcctgagcgagaacgacgagtggacccaggacagagccaagcccgtgacccagatcgtgtctgccgaagcctggggcagagccgatgatgtgattaagatccactggcaggaaaagaagtccaacaccatcctgggcagccaggaaggcaacaccatgaagaccaacgacacctacatgaagttcagctggctgaccgtgcccgagaagtccctggacaaagaacacagatgcatcgtgcggcacgaaaacaacaagaacggcgtggaccaggaaatcatcttcccacccatcaagaccgatgtgattacaatggaccccaaggacaactgctccaaggacgccaacgataccctgctgctccagctgaccaacaccagcgcctactacatgtacttgttgctgctgctgaagtccgtggtgtacttcgccatcatcacatgctgcctgctgatggctatggtcaagcggaaggacagccggggaagggccaagcgatctggatctggagcaacaaacttctcactactcaaacaagcaggtgacgtggaggagaatcccgggcctactagtatggactggatttggcgcatccttttccttgtcggcgctgctaccggcgcgcattccttcgaacaggtgcagctggtgcagagcggtgccgaagtgaagaaaccaggtgcatccgttaaagtttcatgtaaggctagtggatataccttcaccaattacggaatgaactgggtgaaacaggcccctggccagggactgaagtggatggggtggattaacacctacaccggggagccgacttatgcagacgactttaaggggcgggtcacgatgacctccgacacctccaccagtaccgcctacctggagctgcacaaccttaggtcagacgataccgccgtgtattactgtgcccgatggtcttggtccgacggatactatgtctacttcgactattggggccaggggaccacagttaccgtgtcctctacgcgtatccagaaccctgatcctgccgtgtaccagctgcgggatagcaagagcagcgacaagagcgtgtgtctgttcaccgacttcgacagccagaccaacgtgtcccagagcaaggactccgacgtgtacatcaccgataagtgcgtgctggacatgcggagcatggacttcaagagcaactccgccgtggcctggtccaacaagtccgatttcgcctgcgccaacgccttcaacaacagcattatccccgaggacacattcttcccaagccccgagagcagcgactccaccgaccacgtgaagcccaaagagacagagaacaccaagcagcccagcaagagctgccacaagcccaaggccatcgtgcacaccgagaaagtgaacatgatgagcctgaccgtgctgggcctgcggatgctgttcgccaaaaccgtggccgtgaacttcctgctgaccgccaagctgttcttcctcctcaccgcc

SEQ ID NO: 6025 - DNA, 2187 bp, synthetic construct
  source 1..2187: mol_type = other DNA
atggccttaccagtgaccgccttgctcctgccgctggccttgctgctccacgccgccaggccggacgagatcgtgctgacacagagccctggaagcctggccgtgtctcctggcgagcgcgtgacaatgagctgcaagagcagccagagcgtgttcttcagcagctcccagaagaactacctggcctggtatcagcagatccccggccagagccccagactgctgatctactgggccagcaccagagaaagcggcgtgcccgatagattcaccggcagcggctctggcaccgacttcaccctgacaatcagcagcgtgcagcccgaggacctggctatctactactgccaccagtacctgagcagccggaccttcggccagggcaccaagctggaaatcaagagactcgaggacctgaagaacgtgttcccacctgaggtggccgtgttcgagcctagcgaggccgagatcagccacacccagaaagccaccctcgtgtgcctggctaccggcttctaccccgaccatgtggaactgtcttggtgggtcaacggcaaagaggtgcacagcggcgtgtgtaccgacccccagccactgaaagaacagcccgccctgaacgacagccggtactgcctgagcagcagactgagagtgtccgccaccttctggcagaacccccggaaccacttcagatgccaggtgcagttctacggcctgagcgagaacgacgagtggacccaggacagagccaagcccgtgacccagatcgtgtctgccgaagcctggggcagagccgatgatgtgattaagatccactggcaggaaaagaagtccaacaccatcctgggcagccaggaaggcaacaccatgaagaccaacgacacctacatgaagttcagctggctgaccgtgcccgagaagtccctggacaaagaacacagatgcatcgtgcggcacgaaaacaacaagaacggcgtggaccaggaaatcatcttcccacccatcaagaccgatgtgattacaatggaccccaaggacaactgctccaaggacgccaacgataccctgctgctccagctgaccaacaccagcgcctactacatgtacttgttgctgctgctgaagtccgtggtgtacttcgccatcatcacatgctgcctgctgatggctatggtcaagcggaaggacagccggggaagggccaagcgatctggatctggagcaacaaacttctcactactcaaacaagcaggtgacgtggaggagaatcccgggcctactagtatggactggatttggcgcatccttttccttgtcggcgctgctaccggcgcgcattccttcgaacaggtgcaactgcagcagcctggcgctgaggtcgtgaagccaggcgcttccgtgaagatgtcctgcaaggccagcggctacaccttcaccagctactacatccactggatcaagcagacccctggacagggcctggaatgggtgggagtgatctaccccggcaacgacgacatcagctacaaccagaagttccagggcaaggccaccctgaccgccgacaagtctagcaccaccgcctacatgcaactgtccagcctgaccagcgaggacagcgccgtgtactactgcgccagagaagtgcggctgcggtacttcgatgtgtggggccagggaaccaccgtgaccgtgtcatctacgcgtatccagaaccctgatcctgccgtgtaccagctgcgggatagcaagagcagcgacaagagcgtgtgtctgttcaccgacttcgacagccagaccaacgtgtcccagagcaaggactccgacgtgtacatcaccgataagtgcgtgctggacatgcggagcatggacttcaagagcaactccgccgtggcctggtccaacaagtccgatttcgcctgcgccaacgccttcaacaacagcattatccccgaggacacattcttcccaagccccgagagcagcgactccaccgaccacgtgaagcccaaagagacagagaacaccaagcagcccagcaagagctgccacaagcccaaggccatcgtgcacaccgagaaagtgaacatgatgagcctgaccgtgctgggcctgcggatgctgttcgccaaaaccgtggccgtgaacttcctgctgaccgccaagctgttcttcctcctcaccgcc

SEQ ID NO: 6026 - DNA, 2199 bp, synthetic construct
  source 1..2199: mol_type = other DNA
atggccttaccagtgaccgccttgctcctgccgctggccttgctgctccacgccgccaggccggatgtgctgctgacccagagccctctgagcctgcctgtgacactgggacagcctgccagcatctcctgtcggagcagccagaccatcgtgcacagcaacggcaacacctacctggaatggttccagcagcggccaggccagagccccagactgctgatctaccaggtgtccaacagattcagcggcgtgcccgacagattctccggcagcggctctggcaccgacttcaccctgaagatcagccgggtggaagccgaggacgtgggcgtgtactactgttttcaaggcagccacgtgccccggacctttggcggaggaacaaaggtggaaatcaagagagccctcgaggacctgaagaacgtgttcccacctgaggtggccgtgttcgagcctagcgaggccgagatcagccacacccagaaagccaccctcgtgtgcctggctaccggcttctaccccgaccatgtggaactgtcttggtgggtcaacggcaaagaggtgcacagcggcgtgtgtaccgacccccagccactgaaagaacagcccgccctgaacgacagccggtactgcctgagcagcagactgagagtgtccgccaccttctggcagaacccccggaaccacttcagatgccaggtgcagttctacggcctgagcgagaacgacgagtggacccaggacagagccaagcccgtgacccagatcgtgtctgccgaagcctggggcagagccgatgatgtgattaagatccactggcaggaaaagaagtccaacaccatcctgggcagccaggaaggcaacaccatgaagaccaacgacacctacatgaagttcagctggctgaccgtgcccgagaagtccctggacaaagaacacagatgcatcgtgcggcacgaaaacaacaagaacggcgtggaccaggaaatcatcttcccacccatcaagaccgatgtgattacaatggaccccaaggacaactgctccaaggacgccaacgataccctgctgctccagctgaccaacaccagcgcctactacatgtacttgttgctgctgctgaagtccgtggtgtacttcgccatcatcacatgctgcctgctgatggctatggtcaagcggaaggacagccggggaagggccaagcgatctggatctggagcaacaaacttctcactactcaaacaagcaggtgacgtggaggagaatcccgggcctactagtatggactggatttggcgcatccttttccttgtcggcgctgctaccggcgcgcattccttcgaacagatccaactggtgcagagcggcagcgagctgaagaaacctggggccagcgtgaaggtgtcctgcaaggccagcggctacacctttaccaactacggcatgaactgggtgcgccaggcccctggacagggcctgaaatggatgggctggatcaacaccaacaccggcgagcctaagtacgccgaagagttcaagggcagattcgccctgagcctggacaccagcgtgtccacagcctacctccagatcaacagcctgaaggccgaggataccgccgtgtacttctgcgccagaggctacggcaactacgccagaggggcttggctggcctattggggccagggaacactcgtgaccgtgtcctctacgcgtatccagaaccctgatcctgccgtgtaccagctgcgggatagcaagagcagcgacaagagcgtgtgtctgttcaccgacttcgacagccagaccaacgtgtcccagagcaaggactccgacgtgtacatcaccgataagtgcgtgctggacatgcggagcatggacttcaagagcaactccgccgtggcctggtccaacaagtccgatttcgcctgcgccaacgccttcaacaacagcattatccccgaggacacattcttcccaagccccgagagcagcgactccaccgaccacgtgaagcccaaagagacagagaacaccaagcagcccagcaagagctgccacaagcccaaggccatcgtgcacaccgagaaagtgaacatgatgagcctgaccgtgctgggcctgcggatgctgttcgccaaaaccgtggccgtgaacttcctgctgaccgccaagctgttcttcctcctcaccgcc

SEQ ID NO: 6027 - DNA, 2154 bp, synthetic construct
  source 1..2154: mol_type = other DNA
atggccttaccagtgaccgccttgctcctgccgctggccttgctgctccacgccgccaggccggacgagatcgtgctgacacagagccctgccacactctctctgagccctggcgaaagagccaccctgagctgtagcgccagcagcagcatcaactacatctactggctccagcagaagcccggccaggcccccagaatcctgatctacctgaccagcaacctggcctccggcgtgccagccagattttctggcagcggctccggcaccgacttcaccctgacaatcagcagcctggaacccgaggacttcgccgtgtactactgcctccagtggtccagcaaccccctgacctttggcggaggcaccaaggtggaaatcaagctcgaggacctgaagaacgtgttcccacctgaggtggccgtgttcgagcctagcgaggccgagatcagccacacccagaaagccaccctcgtgtgcctggctaccggcttctaccccgaccatgtggaactgtcttggtgggtcaacggcaaagaggtgcacagcggcgtgtgtaccgacccccagccactgaaagaacagcccgccctgaacgacagccggtactgcctgagcagcagactgagagtgtccgccaccttctggcagaacccccggaaccacttcagatgccaggtgcagttctacggcctgagcgagaacgacgagtggacccaggacagagccaagcccgtgacccagatcgtgtctgccgaagcctggggcagagccgatgatgtgattaagatccactggcaggaaaagaagtccaacaccatcctgggcagccaggaaggcaacaccatgaagaccaacgacacctacatgaagttcagctggctgaccgtgcccgagaagtccctggacaaagaacacagatgcatcgtgcggcacgaaaacaacaagaacggcgtggaccaggaaatcatcttcccacccatcaagaccgatgtgattacaatggaccccaaggacaactgctccaaggacgccaacgataccctgctgctccagctgaccaacaccagcgcctactacatgtacttgttgctgctgctgaagtccgtggtgtacttcgccatcatcacatgctgcctgctgatggctatggtcaagcggaaggacagccggggaagggccaagcgatctggatctggagcaacaaacttctcactactcaaacaagcaggtgacgtggaggagaatcccgggcctactagtatggactggatttggcgcatccttttccttgtcggcgctgctaccggcgcgcattccttcgaagaagtgcaactggtggaaagcgggggaggacttgtgaagcctggcggctctctgagactgagctgtgccgcctctggcttcaccttcagcagctacgacatgagctgggtgcgccaggctcctggcaagggactggaatgggtgtccaccatcagcagcggcggcagctacacctactacctggacagcatcaagggccggttcaccatctccagagacaacgccaagaacagcctgtacctccagatgaactccctgcgggccgaggacacagccgtgtattattgcgccagacagggcctggattactggggcagaggcacccttgtgaccgtgtcctctacgcgtatccagaaccctgatcctgccgtgtaccagctgcgggatagcaagagcagcgacaagagcgtgtgtctgttcaccgacttcgacagccagaccaacgtgtcccagagcaaggactccgacgtgtacatcaccgataagtgcgtgctggacatgcggagcatggacttcaagagcaactccgccgtggcctggtccaacaagtccgatttcgcctgcgccaacgccttcaacaacagcattatccccgaggacacattcttcccaagccccgagagcagcgactccaccgaccacgtgaagcccaaagagacagagaacaccaagcagcccagcaagagctgccacaagcccaaggccatcgtgcacaccgagaaagtgaacatgatgagcctgaccgtgctgggcctgcggatgctgttcgccaaaaccgtggccgtgaacttcctgctgaccgccaagctgttcttcctcctcaccgcc

SEQ ID NO: 6028 - DNA, 2181 bp, synthetic construct
  source 1..2181: mol_type = other DNA
atggccttaccagtgaccgccttgctcctgccgctggccttgctgctccacgccgccaggccggacatcgtgatgacccagagccccgatagcctggccgtgtctctgggagagagagccaccatcaactgccgggccagcaagagcgtgtccaccagcggctacagcttcatgcactggtatcagcagaagcccggccagccccccaagctgctgatctacctggcctccaacctggaaagcggcgtgcccgatagattcagcggcagcggctctggcaccgacttcaccctgaccatcagttctcttcaggccgaggacgtggccgtgtactactgccagcacagcagagaggtgccctggacattcggccagggcacaaaggtggaaatcaagcggctcgaggacctgaagaacgtgttcccacctgaggtggccgtgttcgagcctagcgaggccgagatcagccacacccagaaagccaccctcgtgtgcctggctaccggcttctaccccgaccatgtggaactgtcttggtgggtcaacggcaaagaggtgcacagcggcgtgtgtaccgacccccagccactgaaagaacagcccgccctgaacgacagccggtactgcctgagcagcagactgagagtgtccgccaccttctggcagaacccccggaaccacttcagatgccaggtgcagttctacggcctgagcgagaacgacgagtggacccaggacagagccaagcccgtgacccagatcgtgtctgccgaagcctggggcagagccgatgatgtgattaagatccactggcaggaaaagaagtccaacaccatcctgggcagccaggaaggcaacaccatgaagaccaacgacacctacatgaagttcagctggctgaccgtgcccgagaagtccctggacaaagaacacagatgcatcgtgcggcacgaaaacaacaagaacggcgtggaccaggaaatcatcttcccacccatcaagaccgatgtgattacaatggaccccaaggacaactgctccaaggacgccaacgataccctgctgctccagctgaccaacaccagcgcctactacatgtacttgttgctgctgctgaagtccgtggtgtacttcgccatcatcacatgctgcctgctgatggctatggtcaagcggaaggacagccggggaagggccaagcgatctggatctggagcaacaaacttctcactactcaaacaagcaggtgacgtggaggagaatcccgggcctactagtatggactggatttggcgcatccttttccttgtcggcgctgctaccggcgcgcattccttcgaacaggtgcagctggtgcagtctggggccgaagtgaagaaacctggggccagcgtgaaggtgtcctgcaaggccagcggatacacctttaccaactacggcatgaactgggtgcgccaggcccctggacagggcctggaatggatgggctggatcaacacctacaccggcgagcccacatacgccgacgccttcaagggcagattcgccttcagcctggacaccagcacctccaccgcctacctccagatcaacagcctgcggagcgacgacaccgccgtgtattattgcgccagagattacggcgactacgggatggactattggggccagggaaccaccgtgaccgtgtcctctacgcgtatccagaaccctgatcctgccgtgtaccagctgcgggatagcaagagcagcgacaagagcgtgtgtctgttcaccgacttcgacagccagaccaacgtgtcccagagcaaggactccgacgtgtacatcaccgataagtgcgtgctggacatgcggagcatggacttcaagagcaactccgccgtggcctggtccaacaagtccgatttcgcctgcgccaacgccttcaacaacagcattatccccgaggacacattcttcccaagccccgagagcagcgactccaccgaccacgtgaagcccaaagagacagagaacaccaagcagcccagcaagagctgccacaagcccaaggccatcgtgcacaccgagaaagtgaacatgatgagcctgaccgtgctgggcctgcggatgctgttcgccaaaaccgtggccgtgaacttcctgctgaccgccaagctgttcttcctcctcaccgcc

SEQ ID NO: 6029 - DNA, 2169 bp, synthetic construct
  source 1..2169: mol_type = other DNA
atggccttaccagtgaccgccttgctcctgccgctggccttgctgctccacgccgccaggccggacatcgtgatgacccagacccccctgaccctgagcgtgacaatcggacagcctgccagcatctcctgcaagagcagccagagcctgctggacagcgacggcaagacctacctgaactggctgctgcagaggccaggccagagccccgagagactgatctacctggtgtccaagctggactccggcgtgcccgatagattcacaggcagcggctccggcaccgacttcaccctgaagatcagccgggtggaagccgaggacctgggcgtgtactgttgttggcagggcacccacttcccttacaccttcggcggagggaccaaggtggaaatcaagggcctcgaggacctgaagaacgtgttcccacctgaggtggccgtgttcgagcctagcgaggccgagatcagccacacccagaaagccaccctcgtgtgcctggctaccggcttctaccccgaccatgtggaactgtcttggtgggtcaacggcaaagaggtgcacagcggcgtgtgtaccgacccccagccactgaaagaacagcccgccctgaacgacagccggtactgcctgagcagcagactgagagtgtccgccaccttctggcagaacccccggaaccacttcagatgccaggtgcagttctacggcctgagcgagaacgacgagtggacccaggacagagccaagcccgtgacccagatcgtgtctgccgaagcctggggcagagccgatgatgtgattaagatccactggcaggaaaagaagtccaacaccatcctgggcagccaggaaggcaacaccatgaagaccaacgacacctacatgaagttcagctggctgaccgtgcccgagaagtccctggacaaagaacacagatgcatcgtgcggcacgaaaacaacaagaacggcgtggaccaggaaatcatcttcccacccatcaagaccgatgtgattacaatggaccccaaggacaactgctccaaggacgccaacgataccctgctgctccagctgaccaacaccagcgcctactacatgtacttgttgctgctgctgaagtccgtggtgtacttcgccatcatcacatgctgcctgctgatggctatggtcaagcggaaggacagccggggaagggccaagcgatctggatctggagcaacaaacttctcactactcaaacaagcaggtgacgtggaggagaatcccgggcctactagtatggactggatttggcgcatccttttccttgtcggcgctgctaccggcgcgcattccttcgaacaggtgcaactgcagcagcctggcgctgaacttgtgcggccaggcgcctctgtgaagctgagctgtaaagccagcggctacaccttcaccagctactggatgaactgggtcaagcagcgcccaggccagggcctggaatggatcggaatgatcgaccccagcgacagcgagacacactacaaccacatcttcaaggacaaggccaccctgaccgtggacaagtccagcagcacagcctacctgcaactgtccagcctgaccagcgaggacagcgccgtgtactactgcgcccggaacctgtatctgtggggccagggaacaagcgtgaccgtgtctagcacgcgtatccagaaccctgatcctgccgtgtaccagctgcgggatagcaagagcagcgacaagagcgtgtgtctgttcaccgacttcgacagccagaccaacgtgtcccagagcaaggactccgacgtgtacatcaccgataagtgcgtgctggacatgcggagcatggacttcaagagcaactccgccgtggcctggtccaacaagtccgatttcgcctgcgccaacgccttcaacaacagcattatccccgaggacacattcttcccaagccccgagagcagcgactccaccgaccacgtgaagcccaaagagacagagaacaccaagcagcccagcaagagctgccacaagcccaaggccatcgtgcacaccgagaaagtgaacatgatgagcctgaccgtgctgggcctgcggatgctgttcgccaaaaccgtggccgtgaacttcctgctgaccgccaagctgttcttcctcctcaccgcc

SEQ ID NO: 6030 - DNA, 2193 bp, synthetic construct
  source 1..2193: mol_type = other DNA
atggccttaccagtgaccgccttgctcctgccgctggccttgctgctccacgccgccaggccggacatcgtgatgacccagagccccgatagcctggccgtgtctctgggagagagagccaccatcaactgcgagagcagccagagcctgctgaacagcggcaaccagaagaactacctgacctggtatcagcagaagcccggccagccccccaagcccctgatctattgggccagcaccagagaaagcggcgtgcccgatagattcagcggcagcggaagcggcaccgacttcaccctgaccatcagttctcttcaggccgaggacgtggccgtgtactactgccagaacgactacagctacccctacaccttcggccagggcaccaagctggaaatcaagagactcgaggacctgaagaacgtgttcccacctgaggtggccgtgttcgagcctagcgaggccgagatcagccacacccagaaagccaccctcgtgtgcctggctaccggcttctaccccgaccatgtggaactgtcttggtgggtcaacggcaaagaggtgcacagcggcgtgtgtaccgacccccagccactgaaagaacagcccgccctgaacgacagccggtactgcctgagcagcagactgagagtgtccgccaccttctggcagaacccccggaaccacttcagatgccaggtgcagttctacggcctgagcgagaacgacgagtggacccaggacagagccaagcccgtgacccagatcgtgtctgccgaagcctggggcagagccgatgatgtgattaagatccactggcaggaaaagaagtccaacaccatcctgggcagccaggaaggcaacaccatgaagaccaacgacacctacatgaagttcagctggctgaccgtgcccgagaagtccctggacaaagaacacagatgcatcgtgcggcacgaaaacaacaagaacggcgtggaccaggaaatcatcttcccacccatcaagaccgatgtgattacaatggaccccaaggacaactgctccaaggacgccaacgataccctgctgctccagctgaccaacaccagcgcctactacatgtacttgttgctgctgctgaagtccgtggtgtacttcgccatcatcacatgctgcctgctgatggctatggtcaagcggaaggacagccggggaagggccaagcgatctggatctggagcaacaaacttctcactactcaaacaagcaggtgacgtggaggagaatcccgggcctactagtatggactggatttggcgcatccttttccttgtcggcgctgctaccggcgcgcattccttcgaagaagtgcagctggtgcagtctggggccgaagtgaagaagcctggcgagagcctgaagatcagctgcaagggcagcggctacagcttcaccgactactacatgaagtgggccagacagatgcccggcaagggcctggaatggatgggcgacatcatccccagcaacggggccaccttctacaaccagaaattcaagggccaagtgaccatctccgccgacaagagcatcagcaccacctacctccagtggtccagcctgaaggccagcgacaccgccatgtactattgcgccagaagccatctgctgcgggccagttggttcgcctattggggccagggaacaatggtcacagtgtccagcacgcgtatccagaaccctgatcctgccgtgtaccagctgcgggatagcaagagcagcgacaagagcgtgtgtctgttcaccgacttcgacagccagaccaacgtgtcccagagcaaggactccgacgtgtacatcaccgataagtgcgtgctggacatgcggagcatggacttcaagagcaactccgccgtggcctggtccaacaagtccgatttcgcctgcgccaacgccttcaacaacagcattatccccgaggacacattcttcccaagccccgagagcagcgactccaccgaccacgtgaagcccaaagagacagagaacaccaagcagcccagcaagagctgccacaagcccaaggccatcgtgcacaccgagaaagtgaacatgatgagcctgaccgtgctgggcctgcggatgctgttcgccaaaaccgtggccgtgaacttcctgctgaccgccaagctgttcttcctcctcaccgcc

SEQ ID NO: 6031 - DNA, 2178 bp, synthetic construct
  source 1..2178: mol_type = other DNA
atggccttaccagtgaccgccttgctcctgccgctggccttgctgctccacgccgccaggccggacatccagatgacccagtctaccagttccctgagtgcatccctcggagacagggtgacgatcagttgcagcgcaagccaagggatcaataactatctgaactggtatcagcagaaaccggacggaacagtcgaactcctgatttattacaccagcacccttcagagtggcgtcccttcccggttcagtggctccggaagcgggaccgattactccctgaccatttctaatctggagccagaggacataggaacgtattattgccagcagtatagtaaactgccacgaacttttggaggggggacgaaactggagatcaaactcgaggacctgaagaacgtgttcccacctgaggtggccgtgttcgagcctagcgaggccgagatcagccacacccagaaagccaccctcgtgtgcctggctaccggcttctaccccgaccatgtggaactgtcttggtgggtcaacggcaaagaggtgcacagcggcgtgtgtaccgacccccagccactgaaagaacagcccgccctgaacgacagccggtactgcctgagcagcagactgagagtgtccgccaccttctggcagaacccccggaaccacttcagatgccaggtgcagttctacggcctgagcgagaacgacgagtggacccaggacagagccaagcccgtgacccagatcgtgtctgccgaagcctggggcagagccgatgatgtgattaagatccactggcaggaaaagaagtccaacaccatcctgggcagccaggaaggcaacaccatgaagaccaacgacacctacatgaagttcagctggctgaccgtgcccgagaagtccctggacaaagaacacagatgcatcgtgcggcacgaaaacaacaagaacggcgtggaccaggaaatcatcttcccacccatcaagaccgatgtgattacaatggaccccaaggacaactgctccaaggacgccaacgataccctgctgctccagctgaccaacaccagcgcctactacatgtacttgttgctgctgctgaagtccgtggtgtacttcgccatcatcacatgctgcctgctgatggctatggtcaagcggaaggacagccggggaagggccaagcgatctggatctggagcaacaaacttctcactactcaaacaagcaggtgacgtggaggagaatcccgggcctactagtatggactggatttggcgcatccttttccttgtcggcgctgctaccggcgcgcattccttcgaacaggtgcaactccagcagtccggaagcgagcttatgatgccaggggcatcagtgaagatcagctgcaaggctactggctacaccttctctaattactggatagagtgggttaaacaaaggccagggcacggcctggaatggatcggcgagatcctgcctgggacaggccgaaccatttataacgagaagttcaaaggcaaggctactttcaccgcagatataagctctaatacagtgcaaatgcagctctcttccctgacaagtgaggatagtgccgtgtattattgcgcacgaagagattactatggaaatttttattacgctatggattattggggtcaaggaacaagtgtgaccgttagcagcacgcgtatccagaaccctgatcctgccgtgtaccagctgcgggatagcaagagcagcgacaagagcgtgtgtctgttcaccgacttcgacagccagaccaacgtgtcccagagcaaggactccgacgtgtacatcaccgataagtgcgtgctggacatgcggagcatggacttcaagagcaactccgccgtggcctggtccaacaagtccgatttcgcctgcgccaacgccttcaacaacagcattatccccgaggacacattcttcccaagccccgagagcagcgactccaccgaccacgtgaagcccaaagagacagagaacaccaagcagcccagcaagagctgccacaagcccaaggccatcgtgcacaccgagaaagtgaacatgatgagcctgaccgtgctgggcctgcggatgctgttcgccaaaaccgtggccgtgaacttcctgctgaccgccaagctgttcttcctcctcaccgcc

SEQ ID NO: 6032 - DNA, 2163 bp, synthetic construct
  source 1..2163: mol_type = other DNA
atggccttaccagtgaccgccttgctcctgccgctggccttgctgctccacgccgccaggccggacatccagatgacccagagccctgccagcctgtccgtgtctgtgggcgagacagtgaccatcacctgtcgggccagcgagaacatctacagcaacctggcctggtatcagcagaagcagggcaagagcccccaactgctggtgtacgccgccaccaatctggccgatggcgtgcccagcagattttccggctctggcagcggcacccagtacagcctgaagatcaacagcctccagagcgaggacttcggcagctactactgccagcacttctggggcacctggacctttggaggaggcaccaccctggaaatcaagctcgaggacctgaagaacgtgttcccacctgaggtggccgtgttcgagcctagcgaggccgagatcagccacacccagaaagccaccctcgtgtgcctggctaccggcttctaccccgaccatgtggaactgtcttggtgggtcaacggcaaagaggtgcacagcggcgtgtgtaccgacccccagccactgaaagaacagcccgccctgaacgacagccggtactgcctgagcagcagactgagagtgtccgccaccttctggcagaacccccggaaccacttcagatgccaggtgcagttctacggcctgagcgagaacgacgagtggacccaggacagagccaagcccgtgacccagatcgtgtctgccgaagcctggggcagagccgatgatgtgattaagatccactggcaggaaaagaagtccaacaccatcctgggcagccaggaaggcaacaccatgaagaccaacgacacctacatgaagttcagctggctgaccgtgcccgagaagtccctggacaaagaacacagatgcatcgtgcggcacgaaaacaacaagaacggcgtggaccaggaaatcatcttcccacccatcaagaccgatgtgattacaatggaccccaaggacaactgctccaaggacgccaacgataccctgctgctccagctgaccaacaccagcgcctactacatgtacttgttgctgctgctgaagtccgtggtgtacttcgccatcatcacatgctgcctgctgatggctatggtcaagcggaaggacagccggggaagggccaagcgatctggatctggagcaacaaacttctcactactcaaacaagcaggtgacgtggaggagaatcccgggcctactagtatggactggatttggcgcatccttttccttgtcggcgctgctaccggcgcgcattccttcgaagaagtgcaactccagcagagcggccctgagcttgtgaagcctggcgcttccgtgaagatgagctgcaaggccagcggctacaccttcaccgactactacatgaagtggatgaagcagagccacggcaagtccctggaatggatcggcgacatcaaccccaacaacggcggcaccacctacaaccagaagttcaagggcaaggccaccctgaccgtggacaagagcagcagcaccgcctacatgcaactgaacagcctgaccagcgaggacagcgccgtgtactactgcgccagagactacggctacggctatttcgactactggggccagggcacaaccctgacagtgtcctctacgcgtatccagaaccctgatcctgccgtgtaccagctgcgggatagcaagagcagcgacaagagcgtgtgtctgttcaccgacttcgacagccagaccaacgtgtcccagagcaaggactccgacgtgtacatcaccgataagtgcgtgctggacatgcggagcatggacttcaagagcaactccgccgtggcctggtccaacaagtccgatttcgcctgcgccaacgccttcaacaacagcattatccccgaggacacattcttcccaagccccgagagcagcgactccaccgaccacgtgaagcccaaagagacagagaacaccaagcagcccagcaagagctgccacaagcccaaggccatcgtgcacaccgagaaagtgaacatgatgagcctgaccgtgctgggcctgcggatgctgttcgccaaaaccgtggccgtgaacttcctgctgaccgccaagctgttcttcctcctcaccgcc

SEQ ID NO: 6033 - DNA, 2172 bp, synthetic construct
  source 1..2172: mol_type = other DNA
atggccttaccagtgaccgccttgctcctgccgctggccttgctgctccacgccgccaggccggagatcgtgctgacacagagccctggcaccctgagcctgtctccaggcgaaagagccacactgagctgtcgggcctctcagagcgtgggaggctacctggcttggtatcagcagaagccaggccaggcccccagactgctgatctacgacgccagcaatcgggccacaggcatccccgccagattttctggcagcggctccggcaccgacttcaccctgacaatcagcagcctggaacccgaggacttcgccgtgtactactgccagcagcggaacaactggccccccatgtacacattcggccagggcaccaagctggaaatcaagagactcgaggacctgaagaacgtgttcccacctgaggtggccgtgttcgagcctagcgaggccgagatcagccacacccagaaagccaccctcgtgtgcctggctaccggcttctaccccgaccatgtggaactgtcttggtgggtcaacggcaaagaggtgcacagcggcgtgtgtaccgacccccagccactgaaagaacagcccgccctgaacgacagccggtactgcctgagcagcagactgagagtgtccgccaccttctggcagaacccccggaaccacttcagatgccaggtgcagttctacggcctgagcgagaacgacgagtggacccaggacagagccaagcccgtgacccagatcgtgtctgccgaagcctggggcagagccgatgatgtgattaagatccactggcaggaaaagaagtccaacaccatcctgggcagccaggaaggcaacaccatgaagaccaacgacacctacatgaagttcagctggctgaccgtgcccgagaagtccctggacaaagaacacagatgcatcgtgcggcacgaaaacaacaagaacggcgtggaccaggaaatcatcttcccacccatcaagaccgatgtgattacaatggaccccaaggacaactgctccaaggacgccaacgataccctgctgctccagctgaccaacaccagcgcctactacatgtacttgttgctgctgctgaagtccgtggtgtacttcgccatcatcacatgctgcctgctgatggctatggtcaagcggaaggacagccggggaagggccaagcgatctggatctggagcaacaaacttctcactactcaaacaagcaggtgacgtggaggagaatcccgggcctactagtatggactggatttggcgcatccttttccttgtcggcgctgctaccggcgcgcattccttcgaacaggtgcaactggtgcagagcggagccgaagtgaagaaacccggcagcagcgtgaaggtgtcctgcaaggcttccggcggcaccttcagcagctacgccatttcttgggtgcgccaggctcctggacagggcctggaatggatgggcggcatcatccctatcctgggcaccgccaactacgcccagaaattccagggcagagtgaccatcaccgccgacgagagcaccagcaccgcctacatggaactgagcagcctgcggagcgaggacacagccgtgtattattgcgccagatggggcggaggggccttcgacatttggggccagggaacaatggtcaccgtgtccagcacgcgtatccagaaccctgatcctgccgtgtaccagctgcgggatagcaagagcagcgacaagagcgtgtgtctgttcaccgacttcgacagccagaccaacgtgtcccagagcaaggactccgacgtgtacatcaccgataagtgcgtgctggacatgcggagcatggacttcaagagcaactccgccgtggcctggtccaacaagtccgatttcgcctgcgccaacgccttcaacaacagcattatccccgaggacacattcttcccaagccccgagagcagcgactccaccgaccacgtgaagcccaaagagacagagaacaccaagcagcccagcaagagctgccacaagcccaaggccatcgtgcacaccgagaaagtgaacatgatgagcctgaccgtgctgggcctgcggatgctgttcgccaaaaccgtggccgtgaacttcctgctgaccgccaagctgttcttcctcctcaccgcc

SEQ ID NO: 6034 - DNA, 2157 bp, synthetic construct
  source 1..2157: mol_type = other DNA
atggccttaccagtgaccgccttgctcctgccgctggccttgctgctccacgccgccaggccgcagatcgtgctgacacagagccctgccctgatgagcgccagccctggcgagaaagtgaccatgacctgtagcgccagcagcagcgtgcgctacatgtactggtatcagcagaagcccagaagcagccccaagccctggattcacctgaccagcaatctggcctctggcgtgcccgctagattttccggctctggcagcggcaccagctacagcctgaccatcagcagcatggaagccgaggacgccgccacctactactgccagcagtggtccagccaccccttcacatttggctccggcaccaagctggaaatcaagctcgaggacctgaagaacgtgttcccacctgaggtggccgtgttcgagcctagcgaggccgagatcagccacacccagaaagccaccctcgtgtgcctggctaccggcttctaccccgaccatgtggaactgtcttggtgggtcaacggcaaagaggtgcacagcggcgtgtgtaccgacccccagccactgaaagaacagcccgccctgaacgacagccggtactgcctgagcagcagactgagagtgtccgccaccttctggcagaacccccggaaccacttcagatgccaggtgcagttctacggcctgagcgagaacgacgagtggacccaggacagagccaagcccgtgacccagatcgtgtctgccgaagcctggggcagagccgatgatgtgattaagatccactggcaggaaaagaagtccaacaccatcctgggcagccaggaaggcaacaccatgaagaccaacgacacctacatgaagttcagctggctgaccgtgcccgagaagtccctggacaaagaacacagatgcatcgtgcggcacgaaaacaacaagaacggcgtggaccaggaaatcatcttcccacccatcaagaccgatgtgattacaatggaccccaaggacaactgctccaaggacgccaacgataccctgctgctccagctgaccaacaccagcgcctactacatgtacttgttgctgctgctgaagtccgtggtgtacttcgccatcatcacatgctgcctgctgatggctatggtcaagcggaaggacagccggggaagggccaagcgatctggatctggagcaacaaacttctcactactcaaacaagcaggtgacgtggaggagaatcccgggcctactagtatggactggatttggcgcatccttttccttgtcggcgctgctaccggcgcgcattccttcgaagatgtgcaactccaggaaagcggccctggccttgtgaagcctagccagagcctgtccctgacctgtaccgtgaccggcttcagcatcaccagcgactactcttggaactggatcagacagttccctggcaacaaactggaatggatgggctacatcagctactccggccacacctcctacaaccccagcctggaaagccggatctccatcaccagagacaccagcaagaaccagttcttcttgcaactgaacagcgtgaccaccgaggataccgccacatattactgtaccagaggcaactgggacgtggtgtactggggccagggcacacttgtgaccgtgtctgctacgcgtatccagaaccctgatcctgccgtgtaccagctgcgggatagcaagagcagcgacaagagcgtgtgtctgttcaccgacttcgacagccagaccaacgtgtcccagagcaaggactccgacgtgtacatcaccgataagtgcgtgctggacatgcggagcatggacttcaagagcaactccgccgtggcctggtccaacaagtccgatttcgcctgcgccaacgccttcaacaacagcattatccccgaggacacattcttcccaagccccgagagcagcgactccaccgaccacgtgaagcccaaagagacagagaacaccaagcagcccagcaagagctgccacaagcccaaggccatcgtgcacaccgagaaagtgaacatgatgagcctgaccgtgctgggcctgcggatgctgttcgccaaaaccgtggccgtgaacttcctgctgaccgccaagctgttcttcctcctcaccgcc

SEQ ID NO: 6035 - DNA, 2187 bp, synthetic construct
  source 1..2187: mol_type = other DNA
atggccttaccagtgaccgccttgctcctgccgctggccttgctgctccacgccgccaggccggacgtcgtgatgacccagagccctctgagcctgcctgtgacactgggacagcctgccagcatctcctgtcggagcagccagagcatcgtgcacagcgacggcaacacctacctggaatggtatcagcagcggccaggccagagccccagacggctgatctacaaggtgtccaacagattcagcggcgtgcccgacagattctccggcagcggctctggcaccgacttcaccctgaagatcagcagagtggaagccgaggacgtgggcgtgtactactgttttcaaggcagccacgccccctggacctttggcggaggaacaaaggtggaaatcaagctcgaggacctgaagaacgtgttcccacctgaggtggccgtgttcgagcctagcgaggccgagatcagccacacccagaaagccaccctcgtgtgcctggctaccggcttctaccccgaccatgtggaactgtcttggtgggtcaacggcaaagaggtgcacagcggcgtgtgtaccgacccccagccactgaaagaacagcccgccctgaacgacagccggtactgcctgagcagcagactgagagtgtccgccaccttctggcagaacccccggaaccacttcagatgccaggtgcagttctacggcctgagcgagaacgacgagtggacccaggacagagccaagcccgtgacccagatcgtgtctgccgaagcctggggcagagccgatgatgtgattaagatccactggcaggaaaagaagtccaacaccatcctgggcagccaggaaggcaacaccatgaagaccaacgacacctacatgaagttcagctggctgaccgtgcccgagaagtccctggacaaagaacacagatgcatcgtgcggcacgaaaacaacaagaacggcgtggaccaggaaatcatcttcccacccatcaagaccgatgtgattacaatggaccccaaggacaactgctccaaggacgccaacgataccctgctgctccagctgaccaacaccagcgcctactacatgtacttgttgctgctgctgaagtccgtggtgtacttcgccatcatcacatgctgcctgctgatggctatggtcaagcggaaggacagccggggaagggccaagcgatctggatctggagcaacaaacttctcactactcaaacaagcaggtgacgtggaggagaatcccgggcctactagtatggactggatttggcgcatccttttccttgtcggcgctgctaccggcgcgcattccttcgaagaagtgcaactggtggaatcaggcggcggactggtgcagcctggcggatctctgagactgagctgtgccgccagcggcttcaccttcagcagctacggaatgcactgggtgcgccaggcccctggcaaaggactggaatgggtggcctacatcaccaccagaagcagcaccatctactacgccgacagcgtgaagggccggttcaccatctccagagacaacgccaagaacagcctgtacctccagatgaactccctgcgggccgaggacaccgccgtgtactattgcaccagagagcccctgaccggctactacgctatggactattggggccagggcaccagcgtgaccgtgtctagtacgcgtatccagaaccctgatcctgccgtgtaccagctgcgggatagcaagagcagcgacaagagcgtgtgtctgttcaccgacttcgacagccagaccaacgtgtcccagagcaaggactccgacgtgtacatcaccgataagtgcgtgctggacatgcggagcatggacttcaagagcaactccgccgtggcctggtccaacaagtccgatttcgcctgcgccaacgccttcaacaacagcattatccccgaggacacattcttcccaagccccgagagcagcgactccaccgaccacgtgaagcccaaagagacagagaacaccaagcagcccagcaagagctgccacaagcccaaggccatcgtgcacaccgagaaagtgaacatgatgagcctgaccgtgctgggcctgcggatgctgttcgccaaaaccgtggccgtgaacttcctgctgaccgccaagctgttcttcctcctcaccgcc

SEQ ID NO: 6036 - DNA, 2163 bp, synthetic construct
  source 1..2163: mol_type = other DNA
atggccttaccagtgaccgccttgctcctgccgctggccttgctgctccacgccgccaggccggacatccagatgacccagagccccagcagcctgtctgccagcgtgggcgacagagtgaccatcacctgtagagccagccagagcatcagcctgtggctgaactggtatcagcagaagcccggcaaggcccccaagctgctgatctacgccgccagcacactccagagcggcgtgccaagcagattttccggcagcggctccggcaccgacttcaccctgacaatcagctccctccagcccgaggacttcgccacctactactgccagcagtactacaccagcccctacaccttcggccagggcaccaaggtggaaatcaagagactcgaggacctgaagaacgtgttcccacctgaggtggccgtgttcgagcctagcgaggccgagatcagccacacccagaaagccaccctcgtgtgcctggctaccggcttctaccccgaccatgtggaactgtcttggtgggtcaacggcaaagaggtgcacagcggcgtgtgtaccgacccccagccactgaaagaacagcccgccctgaacgacagccggtactgcctgagcagcagactgagagtgtccgccaccttctggcagaacccccggaaccacttcagatgccaggtgcagttctacggcctgagcgagaacgacgagtggacccaggacagagccaagcccgtgacccagatcgtgtctgccgaagcctggggcagagccgatgatgtgattaagatccactggcaggaaaagaagtccaacaccatcctgggcagccaggaaggcaacaccatgaagaccaacgacacctacatgaagttcagctggctgaccgtgcccgagaagtccctggacaaagaacacagatgcatcgtgcggcacgaaaacaacaagaacggcgtggaccaggaaatcatcttcccacccatcaagaccgatgtgattacaatggaccccaaggacaactgctccaaggacgccaacgataccctgctgctccagctgaccaacaccagcgcctactacatgtacttgttgctgctgctgaagtccgtggtgtacttcgccatcatcacatgctgcctgctgatggctatggtcaagcggaaggacagccggggaagggccaagcgatctggatctggagcaacaaacttctcactactcaaacaagcaggtgacgtggaggagaatcccgggcctactagtatggactggatttggcgcatccttttccttgtcggcgctgctaccggcgcgcattccttcgaacaggtgcaactgctggaatctggcggcggactggtgcagcctggcggatctctgagactgagctgtgccgccagcggcttcaccttcagcagctacgccatgagctgggtgcgccaggcccctggaaaaggactggaatgggtgtccgtgatccggtccagcggcagcagcacctattacgccgatagcgtgaagggccggttcaccatcagccgggacaacagcaagaacaccctgtacctccagatgaacagcctgcgggccgaggacaccgccgtgtactattgtgctaggggaggcggctacttcgactactggggccagggaacactcgtgaccgtgtcctctacgcgtatccagaaccctgatcctgccgtgtaccagctgcgggatagcaagagcagcgacaagagcgtgtgtctgttcaccgacttcgacagccagaccaacgtgtcccagagcaaggactccgacgtgtacatcaccgataagtgcgtgctggacatgcggagcatggacttcaagagcaactccgccgtggcctggtccaacaagtccgatttcgcctgcgccaacgccttcaacaacagcattatccccgaggacacattcttcccaagccccgagagcagcgactccaccgaccacgtgaagcccaaagagacagagaacaccaagcagcccagcaagagctgccacaagcccaaggccatcgtgcacaccgagaaagtgaacatgatgagcctgaccgtgctgggcctgcggatgctgttcgccaaaaccgtggccgtgaacttcctgctgaccgccaagctgttcttcctcctcaccgcc

SEQ ID NO: 6037 - DNA, 2172 bp, synthetic construct
  source 1..2172: mol_type = other DNA
atggccttaccagtgaccgccttgctcctgccgctggccttgctgctccacgccgccaggccggacatccagatgacccagagccccagcagcctgtctgccagcgtgggcgacagagtgaccatcacctgtagagccagccagagcatcagcagctacctgaactggtatcagcagaagcccggcaaggcccccaaactgctgatctacgccgtgtccacactccagagcggcgtgcccagcagattttctggcagcggctccggcaccgacttcaccctgacaatcagctccctccagcccgaggacttcgccacctactactgtcagcagagcggcaccttccctcccaccacatttggacagggcaccaaggtggaaatcaagagactcgaggacctgaagaacgtgttcccacctgaggtggccgtgttcgagcctagcgaggccgagatcagccacacccagaaagccaccctcgtgtgcctggctaccggcttctaccccgaccatgtggaactgtcttggtgggtcaacggcaaagaggtgcacagcggcgtgtgtaccgacccccagccactgaaagaacagcccgccctgaacgacagccggtactgcctgagcagcagactgagagtgtccgccaccttctggcagaacccccggaaccacttcagatgccaggtgcagttctacggcctgagcgagaacgacgagtggacccaggacagagccaagcccgtgacccagatcgtgtctgccgaagcctggggcagagccgatgatgtgattaagatccactggcaggaaaagaagtccaacaccatcctgggcagccaggaaggcaacaccatgaagaccaacgacacctacatgaagttcagctggctgaccgtgcccgagaagtccctggacaaagaacacagatgcatcgtgcggcacgaaaacaacaagaacggcgtggaccaggaaatcatcttcccacccatcaagaccgatgtgattacaatggaccccaaggacaactgctccaaggacgccaacgataccctgctgctccagctgaccaacaccagcgcctactacatgtacttgttgctgctgctgaagtccgtggtgtacttcgccatcatcacatgctgcctgctgatggctatggtcaagcggaaggacagccggggaagggccaagcgatctggatctggagcaacaaacttctcactactcaaacaagcaggtgacgtggaggagaatcccgggcctactagtatggactggatttggcgcatccttttccttgtcggcgctgctaccggcgcgcattccttcgaacaggtgcaactgctggaatctggcggcggactggtgcagcctggcggatctctgagactgagctgtgccgccagcggcttcaccttcagcagccacggaatgcactgggtgcgccaggcccctggaaagggactggaatgggtgtccgtgatctccggcagcggcagcaataccggctacgccgatagcgtgaagggccggttcaccatcagccgggacaacagcaagaacaccctgtacctccagatgaacagcctgcgggccgaggacaccgccgtgtactattgtgccagacagtggggcagctacgccttcgattcttggggccagggcaccctcgtgaccgtgtcatctacgcgtatccagaaccctgatcctgccgtgtaccagctgcgggatagcaagagcagcgacaagagcgtgtgtctgttcaccgacttcgacagccagaccaacgtgtcccagagcaaggactccgacgtgtacatcaccgataagtgcgtgctggacatgcggagcatggacttcaagagcaactccgccgtggcctggtccaacaagtccgatttcgcctgcgccaacgccttcaacaacagcattatccccgaggacacattcttcccaagccccgagagcagcgactccaccgaccacgtgaagcccaaagagacagagaacaccaagcagcccagcaagagctgccacaagcccaaggccatcgtgcacaccgagaaagtgaacatgatgagcctgaccgtgctgggcctgcggatgctgttcgccaaaaccgtggccgtgaacttcctgctgaccgccaagctgttcttcctcctcaccgcc

SEQ ID NO: 6038 - DNA, 2202 bp, synthetic construct
  source 1..2202: mol_type = other DNA
atggccttaccagtgaccgccttgctcctgccgctggccttgctgctccacgccgccaggccggacatcgtgatgagccagagccctagcagcctggccgtgtccgtgggcgagaaagtgaccatgagctgcaagagcagccagtccctgctgcacagcagcaaccagaagaactacctggcctggtatcagcagaagcccggccagtcccccaaggtgctgatctactgggccagcaccagagaaagcggcgtgcccgatagattcaccggcagcggctctggcaccgacttcaccctgaccatcaccagcgtgaagtccgaggacctggctgtgtactactgccagcagtattacagctacccctggaccttcggcggaggcacccggctggaaatcaaaagactcgaggacctgaagaacgtgttcccacctgaggtggccgtgttcgagcctagcgaggccgagatcagccacacccagaaagccaccctcgtgtgcctggctaccggcttctaccccgaccatgtggaactgtcttggtgggtcaacggcaaagaggtgcacagcggcgtgtgtaccgacccccagccactgaaagaacagcccgccctgaacgacagccggtactgcctgagcagcagactgagagtgtccgccaccttctggcagaacccccggaaccacttcagatgccaggtgcagttctacggcctgagcgagaacgacgagtggacccaggacagagccaagcccgtgacccagatcgtgtctgccgaagcctggggcagagccgatgatgtgattaagatccactggcaggaaaagaagtccaacaccatcctgggcagccaggaaggcaacaccatgaagaccaacgacacctacatgaagttcagctggctgaccgtgcccgagaagtccctggacaaagaacacagatgcatcgtgcggcacgaaaacaacaagaacggcgtggaccaggaaatcatcttcccacccatcaagaccgatgtgattacaatggaccccaaggacaactgctccaaggacgccaacgataccctgctgctccagctgaccaacaccagcgcctactacatgtacttgttgctgctgctgaagtccgtggtgtacttcgccatcatcacatgctgcctgctgatggctatggtcaagcggaaggacagccggggaagggccaagcgatctggatctggagcaacaaacttctcactactcaaacaagcaggtgacgtggaggagaatcccgggcctactagtatggactggatttggcgcatccttttccttgtcggcgctgctaccggcgcgcattccttcgaagaagtgcaactccagcagagcgtggccgagcttgtgaagcctggcgcttccgtgaagatgtcctgcaaggtgtccggctacaccctgacagaccacaccatccactggatgaagcagcggcctgagcagggcctggaatggatcggctacatctaccccagggacggcatcaccggctacaacgagaagttcaagggcaaggccacactgaccgccgacaccagcagcagcacagcctacatgcaactgaacagcctgaccagcgaggacagcgccgtgtacttctgtgccagatggggctacagctacagaaactacgcctactactacgactactggggccagggcacaaccctgaccgtgtctagtacgcgtatccagaaccctgatcctgccgtgtaccagctgcgggatagcaagagcagcgacaagagcgtgtgtctgttcaccgacttcgacagccagaccaacgtgtcccagagcaaggactccgacgtgtacatcaccgataagtgcgtgctggacatgcggagcatggacttcaagagcaactccgccgtggcctggtccaacaagtccgatttcgcctgcgccaacgccttcaacaacagcattatccccgaggacacattcttcccaagccccgagagcagcgactccaccgaccacgtgaagcccaaagagacagagaacaccaagcagcccagcaagagctgccacaagcccaaggccatcgtgcacaccgagaaagtgaacatgatgagcctgaccgtgctgggcctgcggatgctgttcgccaaaaccgtggccgtgaacttcctgctgaccgccaagctgttcttcctcctcaccgcc

SEQ ID NO: 6039 - DNA, 2193 bp, synthetic construct
  source 1..2193: mol_type = other DNA
atggccttaccagtgaccgccttgctcctgccgctggccttgctgctccacgccgccaggccggagatcgtgctgacacagagccctggcaccctgagcctgtctccaggcgaaagagccacactgagctgtcgggccagccagagcgtgtccagctcttacctggcctggtatcagcagaagcccggccaggctccccggctgctgatctacggaacaagcagcagagccaccggcatccccgacagattttctggcagcggctccggcaccgacttcaccctgacaatcagcagactggaacccgaggacttcgccgtgtactactgccagcagtacggcagcagccccttcacctttggcggaggcaccaaggtggaaatcaagagactcgaggacctgaagaacgtgttcccacctgaggtggccgtgttcgagcctagcgaggccgagatcagccacacccagaaagccaccctcgtgtgcctggctaccggcttctaccccgaccatgtggaactgtcttggtgggtcaacggcaaagaggtgcacagcggcgtgtgtaccgacccccagccactgaaagaacagcccgccctgaacgacagccggtactgcctgagcagcagactgagagtgtccgccaccttctggcagaacccccggaaccacttcagatgccaggtgcagttctacggcctgagcgagaacgacgagtggacccaggacagagccaagcccgtgacccagatcgtgtctgccgaagcctggggcagagccgatgatgtgattaagatccactggcaggaaaagaagtccaacaccatcctgggcagccaggaaggcaacaccatgaagaccaacgacacctacatgaagttcagctggctgaccgtgcccgagaagtccctggacaaagaacacagatgcatcgtgcggcacgaaaacaacaagaacggcgtggaccaggaaatcatcttcccacccatcaagaccgatgtgattacaatggaccccaaggacaactgctccaaggacgccaacgataccctgctgctccagctgaccaacaccagcgcctactacatgtacttgttgctgctgctgaagtccgtggtgtacttcgccatcatcacatgctgcctgctgatggctatggtcaagcggaaggacagccggggaagggccaagcgatctggatctggagcaacaaacttctcactactcaaacaagcaggtgacgtggaggagaatcccgggcctactagtatggactggatttggcgcatccttttccttgtcggcgctgctaccggcgcgcattccttcgaacaggtgcaactccaggaatctggccccggactggctaagcccagcgagacactgagcctgacctgtaccgtgtccggcgacagcatcaccagctactactggtcctggatcagacagccccctggcaagggcctggaatggatcggctacatctactacagcggcagcaccaactacaaccccagcctgaagtccagagtgaccatcagcgtggacaccagcaagaaccagttctccctgaagctgagcagcgtgacagccgccgacaccgccgtgtattattgcgccagagatcagcggagaatcgccgctgccggcacccacttttacggcatggatgtgtggggccagggcaccaccgtgaccgtgtcatctacgcgtatccagaaccctgatcctgccgtgtaccagctgcgggatagcaagagcagcgacaagagcgtgtgtctgttcaccgacttcgacagccagaccaacgtgtcccagagcaaggactccgacgtgtacatcaccgataagtgcgtgctggacatgcggagcatggacttcaagagcaactccgccgtggcctggtccaacaagtccgatttcgcctgcgccaacgccttcaacaacagcattatccccgaggacacattcttcccaagccccgagagcagcgactccaccgaccacgtgaagcccaaagagacagagaacaccaagcagcccagcaagagctgccacaagcccaaggccatcgtgcacaccgagaaagtgaacatgatgagcctgaccgtgctgggcctgcggatgctgttcgccaaaaccgtggccgtgaacttcctgctgaccgccaagctgttcttcctcctcaccgcc

SEQ ID NO: 6040 - DNA, 2169 bp, synthetic construct
  source 1..2169: mol_type = other DNA
atggccttaccagtgaccgccttgctcctgccgctggccttgctgctccacgccgccaggccggacatcctgctgacccagagccccgtgatcctgtccgtgtctcctggcgagagagtgtccttcagctgtcgggccagccagagcatcggcaccaacatccactggtatcagcagcggaccaacggcagccccagactgctgattaagtacgccagcgagtccatcagcggcatccccagcagattttccggcagcggctccggcaccgacttcaccctgagcatcaacagcgtggaaagcgaggacattgccgactactactgccagcagaacaacaactggcccaccaccttcggagccggcaccaagctggaactgaagctcgaggacctgaagaacgtgttcccacctgaggtggccgtgttcgagcctagcgaggccgagatcagccacacccagaaagccaccctcgtgtgcctggctaccggcttctaccccgaccatgtggaactgtcttggtgggtcaacggcaaagaggtgcacagcggcgtgtgtaccgacccccagccactgaaagaacagcccgccctgaacgacagccggtactgcctgagcagcagactgagagtgtccgccaccttctggcagaacccccggaaccacttcagatgccaggtgcagttctacggcctgagcgagaacgacgagtggacccaggacagagccaagcccgtgacccagatcgtgtctgccgaagcctggggcagagccgatgatgtgattaagatccactggcaggaaaagaagtccaacaccatcctgggcagccaggaaggcaacaccatgaagaccaacgacacctacatgaagttcagctggctgaccgtgcccgagaagtccctggacaaagaacacagatgcatcgtgcggcacgaaaacaacaagaacggcgtggaccaggaaatcatcttcccacccatcaagaccgatgtgattacaatggaccccaaggacaactgctccaaggacgccaacgataccctgctgctccagctgaccaacaccagcgcctactacatgtacttgttgctgctgctgaagtccgtggtgtacttcgccatcatcacatgctgcctgctgatggctatggtcaagcggaaggacagccggggaagggccaagcgatctggatctggagcaacaaacttctcactactcaaacaagcaggtgacgtggaggagaatcccgggcctactagtatggactggatttggcgcatccttttccttgtcggcgctgctaccggcgcgcattccttcgaacaggtgcagctgaagcagagcggacctggcctggtgcagcctagccagagcctgtccatcacctgtaccgtgtccggcttcagcctgaccaactacggcgtgcactgggtgcgccagagccctggaaaaggactggaatggctgggagtgatttggagcggcggcaacaccgactacaacacccccttcaccagcagactgtctatcaacaaggacaacagcaagagccaggtgttcttcaagatgaacagcctccagagcaacgacaccgccatctactactgtgctagagccctgacctactatgactacgagttcgcctactggggccagggcacactcgtgacagtgtctgctacgcgtatccagaaccctgatcctgccgtgtaccagctgcgggatagcaagagcagcgacaagagcgtgtgtctgttcaccgacttcgacagccagaccaacgtgtcccagagcaaggactccgacgtgtacatcaccgataagtgcgtgctggacatgcggagcatggacttcaagagcaactccgccgtggcctggtccaacaagtccgatttcgcctgcgccaacgccttcaacaacagcattatccccgaggacacattcttcccaagccccgagagcagcgactccaccgaccacgtgaagcccaaagagacagagaacaccaagcagcccagcaagagctgccacaagcccaaggccatcgtgcacaccgagaaagtgaacatgatgagcctgaccgtgctgggcctgcggatgctgttcgccaaaaccgtggccgtgaacttcctgctgaccgccaagctgttcttcctcctcaccgcc

SEQ ID NO: 6041 - DNA, 2148 bp, synthetic construct
  source 1..2148: mol_type = other DNA
atggccttaccagtgaccgccttgctcctgccgctggccttgctgctccacgccgccaggccgatgacccagagccccaagttcctgctggtgtctgccggcgacagagtgaccctgacatgcaaggccagccagagcgtgaacaacgacgtgtactggtatcagcaggaacccggccagtcccccaagctgctgatctactgggccagcaccagagaaagcggcgtgcccgatagattcaccggcagcggctctggcaccgacttcaccctgacaatcagcagcgtgcaggccgaggacctggccgtgtactactgcaagcagagctacaacctgtacaccttcggcggaggcaccaagctggaaatcaagagactcgaggacctgaagaacgtgttcccacctgaggtggccgtgttcgagcctagcgaggccgagatcagccacacccagaaagccaccctcgtgtgcctggctaccggcttctaccccgaccatgtggaactgtcttggtgggtcaacggcaaagaggtgcacagcggcgtgtgtaccgacccccagccactgaaagaacagcccgccctgaacgacagccggtactgcctgagcagcagactgagagtgtccgccaccttctggcagaacccccggaaccacttcagatgccaggtgcagttctacggcctgagcgagaacgacgagtggacccaggacagagccaagcccgtgacccagatcgtgtctgccgaagcctggggcagagccgatgatgtgattaagatccactggcaggaaaagaagtccaacaccatcctgggcagccaggaaggcaacaccatgaagaccaacgacacctacatgaagttcagctggctgaccgtgcccgagaagtccctggacaaagaacacagatgcatcgtgcggcacgaaaacaacaagaacggcgtggaccaggaaatcatcttcccacccatcaagaccgatgtgattacaatggaccccaaggacaactgctccaaggacgccaacgataccctgctgctccagctgaccaacaccagcgcctactacatgtacttgttgctgctgctgaagtccgtggtgtacttcgccatcatcacatgctgcctgctgatggctatggtcaagcggaaggacagccggggaagggccaagcgatctggatctggagcaacaaacttctcactactcaaacaagcaggtgacgtggaggagaatcccgggcctactagtatggactggatttggcgcatccttttccttgtcggcgctgctaccggcgcgcattccttcgaagaatctggaagaggactggtgcagcctggcggcagcagaaagctgtcttgtgccgccagcggcttcaccttcagcaccagcggaatgcactgggtgcgccaggcccctgagaagggactggaatgggtggcctacatcagctccggcagcaccaccatctaccacgccgataccgtgaagggccggttcaccatcagccgggacaaccccaagaataccctgttcctccagatgaccagcctgcggagcgaggacaccgccatgtactattgctgcgccagaagcggccagttcggcaactacttcgactactggggccagggcaccaccctgaccgtgtcatctacgcgtatccagaaccctgatcctgccgtgtaccagctgcgggatagcaagagcagcgacaagagcgtgtgtctgttcaccgacttcgacagccagaccaacgtgtcccagagcaaggactccgacgtgtacatcaccgataagtgcgtgctggacatgcggagcatggacttcaagagcaactccgccgtggcctggtccaacaagtccgatttcgcctgcgccaacgccttcaacaacagcattatccccgaggacacattcttcccaagccccgagagcagcgactccaccgaccacgtgaagcccaaagagacagagaacaccaagcagcccagcaagagctgccacaagcccaaggccatcgtgcacaccgagaaagtgaacatgatgagcctgaccgtgctgggcctgcggatgctgttcgccaaaaccgtggccgtgaacttcctgctgaccgccaagctgttcttcctcctcaccgcc

SEQ ID NO: 6042 - DNA, 2163 bp, synthetic construct
  source 1..2163: mol_type = other DNA
atggccttaccagtgaccgccttgctcctgccgctggccttgctgctccacgccgccaggccgcagagcccatctagcctggctgtgtctgccggcgagaaagtgaccatgagctgcaagagcagccagagcctgctgaacagccggacccggaagaactacctggcctggtatcagcagaagcccggccagagccccaagctgctgatctactgggccagcaccagagaaagcggcgtgcccgatagattcaccggctctggcagcggcaccgacttcaccctgacaatcagcagcgtgcaggccgaggacctggccgtgtactactgcaagcagagcaacctgtacaccttcggcggaggcaccaagctggaaatcaagctcgaggacctgaagaacgtgttcccacctgaggtggccgtgttcgagcctagcgaggccgagatcagccacacccagaaagccaccctcgtgtgcctggctaccggcttctaccccgaccatgtggaactgtcttggtgggtcaacggcaaagaggtgcacagcggcgtgtgtaccgacccccagccactgaaagaacagcccgccctgaacgacagccggtactgcctgagcagcagactgagagtgtccgccaccttctggcagaacccccggaaccacttcagatgccaggtgcagttctacggcctgagcgagaacgacgagtggacccaggacagagccaagcccgtgacccagatcgtgtctgccgaagcctggggcagagccgatgatgtgattaagatccactggcaggaaaagaagtccaacaccatcctgggcagccaggaaggcaacaccatgaagaccaacgacacctacatgaagttcagctggctgaccgtgcccgagaagtccctggacaaagaacacagatgcatcgtgcggcacgaaaacaacaagaacggcgtggaccaggaaatcatcttcccacccatcaagaccgatgtgattacaatggaccccaaggacaactgctccaaggacgccaacgataccctgctgctccagctgaccaacaccagcgcctactacatgtacttgttgctgctgctgaagtccgtggtgtacttcgccatcatcacatgctgcctgctgatggctatggtcaagcggaaggacagccggggaagggccaagcgatctggatctggagcaacaaacttctcactactcaaacaagcaggtgacgtggaggagaatcccgggcctactagtatggactggatttggcgcatccttttccttgtcggcgctgctaccggcgcgcattccttcgaacaggtgcagctggaagagtctggacccgagcttgtgaagcctggggccagcgtgaagctgtcctgtaaagccagcggctacaccttcaccgagtacatcatccactgggtcaagcagcggagcggccagggcctggaatggatcggctggttttaccctggctccggcagcatcaagtacaacgagaagttcaaggacaaggccaccctgaccgccgacaagtccagcagcaccgtgtacatggaactgagcggcctgaccagcgaggacagcgccgtgtatttctgcgccagacacgacggctacagctacttcgactattggggccagggcaccacactgaccgtgtcctctacgcgtatccagaaccctgatcctgccgtgtaccagctgcgggatagcaagagcagcgacaagagcgtgtgtctgttcaccgacttcgacagccagaccaacgtgtcccagagcaaggactccgacgtgtacatcaccgataagtgcgtgctggacatgcggagcatggacttcaagagcaactccgccgtggcctggtccaacaagtccgatttcgcctgcgccaacgccttcaacaacagcattatccccgaggacacattcttcccaagccccgagagcagcgactccaccgaccacgtgaagcccaaagagacagagaacaccaagcagcccagcaagagctgccacaagcccaaggccatcgtgcacaccgagaaagtgaacatgatgagcctgaccgtgctgggcctgcggatgctgttcgccaaaaccgtggccgtgaacttcctgctgaccgccaagctgttcttcctcctcaccgcc

SEQ ID NO: 6043 - DNA, 2172 bp, synthetic construct
  source 1..2172: mol_type = other DNA
atggccttaccagtgaccgccttgctcctgccgctggccttgctgctccacgccgccaggccggacatccagatgacccagagccccagcagcctgtctgcctctctgggcgagagagtgtccctgacctgtcgggccacacaggaactgagcggctacctgtcttggctgcagcagaagcccgacggcaccatcaagcggctgatctacgccgccagcaccctggatagcggcgtgcccaagagattcagcggcaacagaagcggcagcgactacagcctgaccatcagctccctggaaagcgaggacttcgccgactactactgcctgcagtacgccatctacccctacaccttcggcggaggcaccaagctggaaatcaagctcgaggacctgaagaacgtgttcccacctgaggtggccgtgttcgagcctagcgaggccgagatcagccacacccagaaagccaccctcgtgtgcctggctaccggcttctaccccgaccatgtggaactgtcttggtgggtcaacggcaaagaggtgcacagcggcgtgtgtaccgacccccagccactgaaagaacagcccgccctgaacgacagccggtactgcctgagcagcagactgagagtgtccgccaccttctggcagaacccccggaaccacttcagatgccaggtgcagttctacggcctgagcgagaacgacgagtggacccaggacagagccaagcccgtgacccagatcgtgtctgccgaagcctggggcagagccgatgatgtgattaagatccactggcaggaaaagaagtccaacaccatcctgggcagccaggaaggcaacaccatgaagaccaacgacacctacatgaagttcagctggctgaccgtgcccgagaagtccctggacaaagaacacagatgcatcgtgcggcacgaaaacaacaagaacggcgtggaccaggaaatcatcttcccacccatcaagaccgatgtgattacaatggaccccaaggacaactgctccaaggacgccaacgataccctgctgctccagctgaccaacaccagcgcctactacatgtacttgttgctgctgctgaagtccgtggtgtacttcgccatcatcacatgctgcctgctgatggctatggtcaagcggaaggacagccggggaagggccaagcgatctggatctggagcaacaaacttctcactactcaaacaagcaggtgacgtggaggagaatcccgggcctactagtatggactggatttggcgcatccttttccttgtcggcgctgctaccggcgcgcattccttcgaagaggtgcaactgcagcagtctggccccgagcttgtgaagcctggcgcctccgtgaagatgagctgcaaggccagcggctacacctttaccagctacttcatccactgggtcaagcagaaacccggccagggcctggaatggatcggcttcatcaacccttacaacgacggcagcaagtacaacgagaagttcaagggcaaggccaccctgaccagcgacaagagcagcagcaccgcctacatggaactgtccagcctgacatccgaggacagcgccgtgtactactgcaccagggacgacggctactacggctacgccatggactactggggccagggaacaagcgtcaccgtgtcctctacgcgtatccagaaccctgatcctgccgtgtaccagctgcgggatagcaagagcagcgacaagagcgtgtgtctgttcaccgacttcgacagccagaccaacgtgtcccagagcaaggactccgacgtgtacatcaccgataagtgcgtgctggacatgcggagcatggacttcaagagcaactccgccgtggcctggtccaacaagtccgatttcgcctgcgccaacgccttcaacaacagcattatccccgaggacacattcttcccaagccccgagagcagcgactccaccgaccacgtgaagcccaaagagacagagaacaccaagcagcccagcaagagctgccacaagcccaaggccatcgtgcacaccgagaaagtgaacatgatgagcctgaccgtgctgggcctgcggatgctgttcgccaaaaccgtggccgtgaacttcctgctgaccgccaagctgttcttcctcctcaccgcc

SEQ ID NO: 6044 - DNA, 2187 bp, synthetic construct
  source 1..2187: mol_type = other DNA
atggccttaccagtgaccgccttgctcctgccgctggccttgctgctccacgccgccaggccggacaccatcgtgctgacacagagccctgcttccctggccgtgtccctgggacagagagccaccatctcttgcagagccagcgagagcgtggacagctacggcaacagcttcatgcactggtatcagcagaagcccggccagccccccaagctgctgatctacctggcctccaacctggaaagcggcgtgcccgccagattttctggcagcggcagcagaaccgacttcaccctgaccatcgaccccgtggaagccgatgatgccgccacctactactgccagcagaacaactacgacccctggaccttcggcggaggcaccaagctggaaatcaagctcgaggacctgaagaacgtgttcccacctgaggtggccgtgttcgagcctagcgaggccgagatcagccacacccagaaagccaccctcgtgtgcctggctaccggcttctaccccgaccatgtggaactgtcttggtgggtcaacggcaaagaggtgcacagcggcgtgtgtaccgacccccagccactgaaagaacagcccgccctgaacgacagccggtactgcctgagcagcagactgagagtgtccgccaccttctggcagaacccccggaaccacttcagatgccaggtgcagttctacggcctgagcgagaacgacgagtggacccaggacagagccaagcccgtgacccagatcgtgtctgccgaagcctggggcagagccgatgatgtgattaagatccactggcaggaaaagaagtccaacaccatcctgggcagccaggaaggcaacaccatgaagaccaacgacacctacatgaagttcagctggctgaccgtgcccgagaagtccctggacaaagaacacagatgcatcgtgcggcacgaaaacaacaagaacggcgtggaccaggaaatcatcttcccacccatcaagaccgatgtgattacaatggaccccaaggacaactgctccaaggacgccaacgataccctgctgctccagctgaccaacaccagcgcctactacatgtacttgttgctgctgctgaagtccgtggtgtacttcgccatcatcacatgctgcctgctgatggctatggtcaagcggaaggacagccggggaagggccaagcgatctggatctggagcaacaaacttctcactactcaaacaagcaggtgacgtggaggagaatcccgggcctactagtatggactggatttggcgcatccttttccttgtcggcgctgctaccggcgcgcattccttcgaagaagtgcaactccagcagagcggccctgagcttgtgaagcctggcgcttccgtgaagatgagctgcaaggccagcggctacaccttcaccagctacgtgatgcactgggtcaagcagaaacctggacagggcctggaatggatcggctacatcaacccctacaacgacggcaccaagtacaacgagaagttcaagggcaaggccaccctgacaagcgacaccagcagcagcaccgcctacatggaactgaacagcctgaccagcgaggacagcgccgtgtacttctgcgccagacccatctacttcgacaacgactacttcgattactggggccagggcaccaccctgaaggtgtcctctacgcgtatccagaaccctgatcctgccgtgtaccagctgcgggatagcaagagcagcgacaagagcgtgtgtctgttcaccgacttcgacagccagaccaacgtgtcccagagcaaggactccgacgtgtacatcaccgataagtgcgtgctggacatgcggagcatggacttcaagagcaactccgccgtggcctggtccaacaagtccgatttcgcctgcgccaacgccttcaacaacagcattatccccgaggacacattcttcccaagccccgagagcagcgactccaccgaccacgtgaagcccaaagagacagagaacaccaagcagcccagcaagagctgccacaagcccaaggccatcgtgcacaccgagaaagtgaacatgatgagcctgaccgtgctgggcctgcggatgctgttcgccaaaaccgtggccgtgaacttcctgctgaccgccaagctgttcttcctcctcaccgcc

SEQ ID NO: 6045 - DNA, 2172 bp, synthetic construct
  source 1..2172: mol_type = other DNA
atggccttaccagtgaccgccttgctcctgccgctggccttgctgctccacgccgccaggccggacatccagatgacccagagccccagcagcctgtctgccagcgtgggcgacagagtgaccatcacatgcaaggccagccaggacgtgggaatcgccgtggcctggtatcagcagaaacccggcaaggtgcccaagctgctgatctactgggccagcaccagacacaccggcgtgcccgatagattttccggcagcggctccggcaccgacttcaccctgacaatcagctccctccagcccgaggacgtggcaacctactactgccagcagtacagcagctacccctacaccttcggccagggcaccaaggtggaaatcaagagactcgaggacctgaagaacgtgttcccacctgaggtggccgtgttcgagcctagcgaggccgagatcagccacacccagaaagccaccctcgtgtgcctggctaccggcttctaccccgaccatgtggaactgtcttggtgggtcaacggcaaagaggtgcacagcggcgtgtgtaccgacccccagccactgaaagaacagcccgccctgaacgacagccggtactgcctgagcagcagactgagagtgtccgccaccttctggcagaacccccggaaccacttcagatgccaggtgcagttctacggcctgagcgagaacgacgagtggacccaggacagagccaagcccgtgacccagatcgtgtctgccgaagcctggggcagagccgatgatgtgattaagatccactggcaggaaaagaagtccaacaccatcctgggcagccaggaaggcaacaccatgaagaccaacgacacctacatgaagttcagctggctgaccgtgcccgagaagtccctggacaaagaacacagatgcatcgtgcggcacgaaaacaacaagaacggcgtggaccaggaaatcatcttcccacccatcaagaccgatgtgattacaatggaccccaaggacaactgctccaaggacgccaacgataccctgctgctccagctgaccaacaccagcgcctactacatgtacttgttgctgctgctgaagtccgtggtgtacttcgccatcatcacatgctgcctgctgatggctatggtcaagcggaaggacagccggggaagggccaagcgatctggatctggagcaacaaacttctcactactcaaacaagcaggtgacgtggaggagaatcccgggcctactagtatggactggatttggcgcatccttttccttgtcggcgctgctaccggcgcgcattccttcgaagaagtgcaactggtggaatcaggcggcggactggtgcagcctggcggatctctgagactgagctgtgccgccagcggcttcgacttcagccggtactggatgagctgggtgcgccaggcccctggcaaaggactggaatggatcggcgagatcaaccccgacagcagcaccatcaactacgcccccagcctgaaggacaagttcatcatcagccgggacaacgccaagaacagcctgtacctccagatgaactccctgcgggccgaggacaccgccgtgtactattgcgccagacccgacggcaactactggtacttcgacgtgtggggccagggaaccctcgtgaccgtgtcatctacgcgtatccagaaccctgatcctgccgtgtaccagctgcgggatagcaagagcagcgacaagagcgtgtgtctgttcaccgacttcgacagccagaccaacgtgtcccagagcaaggactccgacgtgtacatcaccgataagtgcgtgctggacatgcggagcatggacttcaagagcaactccgccgtggcctggtccaacaagtccgatttcgcctgcgccaacgccttcaacaacagcattatccccgaggacacattcttcccaagccccgagagcagcgactccaccgaccacgtgaagcccaaagagacagagaacaccaagcagcccagcaagagctgccacaagcccaaggccatcgtgcacaccgagaaagtgaacatgatgagcctgaccgtgctgggcctgcggatgctgttcgccaaaaccgtggccgtgaacttcctgctgaccgccaagctgttcttcctcctcaccgcc

SEQ ID NO: 6046 - DNA, 2172 bp, synthetic construct
  source 1..2172: mol_type = other DNA
atggccttaccagtgaccgccttgctcctgccgctggccttgctgctccacgccgccaggccggacatcgtgatgacccagagccagaagagcatgagcaccagcgtgggcgacagagtgagcatcacctgcaaggccagccaggacgtgatcaccggcgtggcctggtaccagcagaagcccggccagagccccaagctgctgatctacagcgccagctacagatacaccggcgtgcccgacagattcaccggcagcggcagcggcaccgacttcaccttcaccatcagcaacgtgcaggccgaggacctggccgtgtactactgccagcagcactacagcacccccctgaccttcggcgccggcaccaagctggagctgaagctcgaggacctgaagaacgtgttcccacctgaggtggccgtgttcgagcctagcgaggccgagatcagccacacccagaaagccaccctcgtgtgcctggctaccggcttctaccccgaccatgtggaactgtcttggtgggtcaacggcaaagaggtgcacagcggcgtgtgtaccgacccccagccactgaaagaacagcccgccctgaacgacagccggtactgcctgagcagcagactgagagtgtccgccaccttctggcagaacccccggaaccacttcagatgccaggtgcagttctacggcctgagcgagaacgacgagtggacccaggacagagccaagcccgtgacccagatcgtgtctgccgaagcctggggcagagccgatgatgtgattaagatccactggcaggaaaagaagtccaacaccatcctgggcagccaggaaggcaacaccatgaagaccaacgacacctacatgaagttcagctggctgaccgtgcccgagaagtccctggacaaagaacacagatgcatcgtgcggcacgaaaacaacaagaacggcgtggaccaggaaatcatcttcccacccatcaagaccgatgtgattacaatggaccccaaggacaactgctccaaggacgccaacgataccctgctgctccagctgaccaacaccagcgcctactacatgtacttgttgctgctgctgaagtccgtggtgtacttcgccatcatcacatgctgcctgctgatggctatggtcaagcggaaggacagccggggaagggccaagcgatctggatctggagcaacaaacttctcactactcaaacaagcaggtgacgtggaggagaatcccgggcctactagtatggactggatttggcgcatccttttccttgtcggcgctgctaccggcgcgcattccttcgaacaggtgcagctgcagcagcccggcgccgagctggtgagacccggcgccagcgtgaagctgagctgcaaggccagcggctacagcttcaccacctactggatgaactgggtgaagcagagacccggccagggcctggagtggatcggcatgatccaccccagcgacagcgagaccagactgaaccagaagttcaaggacaaggccaccctgaccgtggacaagagcagcagcaccgcctacatgcagctgagcagccccaccagcgaggacagcgccgtgtactactgcgccagaagcaccatgatcgccaccagagccatggactactggggccagggcaccagcgtgaccgtgagcagcacgcgtatccagaaccctgatcctgccgtgtaccagctgcgggatagcaagagcagcgacaagagcgtgtgtctgttcaccgacttcgacagccagaccaacgtgtcccagagcaaggactccgacgtgtacatcaccgataagtgcgtgctggacatgcggagcatggacttcaagagcaactccgccgtggcctggtccaacaagtccgatttcgcctgcgccaacgccttcaacaacagcattatccccgaggacacattcttcccaagccccgagagcagcgactccaccgaccacgtgaagcccaaagagacagagaacaccaagcagcccagcaagagctgccacaagcccaaggccatcgtgcacaccgagaaagtgaacatgatgagcctgaccgtgctgggcctgcggatgctgttcgccaaaaccgtggccgtgaacttcctgctgaccgccaagctgttcttcctcctcaccgcc

SEQ ID NO: 6047 - DNA, 2190 bp, synthetic construct
  source 1..2190: mol_type = other DNA
atggccttaccagtgaccgccttgctcctgccgctggccttgctgctccacgccgccaggccgcagagcgtgctgacacagcctccatccgtgtctggcgctccaggccagagagtgaccatctcctgtaccggcagcggcagcaacatcggagccccctacgacgtgtcctggtatcagcaactgcctggcaccgcccccaagctgctgatctaccacaacaacaagcggcccagcggcgtgcccgatagattcagcggctctaagagcggcaccagcgccagcctggctatcactggactccaggccgaggacgaggccgactactactgtgccacagtggaagccggcctgagcggctctgtgtttggcggcggaacaaagctgaccgtgctgggagctctcgaggacctgaagaacgtgttcccacctgaggtggccgtgttcgagcctagcgaggccgagatcagccacacccagaaagccaccctcgtgtgcctggctaccggcttctaccccgaccatgtggaactgtcttggtgggtcaacggcaaagaggtgcacagcggcgtgtgtaccgacccccagccactgaaagaacagcccgccctgaacgacagccggtactgcctgagcagcagactgagagtgtccgccaccttctggcagaacccccggaaccacttcagatgccaggtgcagttctacggcctgagcgagaacgacgagtggacccaggacagagccaagcccgtgacccagatcgtgtctgccgaagcctggggcagagccgatgatgtgattaagatccactggcaggaaaagaagtccaacaccatcctgggcagccaggaaggcaacaccatgaagaccaacgacacctacatgaagttcagctggctgaccgtgcccgagaagtccctggacaaagaacacagatgcatcgtgcggcacgaaaacaacaagaacggcgtggaccaggaaatcatcttcccacccatcaagaccgatgtgattacaatggaccccaaggacaactgctccaaggacgccaacgataccctgctgctccagctgaccaacaccagcgcctactacatgtacttgttgctgctgctgaagtccgtggtgtacttcgccatcatcacatgctgcctgctgatggctatggtcaagcggaaggacagccggggaagggccaagcgatctggatctggagcaacaaacttctcactactcaaacaagcaggtgacgtggaggagaatcccgggcctactagtatggactggatttggcgcatccttttccttgtcggcgctgctaccggcgcgcattccttcgaacaggtgcaactggtgcagagcggagccgaagtgaagaaacctggggccagcgtgaaggtgtcctgcaaggtgtccggctacaccctgaccgagctgagcattcactgggtgcgccaggcccctggcaagggactggaatggatgggcggcttcgaccccgaagagaacgagatcgtgtacgcccagcggttccagggcagagtgacaatgaccgaggacaccagcaccgacaccgcctacatggaactgagcagcctgcggagcgaggataccgccgtgtactactgcgccatcgtgggcagcttcagccctctgacactgggcctgtggggccagggaactatggtcaccgtgtccagcacgcgtatccagaaccctgatcctgccgtgtaccagctgcgggatagcaagagcagcgacaagagcgtgtgtctgttcaccgacttcgacagccagaccaacgtgtcccagagcaaggactccgacgtgtacatcaccgataagtgcgtgctggacatgcggagcatggacttcaagagcaactccgccgtggcctggtccaacaagtccgatttcgcctgcgccaacgccttcaacaacagcattatccccgaggacacattcttcccaagccccgagagcagcgactccaccgaccacgtgaagcccaaagagacagagaacaccaagcagcccagcaagagctgccacaagcccaaggccatcgtgcacaccgagaaagtgaacatgatgagcctgaccgtgctgggcctgcggatgctgttcgccaaaaccgtggccgtgaacttcctgctgaccgccaagctgttcttcctcctcaccgcc

SEQ ID NO: 6048 - DNA, 2190 bp, synthetic construct
  source 1..2190: mol_type = other DNA
atggccttaccagtgaccgccttgctcctgccgctggccttgctgctccacgccgccaggccgcagagcgtgctgacacagcctccatccgtgtctggcgctccaggccagagagtgaccatctcctgtaccggcagcggcagcaacatcggagccccctacgacgtgtcctggtatcagcaactgcctggcaccgcccccaagctgctgatctaccacaacaacaagcggcccagcggcgtgcccgatagattcagcggctctaagagcggcaccagcgccagcctggctatcactggactccaggccgaggacgaggccgactactactgccagagctacgacagcagcagcatcagcaccatcttcggcggaggcaccaagctgacagtgctgggagctctcgaggacctgaagaacgtgttcccacctgaggtggccgtgttcgagcctagcgaggccgagatcagccacacccagaaagccaccctcgtgtgcctggctaccggcttctaccccgaccatgtggaactgtcttggtgggtcaacggcaaagaggtgcacagcggcgtgtgtaccgacccccagccactgaaagaacagcccgccctgaacgacagccggtactgcctgagcagcagactgagagtgtccgccaccttctggcagaacccccggaaccacttcagatgccaggtgcagttctacggcctgagcgagaacgacgagtggacccaggacagagccaagcccgtgacccagatcgtgtctgccgaagcctggggcagagccgatgatgtgattaagatccactggcaggaaaagaagtccaacaccatcctgggcagccaggaaggcaacaccatgaagaccaacgacacctacatgaagttcagctggctgaccgtgcccgagaagtccctggacaaagaacacagatgcatcgtgcggcacgaaaacaacaagaacggcgtggaccaggaaatcatcttcccacccatcaagaccgatgtgattacaatggaccccaaggacaactgctccaaggacgccaacgataccctgctgctccagctgaccaacaccagcgcctactacatgtacttgttgctgctgctgaagtccgtggtgtacttcgccatcatcacatgctgcctgctgatggctatggtcaagcggaaggacagccggggaagggccaagcgatctggatctggagcaacaaacttctcactactcaaacaagcaggtgacgtggaggagaatcccgggcctactagtatggactggatttggcgcatccttttccttgtcggcgctgctaccggcgcgcattccttcgaacaggtgcaactggtgcagagcggagccgaagtgaagaaacctggggccagcgtgaaggtgtcctgcaaggtgtccggctacaccctgaccgagctgagcattcactgggtgcgccaggcccctggcaagggactggaatggatgggcggcttcgaccccgaagagaacgagatcgtgtacgcccagcggttccagggcagagtgacaatgaccgaggacaccagcaccgacaccgcctacatggaactgagcagcctgcggagcgaggataccgccgtgtactactgtgccatcgtgggcagcttcagcggaatcgcctacagaccttggggccagggcacaatggtcaccgtgtctagcacgcgtatccagaaccctgatcctgccgtgtaccagctgcgggatagcaagagcagcgacaagagcgtgtgtctgttcaccgacttcgacagccagaccaacgtgtcccagagcaaggactccgacgtgtacatcaccgataagtgcgtgctggacatgcggagcatggacttcaagagcaactccgccgtggcctggtccaacaagtccgatttcgcctgcgccaacgccttcaacaacagcattatccccgaggacacattcttcccaagccccgagagcagcgactccaccgaccacgtgaagcccaaagagacagagaacaccaagcagcccagcaagagctgccacaagcccaaggccatcgtgcacaccgagaaagtgaacatgatgagcctgaccgtgctgggcctgcggatgctgttcgccaaaaccgtggccgtgaacttcctgctgaccgccaagctgttcttcctcctcaccgcc

SEQ ID NO: 6049 - DNA, 2154 bp, synthetic construct
  source 1..2154: mol_type = other DNA
atggccttaccagtgaccgccttgctcctgccgctggccttgctgctccacgccgccaggccggacatccagatgacccagagccccagcagcctgtctgccagcgtgggcgacagagtgaccatcacctgtagagccagccagggcatcagaaacaacctggcctggtatcagcagaagcccggcaaggcccccaagcggctgatctacgccgccagcaatctccagagcggcgtgcccagcagattcacaggctctggcagcggcaccgagttcaccctgatcgtgtctagcctccagcccgaggacttcgccacctactactgcctccagcaccacagctaccccctgacatctggcggaggcaccaaggtggaactcgaggacctgaagaacgtgttcccacctgaggtggccgtgttcgagcctagcgaggccgagatcagccacacccagaaagccaccctcgtgtgcctggctaccggcttctaccccgaccatgtggaactgtcttggtgggtcaacggcaaagaggtgcacagcggcgtgtgtaccgacccccagccactgaaagaacagcccgccctgaacgacagccggtactgcctgagcagcagactgagagtgtccgccaccttctggcagaacccccggaaccacttcagatgccaggtgcagttctacggcctgagcgagaacgacgagtggacccaggacagagccaagcccgtgacccagatcgtgtctgccgaagcctggggcagagccgatgatgtgattaagatccactggcaggaaaagaagtccaacaccatcctgggcagccaggaaggcaacaccatgaagaccaacgacacctacatgaagttcagctggctgaccgtgcccgagaagtccctggacaaagaacacagatgcatcgtgcggcacgaaaacaacaagaacggcgtggaccaggaaatcatcttcccacccatcaagaccgatgtgattacaatggaccccaaggacaactgctccaaggacgccaacgataccctgctgctccagctgaccaacaccagcgcctactacatgtacttgttgctgctgctgaagtccgtggtgtacttcgccatcatcacatgctgcctgctgatggctatggtcaagcggaaggacagccggggaagggccaagcgatctggatctggagcaacaaacttctcactactcaaacaagcaggtgacgtggaggagaatcccgggcctactagtatggactggatttggcgcatccttttccttgtcggcgctgctaccggcgcgcattccttcgaagaggtgcaggtgctggaaagtggcggaggactggtgcagcctggcggctctctgagactgtcttgtgccgccagcggcttcaccttcagcagctacgccatgagctgggtgcgccaggcccctggaaaaggactggaatgggtgtccgccatcagcggctctggcgggtctaccaactacgccgatagcgtgaagggccggttcaccatcagccgggacaacagcaagaacaccctgtacctccagatgaacagcctgcgggccgaggacaccgccgtgtattattgtgccggcagcagcgggtggagcgagtattggggacagggcaccctcgtgaccgtgtcctctacgcgtatccagaaccctgatcctgccgtgtaccagctgcgggatagcaagagcagcgacaagagcgtgtgtctgttcaccgacttcgacagccagaccaacgtgtcccagagcaaggactccgacgtgtacatcaccgataagtgcgtgctggacatgcggagcatggacttcaagagcaactccgccgtggcctggtccaacaagtccgatttcgcctgcgccaacgccttcaacaacagcattatccccgaggacacattcttcccaagccccgagagcagcgactccaccgaccacgtgaagcccaaagagacagagaacaccaagcagcccagcaagagctgccacaagcccaaggccatcgtgcacaccgagaaagtgaacatgatgagcctgaccgtgctgggcctgcggatgctgttcgccaaaaccgtggccgtgaacttcctgctgaccgccaagctgttcttcctcctcaccgcc

SEQ ID NO: 6050 - DNA, 2172 bp, synthetic construct
  source 1..2172: mol_type = other DNA
atggccttaccagtgaccgccttgctcctgccgctggccttgctgctccacgccgccaggccggacgagatccagctggtgcagagcggagccgaagtgaagaagcctggcgagagcctgcggatcagctgcaagggcagcggcttcaacatcgaggactactacatccactgggtgcgccagatgcccggcaagggcctggaatggatgggcagaatcgaccccgagaacgacgagactaagtacggccccatcttccagggccacgtgaccatcagcgccgacaccagcatcaacaccgtgtacctccagtggtccagcctgaaggccagcgacaccgccatgtactactgcgcctttagaggcggcgtgtactggggccagggcaccacagtgacagtgtctagcctcgaggacctgaagaacgtgttcccacctgaggtggccgtgttcgagcctagcgaggccgagatcagccacacccagaaagccaccctcgtgtgcctggctaccggcttctaccccgaccatgtggaactgtcttggtgggtcaacggcaaagaggtgcacagcggcgtgtgtaccgacccccagccactgaaagaacagcccgccctgaacgacagccggtactgcctgagcagcagactgagagtgtccgccaccttctggcagaacccccggaaccacttcagatgccaggtgcagttctacggcctgagcgagaacgacgagtggacccaggacagagccaagcccgtgacccagatcgtgtctgccgaagcctggggcagagccgatgatgtgattaagatccactggcaggaaaagaagtccaacaccatcctgggcagccaggaaggcaacaccatgaagaccaacgacacctacatgaagttcagctggctgaccgtgcccgagaagtccctggacaaagaacacagatgcatcgtgcggcacgaaaacaacaagaacggcgtggaccaggaaatcatcttcccacccatcaagaccgatgtgattacaatggaccccaaggacaactgctccaaggacgccaacgataccctgctgctccagctgaccaacaccagcgcctactacatgtacttgttgctgctgctgaagtccgtggtgtacttcgccatcatcacatgctgcctgctgatggctatggtcaagcggaaggacagccggggaagggccaagcgatctggatctggagcaacaaacttctcactactcaaacaagcaggtgacgtggaggagaatcccgggcctactagtatggactggatttggcgcatccttttccttgtcggcgctgctaccggcgcgcattccttcgaagatgtcgtgatgacccagagccccgacagcctggctgtgtctctgggagagagagccaccatcaactgcaagtccagccagtccctgctggacagcgacggcaagacctacctgaactggctccagcagaagcccggccagccccccaagagactgatctccctggtgtccaagctggactccggcgtgcccgatagattttccggctctggcagcggcaccgacttcaccctgacaatcagctcccttcaggccgaggacgtggccgtgtactattgctggcagggcacacacttccccggcacctttggcggaggcaccaaggtggaaatcaagacgcgtatccagaaccctgatcctgccgtgtaccagctgcgggatagcaagagcagcgacaagagcgtgtgtctgttcaccgacttcgacagccagaccaacgtgtcccagagcaaggactccgacgtgtacatcaccgataagtgcgtgctggacatgcggagcatggacttcaagagcaactccgccgtggcctggtccaacaagtccgatttcgcctgcgccaacgccttcaacaacagcattatccccgaggacacattcttcccaagccccgagagcagcgactccaccgaccacgtgaagcccaaagagacagagaacaccaagcagcccagcaagagctgccacaagcccaaggccatcgtgcacaccgagaaagtgaacatgatgagcctgaccgtgctgggcctgcggatgctgttcgccaaaaccgtggccgtgaacttcctgctgaccgccaagctgttcttcctcctcaccgcc

SEQ ID NO: 6051 - DNA, 2193 bp, synthetic construct
  source 1..2193: mol_type = other DNA
atggccttaccagtgaccgccttgctcctgccgctggccttgctgctccacgccgccaggccggacgagcttgtgatgacccagagccccagcagcctgacagtgacagccggcgagaaagtgaccatgagctgcaagagcagccagagcctgctgaacagcggcaaccagaagaactacctgacctggtatcagcagaagcccggccagccccccaagctgctgatctactgggccagcaccagagaaagcggcgtgcccgatagattcaccggctctggcagcggcaccgacttcaccctgacaatcagcagcgtgcaggccgaggacctggccgtgtactactgccagaacgactacagctaccccctgaccttcggagccggcaccaagctggaaatcaagctcgaggacctgaagaacgtgttcccacctgaggtggccgtgttcgagcctagcgaggccgagatcagccacacccagaaagccaccctcgtgtgcctggctaccggcttctaccccgaccatgtggaactgtcttggtgggtcaacggcaaagaggtgcacagcggcgtgtgtaccgacccccagccactgaaagaacagcccgccctgaacgacagccggtactgcctgagcagcagactgagagtgtccgccaccttctggcagaacccccggaaccacttcagatgccaggtgcagttctacggcctgagcgagaacgacgagtggacccaggacagagccaagcccgtgacccagatcgtgtctgccgaagcctggggcagagccgatgatgtgattaagatccactggcaggaaaagaagtccaacaccatcctgggcagccaggaaggcaacaccatgaagaccaacgacacctacatgaagttcagctggctgaccgtgcccgagaagtccctggacaaagaacacagatgcatcgtgcggcacgaaaacaacaagaacggcgtggaccaggaaatcatcttcccacccatcaagaccgatgtgattacaatggaccccaaggacaactgctccaaggacgccaacgataccctgctgctccagctgaccaacaccagcgcctactacatgtacttgttgctgctgctgaagtccgtggtgtacttcgccatcatcacatgctgcctgctgatggctatggtcaagcggaaggacagccggggaagggccaagcgatctggatctggagcaacaaacttctcactactcaaacaagcaggtgacgtggaggagaatcccgggcctactagtatggactggatttggcgcatccttttccttgtcggcgctgctaccggcgcgcattccttcgaagaagtgcagctgctggaacagtctggcgccgaacttgtgcggcctggcaccagcgtgaagatcagctgtaaagccagcggctacgccttcaccaactactggctgggctgggtcaagcagaggcctggacacggcctggaatggatcggcgacatctttcccggctccggcaacatccactacaacgagaagttcaagggcaaggccaccctgaccgccgacaagtctagcagcaccgcctacatgcagctgtccagcctgacctttgaggacagcgccgtgtatttctgtgcccggctgcggaactgggacgagcccatggattattggggccagggcaccaccgtgaccgtgtctagtacgcgtatccagaaccctgatcctgccgtgtaccagctgcgggatagcaagagcagcgacaagagcgtgtgtctgttcaccgacttcgacagccagaccaacgtgtcccagagcaaggactccgacgtgtacatcaccgataagtgcgtgctggacatgcggagcatggacttcaagagcaactccgccgtggcctggtccaacaagtccgatttcgcctgcgccaacgccttcaacaacagcattatccccgaggacacattcttcccaagccccgagagcagcgactccaccgaccacgtgaagcccaaagagacagagaacaccaagcagcccagcaagagctgccacaagcccaaggccatcgtgcacaccgagaaagtgaacatgatgagcctgaccgtgctgggcctgcggatgctgttcgccaaaaccgtggccgtgaacttcctgctgaccgccaagctgttcttcctcctcaccgcc

SEQ ID NO: 6052 - DNA, 2196 bp, synthetic construct
  source 1..2196: mol_type = other DNA
atggccttaccagtgaccgccttgctcctgccgctggccttgctgctccacgccgccaggccggacgagctgcagatgacccagagccctagcagcctgtctgccagcgtgggcgacagagtgaccatcacctgtagagccagccagagcatcagcagctacctgaactggtatcagcagaagcccggccagccccccaaactgctgatctactgggccagcaccagagaaagcggcgtgcccgatagattcagcggcagcgagagcggcaccaactacaccctgaccatcagctccctgcagcccgaggacttcgccacctacttttgccagcagagcgacagcctgcccatcacctttggacagggcacccggctggacattcagctcgaggacctgaagaacgtgttcccacctgaggtggccgtgttcgagcctagcgaggccgagatcagccacacccagaaagccaccctcgtgtgcctggctaccggcttctaccccgaccatgtggaactgtcttggtgggtcaacggcaaagaggtgcacagcggcgtgtgtaccgacccccagccactgaaagaacagcccgccctgaacgacagccggtactgcctgagcagcagactgagagtgtccgccaccttctggcagaacccccggaaccacttcagatgccaggtgcagttctacggcctgagcgagaacgacgagtggacccaggacagagccaagcccgtgacccagatcgtgtctgccgaagcctggggcagagccgatgatgtgattaagatccactggcaggaaaagaagtccaacaccatcctgggcagccaggaaggcaacaccatgaagaccaacgacacctacatgaagttcagctggctgaccgtgcccgagaagtccctggacaaagaacacagatgcatcgtgcggcacgaaaacaacaagaacggcgtggaccaggaaatcatcttcccacccatcaagaccgatgtgattacaatggaccccaaggacaactgctccaaggacgccaacgataccctgctgctccagctgaccaacaccagcgcctactacatgtacttgttgctgctgctgaagtccgtggtgtacttcgccatcatcacatgctgcctgctgatggctatggtcaagcggaaggacagccggggaagggccaagcgatctggatctggagcaacaaacttctcactactcaaacaagcaggtgacgtggaggagaatcccgggcctactagtatggactggatttggcgcatccttttccttgtcggcgctgctaccggcgcgcattccttcgaagaggtgcaactgctggaatctgggggcggagtggtgcagcctggcagaagcctgagactgagctgtgccgccagcggcttcaccttcagctcctacggaatgcactgggtgcgccaggcccctggcaaaggactggaatgggtggccgtgatctcctacgacggcagcaacaagtactacgccgacagcgtgaagggccggttcaccatcagccgggacaacagcaagaacaccctgtacctgcagatgaacagcctgcgggccgaggacaccgccgtgtactactgcgccaaggatatgggctggggcagcggctggcggccttactactactacggcatggacgtgtggggccagggcaccaccgtgacagtgtcatctacgcgtatccagaaccctgatcctgccgtgtaccagctgcgggatagcaagagcagcgacaagagcgtgtgtctgttcaccgacttcgacagccagaccaacgtgtcccagagcaaggactccgacgtgtacatcaccgataagtgcgtgctggacatgcggagcatggacttcaagagcaactccgccgtggcctggtccaacaagtccgatttcgcctgcgccaacgccttcaacaacagcattatccccgaggacacattcttcccaagccccgagagcagcgactccaccgaccacgtgaagcccaaagagacagagaacaccaagcagcccagcaagagctgccacaagcccaaggccatcgtgcacaccgagaaagtgaacatgatgagcctgaccgtgctgggcctgcggatgctgttcgccaaaaccgtggccgtgaacttcctgctgaccgccaagctgttcttcctcctcaccgcc

SEQ ID NO: 6053 - DNA, 2187 bp, synthetic construct
  source 1..2187: mol_type = other DNA
atggccttaccagtgaccgccttgctcctgccgctggccttgctgctccacgccgccaggccggacgacatccaaatgacacagagtccttctagtttgagtgcgagcgtgggggacagggtgaccattacctgcagggccagccagagcataagctcataccttaattggtaccagcaaaaaccaggtaaggcccctaagctcctgatctacgcggcctcttcacttcaatctggggtcccttcccgcttcagtggctccggcagcggcaccgacttcacgctcactatatcaagtctgcagcctgaggatctcgccacctattactgtcaacaaagttattccacccctttcacctttggaccgggcacgaaagtggatattaagctcgaggacctgaagaacgtgttcccacctgaggtggccgtgttcgagcctagcgaggccgagatcagccacacccagaaagccaccctcgtgtgcctggctaccggcttctaccccgaccatgtggaactgtcttggtgggtcaacggcaaagaggtgcacagcggcgtgtgtaccgacccccagccactgaaagaacagcccgccctgaacgacagccggtactgcctgagcagcagactgagagtgtccgccaccttctggcagaacccccggaaccacttcagatgccaggtgcagttctacggcctgagcgagaacgacgagtggacccaggacagagccaagcccgtgacccagatcgtgtctgccgaagcctggggcagagccgatgatgtgattaagatccactggcaggaaaagaagtccaacaccatcctgggcagccaggaaggcaacaccatgaagaccaacgacacctacatgaagttcagctggctgaccgtgcccgagaagtccctggacaaagaacacagatgcatcgtgcggcacgaaaacaacaagaacggcgtggaccaggaaatcatcttcccacccatcaagaccgatgtgattacaatggaccccaaggacaactgctccaaggacgccaacgataccctgctgctccagctgaccaacaccagcgcctactacatgtacttgttgctgctgctgaagtccgtggtgtacttcgccatcatcacatgctgcctgctgatggctatggtcaagcggaaggacagccggggaagggccaagcgatctggatctggagcaacaaacttctcactactcaaacaagcaggtgacgtggaggagaatcccgggcctactagtatggactggatttggcgcatccttttccttgtcggcgctgctaccggcgcgcattccttcgaagtgcacgaggtccagcttgtgcagtccggggcagaggtcaagaagcctggttctagcgtaaaagtgagttgcaaagcctcaggtgggacattttcatcctacgcgatcagttgggttagacaggctcctggtcaagggctggaatggatgggcggaattattccaatcttcggaacagcgaattacgcgcagaagttccagggtagagtaaccatcactgctgacaagtccacctccaccgcatacatggaattgtctagtctccggagcgaggatacggcggtgtattattgtgctacgttcgccctgtttggcttccgcgaacaggctttcgacatctgggggcagggcacgacagtcacggttagtagtacgcgtatccagaaccctgatcctgccgtgtaccagctgcgggatagcaagagcagcgacaagagcgtgtgtctgttcaccgacttcgacagccagaccaacgtgtcccagagcaaggactccgacgtgtacatcaccgataagtgcgtgctggacatgcggagcatggacttcaagagcaactccgccgtggcctggtccaacaagtccgatttcgcctgcgccaacgccttcaacaacagcattatccccgaggacacattcttcccaagccccgagagcagcgactccaccgaccacgtgaagcccaaagagacagagaacaccaagcagcccagcaagagctgccacaagcccaaggccatcgtgcacaccgagaaagtgaacatgatgagcctgaccgtgctgggcctgcggatgctgttcgccaaaaccgtggccgtgaacttcctgctgaccgccaagctgttcttcctcctcaccgcc

SEQ ID NO: 6054 - DNA, 2181 bp, synthetic construct
  source 1..2181: mol_type = other DNA
atggccttaccagtgaccgccttgctcctgccgctggccttgctgctccacgccgccaggccggacatcgtgctgacccagagccctctgagcctggccgtgtctctgggacagcctgccatcatcagctgcaaggccagccagagcgtgtcctttgccggcacctctctgatgcactggtatcaccagaagcccggccagcagcccagactgctgatctacagagccagcaacctggaagccggcgtgcccgatagattttccggcagcggcagcaagaccgacttcaccctgaccatcagccccgtggaagccgaagatgccgccacctactactgccagcagagcagagagtacccctacaccttcggcggaggcaccaagctggaaatcaagaggctcgaggacctgaagaacgtgttcccacctgaggtggccgtgttcgagcctagcgaggccgagatcagccacacccagaaagccaccctcgtgtgcctggctaccggcttctaccccgaccatgtggaactgtcttggtgggtcaacggcaaagaggtgcacagcggcgtgtgtaccgacccccagccactgaaagaacagcccgccctgaacgacagccggtactgcctgagcagcagactgagagtgtccgccaccttctggcagaacccccggaaccacttcagatgccaggtgcagttctacggcctgagcgagaacgacgagtggacccaggacagagccaagcccgtgacccagatcgtgtctgccgaagcctggggcagagccgatgatgtgattaagatccactggcaggaaaagaagtccaacaccatcctgggcagccaggaaggcaacaccatgaagaccaacgacacctacatgaagttcagctggctgaccgtgcccgagaagtccctggacaaagaacacagatgcatcgtgcggcacgaaaacaacaagaacggcgtggaccaggaaatcatcttcccacccatcaagaccgatgtgattacaatggaccccaaggacaactgctccaaggacgccaacgataccctgctgctccagctgaccaacaccagcgcctactacatgtacttgttgctgctgctgaagtccgtggtgtacttcgccatcatcacatgctgcctgctgatggctatggtcaagcggaaggacagccggggaagggccaagcgatctggatctggagcaacaaacttctcactactcaaacaagcaggtgacgtggaggagaatcccgggcctactagtatggactggatttggcgcatccttttccttgtcggcgctgctaccggcgcgcattccttcgaacaggtccaactggtgcagagcggagccgaggtcgtgaagcctggcgcttccgtgaagattagctgcaaagccagcggctacacctttaccggctactttatgaactgggtcaagcagagccctggccagagcctggaatggatcggcagaatccacccctacgacggcgacaccttctacaaccagaagttccagggcaaggccaccctgacagtggacaagagcagcaacaccgcccacatggaactgctgagcctgaccagcgaggacttcgccgtgtactactgcaccagatacgacggcagccgggctatggactattggggccagggcaccaccgtgaccgtgtctagtacgcgtatccagaaccctgatcctgccgtgtaccagctgcgggatagcaagagcagcgacaagagcgtgtgtctgttcaccgacttcgacagccagaccaacgtgtcccagagcaaggactccgacgtgtacatcaccgataagtgcgtgctggacatgcggagcatggacttcaagagcaactccgccgtggcctggtccaacaagtccgatttcgcctgcgccaacgccttcaacaacagcattatccccgaggacacattcttcccaagccccgagagcagcgactccaccgaccacgtgaagcccaaagagacagagaacaccaagcagcccagcaagagctgccacaagcccaaggccatcgtgcacaccgagaaagtgaacatgatgagcctgaccgtgctgggcctgcggatgctgttcgccaaaaccgtggccgtgaacttcctgctgaccgccaagctgttcttcctcctcaccgcc

SEQ ID NO: 6055 - DNA, 2172 bp, synthetic construct
  source 1..2172: mol_type = other DNA
atggccttaccagtgaccgccttgctcctgccgctggccttgctgctccacgccgccaggccggacgacgttgtgatgacccagacccccctgagcctgcctgtgacacctggcgaacctgccagcatcagctgtcggagcagccagagcctggtgcacagaaacggcaacacctacctgcactggtatctccagaagcccggccagagccccaagctgctgatccacaaggtgtccaacagattcagcggcgtgcccgacagattctccggcagcggctctggcaccgacttcaccctgaagatcagccgggtggaagccgaggacctgggcgtgtacttctgtagccagagcacccatgtgccccccctgacatttggagccggcaccaagctggaactgaagctcgaggacctgaagaacgtgttcccacctgaggtggccgtgttcgagcctagcgaggccgagatcagccacacccagaaagccaccctcgtgtgcctggctaccggcttctaccccgaccatgtggaactgtcttggtgggtcaacggcaaagaggtgcacagcggcgtgtgtaccgacccccagccactgaaagaacagcccgccctgaacgacagccggtactgcctgagcagcagactgagagtgtccgccaccttctggcagaacccccggaaccacttcagatgccaggtgcagttctacggcctgagcgagaacgacgagtggacccaggacagagccaagcccgtgacccagatcgtgtctgccgaagcctggggcagagccgatgatgtgattaagatccactggcaggaaaagaagtccaacaccatcctgggcagccaggaaggcaacaccatgaagaccaacgacacctacatgaagttcagctggctgaccgtgcccgagaagtccctggacaaagaacacagatgcatcgtgcggcacgaaaacaacaagaacggcgtggaccaggaaatcatcttcccacccatcaagaccgatgtgattacaatggaccccaaggacaactgctccaaggacgccaacgataccctgctgctccagctgaccaacaccagcgcctactacatgtacttgttgctgctgctgaagtccgtggtgtacttcgccatcatcacatgctgcctgctgatggctatggtcaagcggaaggacagccggggaagggccaagcgatctggatctggagcaacaaacttctcactactcaaacaagcaggtgacgtggaggagaatcccgggcctactagtatggactggatttggcgcatccttttccttgtcggcgctgctaccggcgcgcattccttcgaagaagtgcagctggtgcagtctggcgctgaggtggaaaagcctggggccagcgtgaagattagctgcaaggccagcggcagcagcttcaccggctacaacatgaactgggtgcgccagaacatcggcaagagcctggaatggatcggagccatcgacccctactacggcggcaccagctacaaccagaagttcaagggcagagccaccctgaccgtggacaagagcaccagcaccgcctacatgcacctgaagtccctgcggagcgaggacaccgccgtgtactactgtgtgtccggcatggaatattggggccagggcaccagcgtgaccgtgtctagtacgcgtatccagaaccctgatcctgccgtgtaccagctgcgggatagcaagagcagcgacaagagcgtgtgtctgttcaccgacttcgacagccagaccaacgtgtcccagagcaaggactccgacgtgtacatcaccgataagtgcgtgctggacatgcggagcatggacttcaagagcaactccgccgtggcctggtccaacaagtccgatttcgcctgcgccaacgccttcaacaacagcattatccccgaggacacattcttcccaagccccgagagcagcgactccaccgaccacgtgaagcccaaagagacagagaacaccaagcagcccagcaagagctgccacaagcccaaggccatcgtgcacaccgagaaagtgaacatgatgagcctgaccgtgctgggcctgcggatgctgttcgccaaaaccgtggccgtgaacttcctgctgaccgccaagctgttcttcctcctcaccgcc

SEQ ID NO: 6056 - DNA, 2166 bp, synthetic construct
  source 1..2166: mol_type = other DNA
atggccttaccagtgaccgccttgctcctgccgctggccttgctgctccacgccgccaggccggacgagatcgtgatgacccagacccctgccaccctgtctgtgtctgccggcgagagagtgaccattacctgcaaggccagccagagcgtgtccaacgacgtgacctggtatcagcagaagcccggccaggcccccagactgctgatctacagcgccagcaacagatacagcggcgtgcccgccagattttccggcagcggctacggcaccgagttcaccttcaccatcagcagcgtgcagagcgaggacttcgccgtgtacttctgtcagcaagactacagcagcttcggccagggcaccaagctggaaatcaagaggctcgaggacctgaagaacgtgttcccacctgaggtggccgtgttcgagcctagcgaggccgagatcagccacacccagaaagccaccctcgtgtgcctggctaccggcttctaccccgaccatgtggaactgtcttggtgggtcaacggcaaagaggtgcacagcggcgtgtgtaccgacccccagccactgaaagaacagcccgccctgaacgacagccggtactgcctgagcagcagactgagagtgtccgccaccttctggcagaacccccggaaccacttcagatgccaggtgcagttctacggcctgagcgagaacgacgagtggacccaggacagagccaagcccgtgacccagatcgtgtctgccgaagcctggggcagagccgatgatgtgattaagatccactggcaggaaaagaagtccaacaccatcctgggcagccaggaaggcaacaccatgaagaccaacgacacctacatgaagttcagctggctgaccgtgcccgagaagtccctggacaaagaacacagatgcatcgtgcggcacgaaaacaacaagaacggcgtggaccaggaaatcatcttcccacccatcaagaccgatgtgattacaatggaccccaaggacaactgctccaaggacgccaacgataccctgctgctccagctgaccaacaccagcgcctactacatgtacttgttgctgctgctgaagtccgtggtgtacttcgccatcatcacatgctgcctgctgatggctatggtcaagcggaaggacagccggggaagggccaagcgatctggatctggagcaacaaacttctcactactcaaacaagcaggtgacgtggaggagaatcccgggcctactagtatggactggatttggcgcatccttttccttgtcggcgctgctaccggcgcgcattccttcgaacaggtgcagctggtggaatctggacctggcgtggtgcagcctggcagaagcctgagaatcagctgtgccgtgtccggcttcagcgtgaccaactacggcgtgcactgggtgcgccagccacctggaaaaggactggaatggctgggcgtgatctgggctggcggcatcaccaactacaacagcgccttcatgtcccggctgaccatctccaaggacaacagcaagaacaccgtgtacctccagatgaacagcctgcgggccgaggacaccgccatgtactactgtgcttccagaggcggccactacggctacgccctggattattggggccagggaaccctcgtgaccgtgtcctctacgcgtatccagaaccctgatcctgccgtgtaccagctgcgggatagcaagagcagcgacaagagcgtgtgtctgttcaccgacttcgacagccagaccaacgtgtcccagagcaaggactccgacgtgtacatcaccgataagtgcgtgctggacatgcggagcatggacttcaagagcaactccgccgtggcctggtccaacaagtccgatttcgcctgcgccaacgccttcaacaacagcattatccccgaggacacattcttcccaagccccgagagcagcgactccaccgaccacgtgaagcccaaagagacagagaacaccaagcagcccagcaagagctgccacaagcccaaggccatcgtgcacaccgagaaagtgaacatgatgagcctgaccgtgctgggcctgcggatgctgttcgccaaaaccgtggccgtgaacttcctgctgaccgccaagctgttcttcctcctcaccgcc

SEQ ID NO: 6057 - DNA, 2172 bp, synthetic construct
  source 1..2172: mol_type = other DNA
atggccttaccagtgaccgccttgctcctgccgctggccttgctgctccacgccgccaggccggacatccagatgacccagaccgccagcagcctgcctgcctctctgggcgacagagtgaccatctcctgtagcgccagccaggacatcagcaactacctgaactggtatcagcagaaacccgacggcaccgtgaagctgctgatcttctacagcagcaacctgcacagcggcgtgcccagcagattttctggcggcggaagcggcaccgactacagcctgaccatcagcaatctggaacccgaggacattgccacctacttttgccaccagtacagcaagctgccctggacctttggcggaggcaccaagctggaaatcaagagactcgaggacctgaagaacgtgttcccacctgaggtggccgtgttcgagcctagcgaggccgagatcagccacacccagaaagccaccctcgtgtgcctggctaccggcttctaccccgaccatgtggaactgtcttggtgggtcaacggcaaagaggtgcacagcggcgtgtgtaccgacccccagccactgaaagaacagcccgccctgaacgacagccggtactgcctgagcagcagactgagagtgtccgccaccttctggcagaacccccggaaccacttcagatgccaggtgcagttctacggcctgagcgagaacgacgagtggacccaggacagagccaagcccgtgacccagatcgtgtctgccgaagcctggggcagagccgatgatgtgattaagatccactggcaggaaaagaagtccaacaccatcctgggcagccaggaaggcaacaccatgaagaccaacgacacctacatgaagttcagctggctgaccgtgcccgagaagtccctggacaaagaacacagatgcatcgtgcggcacgaaaacaacaagaacggcgtggaccaggaaatcatcttcccacccatcaagaccgatgtgattacaatggaccccaaggacaactgctccaaggacgccaacgataccctgctgctccagctgaccaacaccagcgcctactacatgtacttgttgctgctgctgaagtccgtggtgtacttcgccatcatcacatgctgcctgctgatggctatggtcaagcggaaggacagccggggaagggccaagcgatctggatctggagcaacaaacttctcactactcaaacaagcaggtgacgtggaggagaatcccgggcctactagtatggactggatttggcgcatccttttccttgtcggcgctgctaccggcgcgcattccttcgaagaagtgaccctggtggaaagcggcggagacttcgtgaagcctggcggctctctgaaggtgtcctgtgccgccagcggcttcgcctttagccactacgccatgagctgggtgcgccagacccctgccaagagactggaatgggtggcctacatcagcagcggcggctccggcacctactactccgatagcgtgaagggccggttcaccatcagccgggacaacgccaagaacaccctgtacctccagatgcggagcctgcggagcgaggacagcgccatgtatttctgcaccagagtgaagctgggcacctattacttcgactcttggggccagggcaccaccctgaccgtgtcatctacgcgtatccagaaccctgatcctgccgtgtaccagctgcgggatagcaagagcagcgacaagagcgtgtgtctgttcaccgacttcgacagccagaccaacgtgtcccagagcaaggactccgacgtgtacatcaccgataagtgcgtgctggacatgcggagcatggacttcaagagcaactccgccgtggcctggtccaacaagtccgatttcgcctgcgccaacgccttcaacaacagcattatccccgaggacacattcttcccaagccccgagagcagcgactccaccgaccacgtgaagcccaaagagacagagaacaccaagcagcccagcaagagctgccacaagcccaaggccatcgtgcacaccgagaaagtgaacatgatgagcctgaccgtgctgggcctgcggatgctgttcgccaaaaccgtggccgtgaacttcctgctgaccgccaagctgttcttcctcctcaccgcc

SEQ ID NO: 6058 - DNA, 2178 bp, synthetic construct
  source 1..2178: mol_type = other DNA
atggccttaccagtgaccgccttgctcctgccgctggccttgctgctccacgccgccaggccgcagttcgtgctgacccagagcccttctgcctctgctgccctgggagcctctgccaagctgacctgtacactgagcagcgcccacaagacctacaccatcgactggtatcagcagcagaagggaaaggcccccagatacctgatccaagtgaagtccgacggcacctacacaaaggccaccggcgtgcccgatagattcagcggcagtagcagcggagccgatagatacctgattatccccagcgtgcaggccgacgacgaggccgattactactgcggcaccgattacaccggcggctacgtgttcggcggaggcacacaactgaccgtgacactcgaggacctgaagaacgtgttcccacctgaggtggccgtgttcgagcctagcgaggccgagatcagccacacccagaaagccaccctcgtgtgcctggctaccggcttctaccccgaccatgtggaactgtcttggtgggtcaacggcaaagaggtgcacagcggcgtgtgtaccgacccccagccactgaaagaacagcccgccctgaacgacagccggtactgcctgagcagcagactgagagtgtccgccaccttctggcagaacccccggaaccacttcagatgccaggtgcagttctacggcctgagcgagaacgacgagtggacccaggacagagccaagcccgtgacccagatcgtgtctgccgaagcctggggcagagccgatgatgtgattaagatccactggcaggaaaagaagtccaacaccatcctgggcagccaggaaggcaacaccatgaagaccaacgacacctacatgaagttcagctggctgaccgtgcccgagaagtccctggacaaagaacacagatgcatcgtgcggcacgaaaacaacaagaacggcgtggaccaggaaatcatcttcccacccatcaagaccgatgtgattacaatggaccccaaggacaactgctccaaggacgccaacgataccctgctgctccagctgaccaacaccagcgcctactacatgtacttgttgctgctgctgaagtccgtggtgtacttcgccatcatcacatgctgcctgctgatggctatggtcaagcggaaggacagccggggaagggccaagcgatctggatctggagcaacaaacttctcactactcaaacaagcaggtgacgtggaggagaatcccgggcctactagtatggactggatttggcgcatccttttccttgtcggcgctgctaccggcgcgcattccttcgaagagcaactgaaagagtctggcggcggactgttcaagcccaccgataccctgaccctgacctgcaccgtgtccggcttcagcctgagctactacggcgtgaactgggtgcgccaggcccctggcaatggcctggaatggatcggcacaatcggcggcagcggcgacacctactatgcctcttgggccaagtccagaagcaccatcatcagaaacaccaacgagaacaccgtgaccctgaagatgaccagcctgacagccgccgacaccgccacctacttttgcgtcagatacgccaacatcggctacgagtatttcaacgtgtggggacccggcaccctcgtgaccgtgtcatctacgcgtatccagaaccctgatcctgccgtgtaccagctgcgggatagcaagagcagcgacaagagcgtgtgtctgttcaccgacttcgacagccagaccaacgtgtcccagagcaaggactccgacgtgtacatcaccgataagtgcgtgctggacatgcggagcatggacttcaagagcaactccgccgtggcctggtccaacaagtccgatttcgcctgcgccaacgccttcaacaacagcattatccccgaggacacattcttcccaagccccgagagcagcgactccaccgaccacgtgaagcccaaagagacagagaacaccaagcagcccagcaagagctgccacaagcccaaggccatcgtgcacaccgagaaagtgaacatgatgagcctgaccgtgctgggcctgcggatgctgttcgccaaaaccgtggccgtgaacttcctgctgaccgccaagctgttcttcctcctcaccgcc

SEQ ID NO: 6059 - DNA, 2193 bp, synthetic construct
  source 1..2193: mol_type = other DNA
atggccttaccagtgaccgccttgctcctgccgctggccttgctgctccacgccgccaggccgcagttcgtgctgacccagagcccttctgtgtctgccgccctgggagcctctgccaagctgacctgtacactgagcagcgcccacaagacctacaccatcgactggtatcagcagcagcagggcgaggcccccagatacctgatgcaagtgaagtccgacggcagctacaccaagggcaccggcgtgcccgatagattcagcggcagtagcagcggagccgatagatacctgattatccccagcgtgcaggccgacgacgaggccggatatgtgtgcggcgctgacgacaatggcggctacgtgttcggcggaggcacccaactgacagtgacactcgaggacctgaagaacgtgttcccacctgaggtggccgtgttcgagcctagcgaggccgagatcagccacacccagaaagccaccctcgtgtgcctggctaccggcttctaccccgaccatgtggaactgtcttggtgggtcaacggcaaagaggtgcacagcggcgtgtgtaccgacccccagccactgaaagaacagcccgccctgaacgacagccggtactgcctgagcagcagactgagagtgtccgccaccttctggcagaacccccggaaccacttcagatgccaggtgcagttctacggcctgagcgagaacgacgagtggacccaggacagagccaagcccgtgacccagatcgtgtctgccgaagcctggggcagagccgatgatgtgattaagatccactggcaggaaaagaagtccaacaccatcctgggcagccaggaaggcaacaccatgaagaccaacgacacctacatgaagttcagctggctgaccgtgcccgagaagtccctggacaaagaacacagatgcatcgtgcggcacgaaaacaacaagaacggcgtggaccaggaaatcatcttcccacccatcaagaccgatgtgattacaatggaccccaaggacaactgctccaaggacgccaacgataccctgctgctccagctgaccaacaccagcgcctactacatgtacttgttgctgctgctgaagtccgtggtgtacttcgccatcatcacatgctgcctgctgatggctatggtcaagcggaaggacagccggggaagggccaagcgatctggatctggagcaacaaacttctcactactcaaacaagcaggtgacgtggaggagaatcccgggcctactagtatggactggatttggcgcatccttttccttgtcggcgctgctaccggcgcgcattccttcgaacagagcgtgaaagagtctgagggcggcctgttcaagcccaccgataccctgaccctgacctgcaccgtgtccggcttcagcctgagcagacacgccctgacatgggtgcgccaggcccctggaaatggcctggaatggatcggagccatcgacaacgccggcaccacctactatgcctcttgggccaagtccagaagcaccatcacccggaacaccgacctgcacaccgtgaccctgaagatgaccagcctgaccgccagcgacaccgccacctacttttgcgccagagtgttctacgacatcaacagcggctactacctggacggcatggacctgtggggacctggcacacttgtgaccgtgtccagcacgcgtatccagaaccctgatcctgccgtgtaccagctgcgggatagcaagagcagcgacaagagcgtgtgtctgttcaccgacttcgacagccagaccaacgtgtcccagagcaaggactccgacgtgtacatcaccgataagtgcgtgctggacatgcggagcatggacttcaagagcaactccgccgtggcctggtccaacaagtccgatttcgcctgcgccaacgccttcaacaacagcattatccccgaggacacattcttcccaagccccgagagcagcgactccaccgaccacgtgaagcccaaagagacagagaacaccaagcagcccagcaagagctgccacaagcccaaggccatcgtgcacaccgagaaagtgaacatgatgagcctgaccgtgctgggcctgcggatgctgttcgccaaaaccgtggccgtgaacttcctgctgaccgccaagctgttcttcctcctcaccgcc

SEQ ID NO: 6060 - DNA, 2175 bp, synthetic construct
  source 1..2175: mol_type = other DNA
atggccttaccagtgaccgccttgctcctgccgctggccttgctgctccacgccgccaggccggacatccagatgacccagagccccagcagcctgtctgccagcgtgggcgacagagtgaccatcacctgtagagccagccagggcatcagctcttggctggcctggtatcagcagaagcccgagaaggcccccaagagcctgatctacgccgcctctagtctccagagcggcgtgcccagcagattttctggcagcggctccggcaccgacttcaccctgacaatcagctccctccagcccgaggacttcgccacctactactgccagcagtacaacagctacccccccacctttggcggaggcaccaaggtggaaatcaagctcgaggacctgaagaacgtgttcccacctgaggtggccgtgttcgagcctagcgaggccgagatcagccacacccagaaagccaccctcgtgtgcctggctaccggcttctaccccgaccatgtggaactgtcttggtgggtcaacggcaaagaggtgcacagcggcgtgtgtaccgacccccagccactgaaagaacagcccgccctgaacgacagccggtactgcctgagcagcagactgagagtgtccgccaccttctggcagaacccccggaaccacttcagatgccaggtgcagttctacggcctgagcgagaacgacgagtggacccaggacagagccaagcccgtgacccagatcgtgtctgccgaagcctggggcagagccgatgatgtgattaagatccactggcaggaaaagaagtccaacaccatcctgggcagccaggaaggcaacaccatgaagaccaacgacacctacatgaagttcagctggctgaccgtgcccgagaagtccctggacaaagaacacagatgcatcgtgcggcacgaaaacaacaagaacggcgtggaccaggaaatcatcttcccacccatcaagaccgatgtgattacaatggaccccaaggacaactgctccaaggacgccaacgataccctgctgctccagctgaccaacaccagcgcctactacatgtacttgttgctgctgctgaagtccgtggtgtacttcgccatcatcacatgctgcctgctgatggctatggtcaagcggaaggacagccggggaagggccaagcgatctggatctggagcaacaaacttctcactactcaaacaagcaggtgacgtggaggagaatcccgggcctactagtatggactggatttggcgcatccttttccttgtcggcgctgctaccggcgcgcattccttcgaagaagtgcaactggtggaatcaggcggcggactggtgcagcctggcgagtctctgagactgagctgtgtggcctccggcttcaccttcagccggtacaagatgaactgggtgcgccaggcccctggcaagggactggaatgggtgtcctacatcagccgcagcggcagagacatctactacgccgacagcgtgaagggccggttcaccatcagcagagacaacgccaagaacagcctgtacctccagatgaactccctgcgggacgaggacaccgccgtgtactactgtgccggaaccgtgaccacctattactacttcggcatggacgtgtggggccacggcaccaccgtgacagtgtcatctacgcgtatccagaaccctgatcctgccgtgtaccagctgcgggatagcaagagcagcgacaagagcgtgtgtctgttcaccgacttcgacagccagaccaacgtgtcccagagcaaggactccgacgtgtacatcaccgataagtgcgtgctggacatgcggagcatggacttcaagagcaactccgccgtggcctggtccaacaagtccgatttcgcctgcgccaacgccttcaacaacagcattatccccgaggacacattcttcccaagccccgagagcagcgactccaccgaccacgtgaagcccaaagagacagagaacaccaagcagcccagcaagagctgccacaagcccaaggccatcgtgcacaccgagaaagtgaacatgatgagcctgaccgtgctgggcctgcggatgctgttcgccaaaaccgtggccgtgaacttcctgctgaccgccaagctgttcttcctcctcaccgcc

SEQ ID NO: 6061 - DNA, 2178 bp, synthetic construct
  source 1..2178: mol_type = other DNA
atggccttaccagtgaccgccttgctcctgccgctggccttgctgctccacgccgccaggccggacatccagatgacccagagccccagcagcctgtctgccagcgtgggcgacagagtgaccatcacctgtagagccagccagggcatcagctcttggctggcctggtatcagcagaagcccgagaaggcccccaagagcctgatctacgccgcctctagtctccagagcggcgtgcccagcagattttctggcagcggctccggcaccgacttcaccctgacaatcagctccctccagcccgaggacttcgccacctactactgccagcagtacaacagctaccctcccacctttggcggaggcaccaaggtggaaatcaagctcgaggacctgaagaacgtgttcccacctgaggtggccgtgttcgagcctagcgaggccgagatcagccacacccagaaagccaccctcgtgtgcctggctaccggcttctaccccgaccatgtggaactgtcttggtgggtcaacggcaaagaggtgcacagcggcgtgtgtaccgacccccagccactgaaagaacagcccgccctgaacgacagccggtactgcctgagcagcagactgagagtgtccgccaccttctggcagaacccccggaaccacttcagatgccaggtgcagttctacggcctgagcgagaacgacgagtggacccaggacagagccaagcccgtgacccagatcgtgtctgccgaagcctggggcagagccgatgatgtgattaagatccactggcaggaaaagaagtccaacaccatcctgggcagccaggaaggcaacaccatgaagaccaacgacacctacatgaagttcagctggctgaccgtgcccgagaagtccctggacaaagaacacagatgcatcgtgcggcacgaaaacaacaagaacggcgtggaccaggaaatcatcttcccacccatcaagaccgatgtgattacaatggaccccaaggacaactgctccaaggacgccaacgataccctgctgctccagctgaccaacaccagcgcctactacatgtacttgttgctgctgctgaagtccgtggtgtacttcgccatcatcacatgctgcctgctgatggctatggtcaagcggaaggacagccggggaagggccaagcgatctggatctggagcaacaaacttctcactactcaaacaagcaggtgacgtggaggagaatcccgggcctactagtatggactggatttggcgcatccttttccttgtcggcgctgctaccggcgcgcattccttcgaagaagtgcaactggtggaatccgggggaggctctgtgcagcctggcgagtctctgagactgagctgtgtggcctccggcttcaccttcagccggtacaagatgaactgggtgcgccaggcccctggcaagggactggaatgggtgtcctacatcagccgcagcggcagagacatctactacgccgacagcgtgaagggccggttcaccatcagcagagacaacgccaagaacagcctgtacctccagatgaactccctgcgggacgaggacaccgccgtgtactactgtgccggaaccgtgaccacctattactacgacttcggcatggacgtgtggggccagggcacaaccgtgacagtgtctagcacgcgtatccagaaccctgatcctgccgtgtaccagctgcgggatagcaagagcagcgacaagagcgtgtgtctgttcaccgacttcgacagccagaccaacgtgtcccagagcaaggactccgacgtgtacatcaccgataagtgcgtgctggacatgcggagcatggacttcaagagcaactccgccgtggcctggtccaacaagtccgatttcgcctgcgccaacgccttcaacaacagcattatccccgaggacacattcttcccaagccccgagagcagcgactccaccgaccacgtgaagcccaaagagacagagaacaccaagcagcccagcaagagctgccacaagcccaaggccatcgtgcacaccgagaaagtgaacatgatgagcctgaccgtgctgggcctgcggatgctgttcgccaaaaccgtggccgtgaacttcctgctgaccgccaagctgttcttcctcctcaccgcc

SEQ ID NO: 6062 - DNA, 2172 bp, synthetic construct
  source 1..2172: mol_type = other DNA
atggccttaccagtgaccgccttgctcctgccgctggccttgctgctccacgccgccaggccgcagtctgtgctgacacagcctccatctgcctctggcacacctggacagagagtgaccatcagctgtagcggcagcagaagcaacgtcggcggcaactacgtgttctggtatcagcaggtcccaggcgctacccctaagctgctgatctacagaagcaatcagcggcctagcggcgtgcccgatagatttgccggaagcaagagcggcagctctgccagccttgccatctctggactgagaagcgaggacgaggccgactactactgtgccacctgggatgatagcctgagcggcttcgtgtttggcaccggcaccaaagtgacagtgcttggtctcgaggacctgaagaacgtgttcccacctgaggtggccgtgttcgagcctagcgaggccgagatcagccacacccagaaagccaccctcgtgtgcctggctaccggcttctaccccgaccatgtggaactgtcttggtgggtcaacggcaaagaggtgcacagcggcgtgtgtaccgacccccagccactgaaagaacagcccgccctgaacgacagccggtactgcctgagcagcagactgagagtgtccgccaccttctggcagaacccccggaaccacttcagatgccaggtgcagttctacggcctgagcgagaacgacgagtggacccaggacagagccaagcccgtgacccagatcgtgtctgccgaagcctggggcagagccgatgatgtgattaagatccactggcaggaaaagaagtccaacaccatcctgggcagccaggaaggcaacaccatgaagaccaacgacacctacatgaagttcagctggctgaccgtgcccgagaagtccctggacaaagaacacagatgcatcgtgcggcacgaaaacaacaagaacggcgtggaccaggaaatcatcttcccacccatcaagaccgatgtgattacaatggaccccaaggacaactgctccaaggacgccaacgataccctgctgctccagctgaccaacaccagcgcctactacatgtacttgttgctgctgctgaagtccgtggtgtacttcgccatcatcacatgctgcctgctgatggctatggtcaagcggaaggacagccggggaagggccaagcgatctggatctggagcaacaaacttctcactactcaaacaagcaggtgacgtggaggagaatcccgggcctactagtatggactggatttggcgcatccttttccttgtcggcgctgctaccggcgcgcattccttcgaagttcagctggttgaatctggcggcggactggttaagcctggcggatctctgagactgtcttgtgccgccagcggcttcaccttcagcgattactacatgagctggatcagacaggcccctggcaaaggactggaatgggtgtcctacatcagcagcagcggctccaccatctactacgccgatagcgtgaagggcagattcaccatcagccgggacaacgccaagaacagcctgtacctccagatgaactccctgagagccgaggacaccgccgtgtactattgcgccagaggctacggcaaagcctacgatcaatggggccagggcacactggtcaccgtttcttctacgcgtatccagaaccctgatcctgccgtgtaccagctgcgggatagcaagagcagcgacaagagcgtgtgtctgttcaccgacttcgacagccagaccaacgtgtcccagagcaaggactccgacgtgtacatcaccgataagtgcgtgctggacatgcggagcatggacttcaagagcaactccgccgtggcctggtccaacaagtccgatttcgcctgcgccaacgccttcaacaacagcattatccccgaggacacattcttcccaagccccgagagcagcgactccaccgaccacgtgaagcccaaagagacagagaacaccaagcagcccagcaagagctgccacaagcccaaggccatcgtgcacaccgagaaagtgaacatgatgagcctgaccgtgctgggcctgcggatgctgttcgccaaaaccgtggccgtgaacttcctgctgaccgccaagctgttcttcctcctcaccgcc

SEQ ID NO: 6063 - DNA, 2169 bp, synthetic construct
  source 1..2169: mol_type = other DNA
atggccttaccagtgaccgccttgctcctgccgctggccttgctgctccacgccgccaggccgcagtctgtggtcacacagccacctagcatgtctgccgctccaggccagcaagtgaccatctcttgtagcggcggcaacagcaacatcgagcggaactacgtgtcctggtatctgcaactgcctggcacagcccctaagctggtcatcttcgacaacgacagacggcccagcggcatccccgatagattttctggcagcaagagcggcaccagcgccacactgggaattaccggacttcagacaggcgacgaggccgactactactgtggcacatgggactctagcctgagaggctgggttttcggcggaggcacaaagctgacagtgcttggtctcgaggacctgaagaacgtgttcccacctgaggtggccgtgttcgagcctagcgaggccgagatcagccacacccagaaagccaccctcgtgtgcctggctaccggcttctaccccgaccatgtggaactgtcttggtgggtcaacggcaaagaggtgcacagcggcgtgtgtaccgacccccagccactgaaagaacagcccgccctgaacgacagccggtactgcctgagcagcagactgagagtgtccgccaccttctggcagaacccccggaaccacttcagatgccaggtgcagttctacggcctgagcgagaacgacgagtggacccaggacagagccaagcccgtgacccagatcgtgtctgccgaagcctggggcagagccgatgatgtgattaagatccactggcaggaaaagaagtccaacaccatcctgggcagccaggaaggcaacaccatgaagaccaacgacacctacatgaagttcagctggctgaccgtgcccgagaagtccctggacaaagaacacagatgcatcgtgcggcacgaaaacaacaagaacggcgtggaccaggaaatcatcttcccacccatcaagaccgatgtgattacaatggaccccaaggacaactgctccaaggacgccaacgataccctgctgctccagctgaccaacaccagcgcctactacatgtacttgttgctgctgctgaagtccgtggtgtacttcgccatcatcacatgctgcctgctgatggctatggtcaagcggaaggacagccggggaagggccaagcgatctggatctggagcaacaaacttctcactactcaaacaagcaggtgacgtggaggagaatcccgggcctactagtatggactggatttggcgcatccttttccttgtcggcgctgctaccggcgcgcattccttcgaagtgcagctcgttgagtctggcggcggactgattcaacctggcggaagcctgagactgagctgtgccgcttccggcttcaccttcagcaactacgccatgaactgggttcgacaggcccctggcaaaggactggaatgggtgtccaccatcaacggcagaggcagcagcaccatctacgccgattctgtgaagggcagattcaccatcagccgggacaacagcaagaacaccctgtacctccagatgaactccctgagagccgaggacaccgccacctattactgtgcccggtacatcagcagaggactgggcgattcttggggccagggcacactggttacagtgacgcgtatccagaaccctgatcctgccgtgtaccagctgcgggatagcaagagcagcgacaagagcgtgtgtctgttcaccgacttcgacagccagaccaacgtgtcccagagcaaggactccgacgtgtacatcaccgataagtgcgtgctggacatgcggagcatggacttcaagagcaactccgccgtggcctggtccaacaagtccgatttcgcctgcgccaacgccttcaacaacagcattatccccgaggacacattcttcccaagccccgagagcagcgactccaccgaccacgtgaagcccaaagagacagagaacaccaagcagcccagcaagagctgccacaagcccaaggccatcgtgcacaccgagaaagtgaacatgatgagcctgaccgtgctgggcctgcggatgctgttcgccaaaaccgtggccgtgaacttcctgctgaccgccaagctgttcttcctcctcaccgcc

SEQ ID NO: 6064 - DNA, 2172 bp, synthetic construct
  source 1..2172: mol_type = other DNA
atggccttaccagtgaccgccttgctcctgccgctggccttgctgctccacgccgccaggccggacgtcgtgatgacccagacccctctgagcctgcctgtgtccctgggcgatcaggccagcatcagctgtagaagcagccagagcctggtgcacagcaacggcaacacctacctgcactggtatctccagaagcccggccagagccccaagctgctgatctacaaggtgtccaacagattcagcggcgtgcccgacagattctccggcagcggctctggcaccgacttcaccctgaagatcagccgggtggaagccgaggacctgggcgtgtacttctgtagccagaacacccccgtgccccccaagtttggcagcggcaccaagctggaaatcaagctcgaggacctgaagaacgtgttcccacctgaggtggccgtgttcgagcctagcgaggccgagatcagccacacccagaaagccaccctcgtgtgcctggctaccggcttctaccccgaccatgtggaactgtcttggtgggtcaacggcaaagaggtgcacagcggcgtgtgtaccgacccccagccactgaaagaacagcccgccctgaacgacagccggtactgcctgagcagcagactgagagtgtccgccaccttctggcagaacccccggaaccacttcagatgccaggtgcagttctacggcctgagcgagaacgacgagtggacccaggacagagccaagcccgtgacccagatcgtgtctgccgaagcctggggcagagccgatgatgtgattaagatccactggcaggaaaagaagtccaacaccatcctgggcagccaggaaggcaacaccatgaagaccaacgacacctacatgaagttcagctggctgaccgtgcccgagaagtccctggacaaagaacacagatgcatcgtgcggcacgaaaacaacaagaacggcgtggaccaggaaatcatcttcccacccatcaagaccgatgtgattacaatggaccccaaggacaactgctccaaggacgccaacgataccctgctgctccagctgaccaacaccagcgcctactacatgtacttgttgctgctgctgaagtccgtggtgtacttcgccatcatcacatgctgcctgctgatggctatggtcaagcggaaggacagccggggaagggccaagcgatctggatctggagcaacaaacttctcactactcaaacaagcaggtgacgtggaggagaatcccgggcctactagtatggactggatttggcgcatccttttccttgtcggcgctgctaccggcgcgcattccttcgaacaggtgcagctccagcagtctggcgctgaactcgtgcggcctggcgcttctgtgaagctgtcttgcaaggccagcggctacaccttcaacgactacgagatgcactgggtcaagcagacccctgtgcacggcctgaagtggatcggagccctggaacccaagaccggcgataccgcctacagccagaagttcaagggcaaggccaccctgaccgccgacaagagcagcagcacagcctacatggaactgcggagcctgaccagcgaggacagcgccgtgtactactgcaccagctgctactactacacctacagcggccagggcaccctcgtgacagtgtctgctacgcgtatccagaaccctgatcctgccgtgtaccagctgcgggatagcaagagcagcgacaagagcgtgtgtctgttcaccgacttcgacagccagaccaacgtgtcccagagcaaggactccgacgtgtacatcaccgataagtgcgtgctggacatgcggagcatggacttcaagagcaactccgccgtggcctggtccaacaagtccgatttcgcctgcgccaacgccttcaacaacagcattatccccgaggacacattcttcccaagccccgagagcagcgactccaccgaccacgtgaagcccaaagagacagagaacaccaagcagcccagcaagagctgccacaagcccaaggccatcgtgcacaccgagaaagtgaacatgatgagcctgaccgtgctgggcctgcggatgctgttcgccaaaaccgtggccgtgaacttcctgctgaccgccaagctgttcttcctcctcaccgcc

SEQ ID NO: 6065 - DNA, 2169 bp, synthetic construct
  source 1..2169: mol_type = other DNA
atggccttaccagtgaccgccttgctcctgccgctggccttgctgctccacgccgccaggccggacatccaactgacccagagccccagcagcctgtctgcctctgtgggcgacagagtgaccatcacctgtagagccagccagggcatcagaaacgacctgggctggtatcagcagaagcccggcaaggcccccaagcggctgatctatgctgccagctccctccagaatggcgtgcccagcagattttccggcagcggctctggcaccgagttcaccctgaccatcagctccctccagcccgaggacttcgccacctactactgcctccagcacaacacctaccccgccttcggccagggcaccaaggtggaaatcaagagactcgaggacctgaagaacgtgttcccacctgaggtggccgtgttcgagcctagcgaggccgagatcagccacacccagaaagccaccctcgtgtgcctggctaccggcttctaccccgaccatgtggaactgtcttggtgggtcaacggcaaagaggtgcacagcggcgtgtgtaccgacccccagccactgaaagaacagcccgccctgaacgacagccggtactgcctgagcagcagactgagagtgtccgccaccttctggcagaacccccggaaccacttcagatgccaggtgcagttctacggcctgagcgagaacgacgagtggacccaggacagagccaagcccgtgacccagatcgtgtctgccgaagcctggggcagagccgatgatgtgattaagatccactggcaggaaaagaagtccaacaccatcctgggcagccaggaaggcaacaccatgaagaccaacgacacctacatgaagttcagctggctgaccgtgcccgagaagtccctggacaaagaacacagatgcatcgtgcggcacgaaaacaacaagaacggcgtggaccaggaaatcatcttcccacccatcaagaccgatgtgattacaatggaccccaaggacaactgctccaaggacgccaacgataccctgctgctccagctgaccaacaccagcgcctactacatgtacttgttgctgctgctgaagtccgtggtgtacttcgccatcatcacatgctgcctgctgatggctatggtcaagcggaaggacagccggggaagggccaagcgatctggatctggagcaacaaacttctcactactcaaacaagcaggtgacgtggaggagaatcccgggcctactagtatggactggatttggcgcatccttttccttgtcggcgctgctaccggcgcgcattccttcgaacaggtgcaactccaggaatctggccctggcctcgtgaagcctagccagaccctgagcctgacctgtaccgtgtctggcggcagcatcagcagcttcaactactactggtcctggatcagacaccaccctggcaagggcctggaatggatcggctacatctactacagcggcagcacctacagcaaccccagcctgaagtcccgcgtgaccatctccgtggacaccagcaagaaccagtttagcctgaccctgtccagcgtgacagccgccgataccgccgtgtactactgcgccagaggctacaactggaactacttcgactactggggccagggaaccctcgtgaccgtgtctagtacgcgtatccagaaccctgatcctgccgtgtaccagctgcgggatagcaagagcagcgacaagagcgtgtgtctgttcaccgacttcgacagccagaccaacgtgtcccagagcaaggactccgacgtgtacatcaccgataagtgcgtgctggacatgcggagcatggacttcaagagcaactccgccgtggcctggtccaacaagtccgatttcgcctgcgccaacgccttcaacaacagcattatccccgaggacacattcttcccaagccccgagagcagcgactccaccgaccacgtgaagcccaaagagacagagaacaccaagcagcccagcaagagctgccacaagcccaaggccatcgtgcacaccgagaaagtgaacatgatgagcctgaccgtgctgggcctgcggatgctgttcgccaaaaccgtggccgtgaacttcctgctgaccgccaagctgttcttcctcctcaccgcc

SEQ ID NO: 6066 - DNA, 2175 bp, synthetic construct
  source 1..2175: mol_type = other DNA
atggccttaccagtgaccgccttgctcctgccgctggccttgctgctccacgccgccaggccggacgacatcgtgctgacccagagccccgccagcctggccgtgagcctgggccagagcgtgaccatcagctgcagagccagcgagagcgtggagtactacggcaccagcctgatgcagtggtaccagcagaagcccggccagccccccaagctgctgatctacgccaccagcaacgtggagagcggcgtgcccgccagattcagcggcagcggcagcggcaccgacttcagcctgaacatccaccccgtggaggaggacgacatcgccatgtacttctgccagcagagcagaaagctgcccagcaccttcggcggcggcaccaagctggagatcaagctcgaggacctgaagaacgtgttcccacctgaggtggccgtgttcgagcctagcgaggccgagatcagccacacccagaaagccaccctcgtgtgcctggctaccggcttctaccccgaccatgtggaactgtcttggtgggtcaacggcaaagaggtgcacagcggcgtgtgtaccgacccccagccactgaaagaacagcccgccctgaacgacagccggtactgcctgagcagcagactgagagtgtccgccaccttctggcagaacccccggaaccacttcagatgccaggtgcagttctacggcctgagcgagaacgacgagtggacccaggacagagccaagcccgtgacccagatcgtgtctgccgaagcctggggcagagccgatgatgtgattaagatccactggcaggaaaagaagtccaacaccatcctgggcagccaggaaggcaacaccatgaagaccaacgacacctacatgaagttcagctggctgaccgtgcccgagaagtccctggacaaagaacacagatgcatcgtgcggcacgaaaacaacaagaacggcgtggaccaggaaatcatcttcccacccatcaagaccgatgtgattacaatggaccccaaggacaactgctccaaggacgccaacgataccctgctgctccagctgaccaacaccagcgcctactacatgtacttgttgctgctgctgaagtccgtggtgtacttcgccatcatcacatgctgcctgctgatggctatggtcaagcggaaggacagccggggaagggccaagcgatctggatctggagcaacaaacttctcactactcaaacaagcaggtgacgtggaggagaatcccgggcctactagtatggactggatttggcgcatccttttccttgtcggcgctgctaccggcgcgcattccttcgaagacgtgagactgcaggagagcggccccggccaggtgaagcccagccagaccgtgagcctgacctgcagcgtgaccggctacagcatcaccaacggcaaccactggtggaactggatcagacaggtgagcggcagcaagctggagtggatcggctacatcagcagcagcggcagcaccgacagcaaccccagcctgaagagcagaatcagcatcaccagagacaccagcaagaaccagctgttcctgcagctgaacagcgtgaccaccgaggacatcgccacctactactgcgccagaggctactacttcgactactggggccagggcaccaccctgaccgtgagcagcacgcgtatccagaaccctgatcctgccgtgtaccagctgcgggatagcaagagcagcgacaagagcgtgtgtctgttcaccgacttcgacagccagaccaacgtgtcccagagcaaggactccgacgtgtacatcaccgataagtgcgtgctggacatgcggagcatggacttcaagagcaactccgccgtggcctggtccaacaagtccgatttcgcctgcgccaacgccttcaacaacagcattatccccgaggacacattcttcccaagccccgagagcagcgactccaccgaccacgtgaagcccaaagagacagagaacaccaagcagcccagcaagagctgccacaagcccaaggccatcgtgcacaccgagaaagtgaacatgatgagcctgaccgtgctgggcctgcggatgctgttcgccaaaaccgtggccgtgaacttcctgctgaccgccaagctgttcttcctcctcaccgcc

SEQ ID NO: 6067 - DNA, 2172 bp, synthetic construct
  source 1..2172: mol_type = other DNA
atggccttaccagtgaccgccttgctcctgccgctggccttgctgctccacgccgccaggccggacatccagatgacccagagccccagcagcctgtctgccagcgtgggcgacagagtgaccatcacctgtagagccagccaggacgtgaacaccgccgtggcctggtatcagcagaagcctggcaaggcccccaagctgctgatctacagcgccagcttcctggaaagcggcgtgcccagcagattcagcggaagcagaagcggcaccgacttcaccctgaccatcagctccctccagcccgaggacttcgccacctactactgccagcagcactacaccacccctcccaccttcggccagaccaaggtggaaatcaagagactcgaggacctgaagaacgtgttcccacctgaggtggccgtgttcgagcctagcgaggccgagatcagccacacccagaaagccaccctcgtgtgcctggctaccggcttctaccccgaccatgtggaactgtcttggtgggtcaacggcaaagaggtgcacagcggcgtgtgtaccgacccccagccactgaaagaacagcccgccctgaacgacagccggtactgcctgagcagcagactgagagtgtccgccaccttctggcagaacccccggaaccacttcagatgccaggtgcagttctacggcctgagcgagaacgacgagtggacccaggacagagccaagcccgtgacccagatcgtgtctgccgaagcctggggcagagccgatgatgtgattaagatccactggcaggaaaagaagtccaacaccatcctgggcagccaggaaggcaacaccatgaagaccaacgacacctacatgaagttcagctggctgaccgtgcccgagaagtccctggacaaagaacacagatgcatcgtgcggcacgaaaacaacaagaacggcgtggaccaggaaatcatcttcccacccatcaagaccgatgtgattacaatggaccccaaggacaactgctccaaggacgccaacgataccctgctgctccagctgaccaacaccagcgcctactacatgtacttgttgctgctgctgaagtccgtggtgtacttcgccatcatcacatgctgcctgctgatggctatggtcaagcggaaggacagccggggaagggccaagcgatctggatctggagcaacaaacttctcactactcaaacaagcaggtgacgtggaggagaatcccgggcctactagtatggactggatttggcgcatccttttccttgtcggcgctgctaccggcgcgcattccttcgaagaagtgcaactggtggaatctggcggcggactggtgcagcctggcggatctctgagactgagctgtgccgccagcggcttcaacatcaaggacacctacatccactgggtgcgccaggcccctggaaagggactggaatgggtggcccggatctaccccaccaacggctacaccagatacgccgacagcgtgaagggccggttcaccatcagcgccgacaccagcaagaataccgcctacctccagatgaacagcctgcgggccgaggataccgccgtgtactactgctcaagatggggaggcgacggcttctacgctatggacgtgtggggccagggcacccttgtgaccgtgtcatctacgcgtatccagaaccctgatcctgccgtgtaccagctgcgggatagcaagagcagcgacaagagcgtgtgtctgttcaccgacttcgacagccagaccaacgtgtcccagagcaaggactccgacgtgtacatcaccgataagtgcgtgctggacatgcggagcatggacttcaagagcaactccgccgtggcctggtccaacaagtccgatttcgcctgcgccaacgccttcaacaacagcattatccccgaggacacattcttcccaagccccgagagcagcgactccaccgaccacgtgaagcccaaagagacagagaacaccaagcagcccagcaagagctgccacaagcccaaggccatcgtgcacaccgagaaagtgaacatgatgagcctgaccgtgctgggcctgcggatgctgttcgccaaaaccgtggccgtgaacttcctgctgaccgccaagctgttcttcctcctcaccgcc

SEQ ID NO: 6068 - DNA, 2169 bp, synthetic construct
  source 1..2169: mol_type = other DNA
atggccttaccagtgaccgccttgctcctgccgctggccttgctgctccacgccgccaggccggaccagagcgtgctgacacagcctcctagcgtgtcagtggcccctggcaagaccgccagaatcccctgcgagggcaactacatcggcagcagcaacgtgcactggtatcagcagaagcccggccaggctcccgtgctcgtgatccacttcgacagcgacagacccagcggcatccccgacagattcagcggcagcaacagcggcaacatggctaccctgaccatcagcagagtggaagccggggacgaggccgactactactgtcaagtgtgggagaaccacggctgggtgttcggcggaggcaccaagctgacagtgctgtctctcgaggacctgaagaacgtgttcccacctgaggtggccgtgttcgagcctagcgaggccgagatcagccacacccagaaagccaccctcgtgtgcctggctaccggcttctaccccgaccatgtggaactgtcttggtgggtcaacggcaaagaggtgcacagcggcgtgtgtaccgacccccagccactgaaagaacagcccgccctgaacgacagccggtactgcctgagcagcagactgagagtgtccgccaccttctggcagaacccccggaaccacttcagatgccaggtgcagttctacggcctgagcgagaacgacgagtggacccaggacagagccaagcccgtgacccagatcgtgtctgccgaagcctggggcagagccgatgatgtgattaagatccactggcaggaaaagaagtccaacaccatcctgggcagccaggaaggcaacaccatgaagaccaacgacacctacatgaagttcagctggctgaccgtgcccgagaagtccctggacaaagaacacagatgcatcgtgcggcacgaaaacaacaagaacggcgtggaccaggaaatcatcttcccacccatcaagaccgatgtgattacaatggaccccaaggacaactgctccaaggacgccaacgataccctgctgctccagctgaccaacaccagcgcctactacatgtacttgttgctgctgctgaagtccgtggtgtacttcgccatcatcacatgctgcctgctgatggctatggtcaagcggaaggacagccggggaagggccaagcgatctggatctggagcaacaaacttctcactactcaaacaagcaggtgacgtggaggagaatcccgggcctactagtatggactggatttggcgcatccttttccttgtcggcgctgctaccggcgcgcattccttcgaagaggtgcaactggtggaaacaggcggcggactggtgcagcctggcgagtctctgagactgagctgtgccgccagcggcttcaccttcagcgactacgagatgaactgggtgcgccaggcccctggaaagggcctggaatgggtgtcctacatcagcagctccggcagcaccatctactacgccgacagcgtgaagggccggtttaccatctaccgggacaacgccaagaacagcctgtacctccagatgaactccctgcgggccgaggacaccgccctgtactattgtgccagagcctggggcgtgggaccccctgattattggggacagggcaccctcgtgaccgtgtcctctacgcgtatccagaaccctgatcctgccgtgtaccagctgcgggatagcaagagcagcgacaagagcgtgtgtctgttcaccgacttcgacagccagaccaacgtgtcccagagcaaggactccgacgtgtacatcaccgataagtgcgtgctggacatgcggagcatggacttcaagagcaactccgccgtggcctggtccaacaagtccgatttcgcctgcgccaacgccttcaacaacagcattatccccgaggacacattcttcccaagccccgagagcagcgactccaccgaccacgtgaagcccaaagagacagagaacaccaagcagcccagcaagagctgccacaagcccaaggccatcgtgcacaccgagaaagtgaacatgatgagcctgaccgtgctgggcctgcggatgctgttcgccaaaaccgtggccgtgaacttcctgctgaccgccaagctgttcttcctcctcaccgcc

SEQ ID NO: 6069 - DNA, 2193 bp, synthetic construct
  source 1..2193: mol_type = other DNA
atggccttaccagtgaccgccttgctcctgccgctggccttgctgctccacgccgccaggccggacatccagatgacccagagccccagcagcctgtctgccagcgtgggcgataccgtgaccatcacctgtcaggccaacggctacctgaactggtatcagcagcggagaggcaaggcccccaagctgctgatctacgacggcagcaagctggaaagaggcgtgcccagcagattcagcggcagaagatggggccaggagtacaacctgaccatcaacaacctccagcccgaggatattgccacatacttttgccaggtgtacgagttcgtggtgcccggcacacggctggacctgaagagaacagtggctgctcctctcgaggacctgaagaacgtgttcccacctgaggtggccgtgttcgagcctagcgaggccgagatcagccacacccagaaagccaccctcgtgtgcctggctaccggcttctaccccgaccatgtggaactgtcttggtgggtcaacggcaaagaggtgcacagcggcgtgtgtaccgacccccagccactgaaagaacagcccgccctgaacgacagccggtactgcctgagcagcagactgagagtgtccgccaccttctggcagaacccccggaaccacttcagatgccaggtgcagttctacggcctgagcgagaacgacgagtggacccaggacagagccaagcccgtgacccagatcgtgtctgccgaagcctggggcagagccgatgatgtgattaagatccactggcaggaaaagaagtccaacaccatcctgggcagccaggaaggcaacaccatgaagaccaacgacacctacatgaagttcagctggctgaccgtgcccgagaagtccctggacaaagaacacagatgcatcgtgcggcacgaaaacaacaagaacggcgtggaccaggaaatcatcttcccacccatcaagaccgatgtgattacaatggaccccaaggacaactgctccaaggacgccaacgataccctgctgctccagctgaccaacaccagcgcctactacatgtacttgttgctgctgctgaagtccgtggtgtacttcgccatcatcacatgctgcctgctgatggctatggtcaagcggaaggacagccggggaagggccaagcgatctggatctggagcaacaaacttctcactactcaaacaagcaggtgacgtggaggagaatcccgggcctactagtatggactggatttggcgcatccttttccttgtcggcgctgctaccggcgcgcattccttcgaacaggtgcagctgctccagtctggcgctgccgtgacaaagcctggcgcttctgtgcgggtgtcctgtgaagccagcggctacaacatccgggactacttcatccactggtggcggcaggctccaggccagggactccagtgggtgggatggatcaaccccaagaccggccagcccaacaaccccagacagttccagggcagagtgtccctgaccagacacgccagctgggacttcgacaccttcagcttctacatggatctgaaggccctgcggagcgacgataccgccgtgtacttctgcgccagacagagaagcgactactgggatttcgacgtgtggggcagcggcacccaagtgacagtgtctagcgccagcaccaagggacccacgcgtatccagaaccctgatcctgccgtgtaccagctgcgggatagcaagagcagcgacaagagcgtgtgtctgttcaccgacttcgacagccagaccaacgtgtcccagagcaaggactccgacgtgtacatcaccgataagtgcgtgctggacatgcggagcatggacttcaagagcaactccgccgtggcctggtccaacaagtccgatttcgcctgcgccaacgccttcaacaacagcattatccccgaggacacattcttcccaagccccgagagcagcgactccaccgaccacgtgaagcccaaagagacagagaacaccaagcagcccagcaagagctgccacaagcccaaggccatcgtgcacaccgagaaagtgaacatgatgagcctgaccgtgctgggcctgcggatgctgttcgccaaaaccgtggccgtgaacttcctgctgaccgccaagctgttcttcctcctcaccgcc

SEQ ID NO: 6070 - DNA, 2211 bp, synthetic construct
  source 1..2211: mol_type = other DNA
atggccttaccagtgaccgccttgctcctgccgctggccttgctgctccacgccgccaggccgcagtctgccctgacacagcctcctagcgcctctggctctcccggccagagcatcaccatcagctgtaccggcaccagcaacaacttcgtgtcctggtatcagcagcacgccggcaaggcccccaagctcgtgatctacgacgtgaacaagcggcccagcggcgtgcccgatagattcagcggcagcaagagcggcaacaccgccagcctgacagtgtctggcctccagaccgatgacgaggccgtgtactactgcggcagcctcgtgggcaactgggacgtgatctttggcggaggcaccaagctgaccgtgctgctcgaggacctgaagaacgtgttcccacctgaggtggccgtgttcgagcctagcgaggccgagatcagccacacccagaaagccaccctcgtgtgcctggctaccggcttctaccccgaccatgtggaactgtcttggtgggtcaacggcaaagaggtgcacagcggcgtgtgtaccgacccccagccactgaaagaacagcccgccctgaacgacagccggtactgcctgagcagcagactgagagtgtccgccaccttctggcagaacccccggaaccacttcagatgccaggtgcagttctacggcctgagcgagaacgacgagtggacccaggacagagccaagcccgtgacccagatcgtgtctgccgaagcctggggcagagccgatgatgtgattaagatccactggcaggaaaagaagtccaacaccatcctgggcagccaggaaggcaacaccatgaagaccaacgacacctacatgaagttcagctggctgaccgtgcccgagaagtccctggacaaagaacacagatgcatcgtgcggcacgaaaacaacaagaacggcgtggaccaggaaatcatcttcccacccatcaagaccgatgtgattacaatggaccccaaggacaactgctccaaggacgccaacgataccctgctgctccagctgaccaacaccagcgcctactacatgtacttgttgctgctgctgaagtccgtggtgtacttcgccatcatcacatgctgcctgctgatggctatggtcaagcggaaggacagccggggaagggccaagcgatctggatctggagcaacaaacttctcactactcaaacaagcaggtgacgtggaggagaatcccgggcctactagtatggactggatttggcgcatccttttccttgtcggcgctgctaccggcgcgcattccttcgaacagccccagctccaggaatctggccccacactggtggaagccagcgagacactgagcctgacctgtgccgtgtccggcgattctaccgccgcctgcaatagcttctggggctgggtgcgccagcctcctggaaagggactggaatgggtgggaagcctgagccactgcgccagctattggaaccggggctggacctaccacaaccccagcctgaagtccagactgaccctggccctggacacccccaagaacctggtgttcctgaagctgaacagcgtgacagccgccgacaccgccacctactactgtgccagatttggcggcgaggtgctgcggtacaccgactggcctaaacctgcctgggtggacctgtggggcagaggaacactcgtgaccgtgtccagcacgcgtatccagaaccctgatcctgccgtgtaccagctgcgggatagcaagagcagcgacaagagcgtgtgtctgttcaccgacttcgacagccagaccaacgtgtcccagagcaaggactccgacgtgtacatcaccgataagtgcgtgctggacatgcggagcatggacttcaagagcaactccgccgtggcctggtccaacaagtccgatttcgcctgcgccaacgccttcaacaacagcattatccccgaggacacattcttcccaagccccgagagcagcgactccaccgaccacgtgaagcccaaagagacagagaacaccaagcagcccagcaagagctgccacaagcccaaggccatcgtgcacaccgagaaagtgaacatgatgagcctgaccgtgctgggcctgcggatgctgttcgccaaaaccgtggccgtgaacttcctgctgaccgccaagctgttcttcctcctcaccgcc

SEQ ID NO: 6071 - DNA, 2166 bp, synthetic construct
  source 1..2166: mol_type = other DNA
atggccttaccagtgaccgccttgctcctgccgctggccttgctgctccacgccgccaggccggagatcgtgctgacacagagccctggcaccctgagcctgtctccaggcgagacagccatcatcagctgccggacaagccagtacggcagcctggcctggtatcagcagaggccaggacaggcccccagactcgtgatctacagcggcagcacaagagccgccggaatccccgatagattcagcggctccagatggggacccgactacaacctgaccatcagcaacctggaaagcggcgacttcggcgtgtactactgccagcagtacgagttcttcggccagggcaccaaggtgcaggtggacatcaaaagactcgaggacctgaagaacgtgttcccacctgaggtggccgtgttcgagcctagcgaggccgagatcagccacacccagaaagccaccctcgtgtgcctggctaccggcttctaccccgaccatgtggaactgtcttggtgggtcaacggcaaagaggtgcacagcggcgtgtgtaccgacccccagccactgaaagaacagcccgccctgaacgacagccggtactgcctgagcagcagactgagagtgtccgccaccttctggcagaacccccggaaccacttcagatgccaggtgcagttctacggcctgagcgagaacgacgagtggacccaggacagagccaagcccgtgacccagatcgtgtctgccgaagcctggggcagagccgatgatgtgattaagatccactggcaggaaaagaagtccaacaccatcctgggcagccaggaaggcaacaccatgaagaccaacgacacctacatgaagttcagctggctgaccgtgcccgagaagtccctggacaaagaacacagatgcatcgtgcggcacgaaaacaacaagaacggcgtggaccaggaaatcatcttcccacccatcaagaccgatgtgattacaatggaccccaaggacaactgctccaaggacgccaacgataccctgctgctccagctgaccaacaccagcgcctactacatgtacttgttgctgctgctgaagtccgtggtgtacttcgccatcatcacatgctgcctgctgatggctatggtcaagcggaaggacagccggggaagggccaagcgatctggatctggagcaacaaacttctcactactcaaacaagcaggtgacgtggaggagaatcccgggcctactagtatggactggatttggcgcatccttttccttgtcggcgctgctaccggcgcgcattccttcgaacaggtgcagctggtgcagtctggcggccagatgaagaaacccggcgagagcatgagaatcagctgtcgggcctccggctacgagttcatcgactgcaccctgaactggatcagactggcccctggcaagcggcctgagtggatgggatggctgaagcctagaggcggagccgtgaactacgccagacctctccagggcagagtgaccatgaccagggacgtgtacagcgataccgccttcctggaactgcggagcctgaccgtggatgataccgccgtgtacttctgcaccagaggcaagaactgcgattacaactgggacttcgagcactggggcagaggcacccctgtgatcgtgtctagcacgcgtatccagaaccctgatcctgccgtgtaccagctgcgggatagcaagagcagcgacaagagcgtgtgtctgttcaccgacttcgacagccagaccaacgtgtcccagagcaaggactccgacgtgtacatcaccgataagtgcgtgctggacatgcggagcatggacttcaagagcaactccgccgtggcctggtccaacaagtccgatttcgcctgcgccaacgccttcaacaacagcattatccccgaggacacattcttcccaagccccgagagcagcgactccaccgaccacgtgaagcccaaagagacagagaacaccaagcagcccagcaagagctgccacaagcccaaggccatcgtgcacaccgagaaagtgaacatgatgagcctgaccgtgctgggcctgcggatgctgttcgccaaaaccgtggccgtgaacttcctgctgaccgccaagctgttcttcctcctcaccgcc

SEQ ID NO: 6072 - DNA, 2196 bp, synthetic construct
  source 1..2196: mol_type = other DNA
atggccttaccagtgaccgccttgctcctgccgctggccttgctgctccacgccgccaggccggagctggtgctgacacagagccctggcaccctgtctctgtctgccggcgaaagagccaccctgagctgtagagccagccagagcgtgtcctctggcagcctggcttggtatcagcagaagccaggccaggcccccagactgctgatctacggcgcttctaccagagccaccggcatccccgatagattcagcggctctggctccggcaccgacttcaccctgacaatcggcagactggaacccgaggacctggccgtgtactactgccagcagtacggcaccagcccctacacattcggccagggcaccaagctggaaatcctcgaggacctgaagaacgtgttcccacctgaggtggccgtgttcgagcctagcgaggccgagatcagccacacccagaaagccaccctcgtgtgcctggctaccggcttctaccccgaccatgtggaactgtcttggtgggtcaacggcaaagaggtgcacagcggcgtgtgtaccgacccccagccactgaaagaacagcccgccctgaacgacagccggtactgcctgagcagcagactgagagtgtccgccaccttctggcagaacccccggaaccacttcagatgccaggtgcagttctacggcctgagcgagaacgacgagtggacccaggacagagccaagcccgtgacccagatcgtgtctgccgaagcctggggcagagccgatgatgtgattaagatccactggcaggaaaagaagtccaacaccatcctgggcagccaggaaggcaacaccatgaagaccaacgacacctacatgaagttcagctggctgaccgtgcccgagaagtccctggacaaagaacacagatgcatcgtgcggcacgaaaacaacaagaacggcgtggaccaggaaatcatcttcccacccatcaagaccgatgtgattacaatggaccccaaggacaactgctccaaggacgccaacgataccctgctgctccagctgaccaacaccagcgcctactacatgtacttgttgctgctgctgaagtccgtggtgtacttcgccatcatcacatgctgcctgctgatggctatggtcaagcggaaggacagccggggaagggccaagcgatctggatctggagcaacaaacttctcactactcaaacaagcaggtgacgtggaggagaatcccgggcctactagtatggactggatttggcgcatccttttccttgtcggcgctgctaccggcgcgcattccttcgaactggaacagagcggagccgaagtgaagaaacccggcagcagcgtgcaggtgtcctgcaaagcaagcggcggcaccttctctatgtacggcttcaactgggtgcgccaggctcctggacacggcctggaatggatgggcggcatcatccccatcttcggcacctccaactacgcccagaaattccggggcagagtgaccttcaccgccgaccaggccacaagcaccgcctacatggaactgaccaacctgcggagcgacgacaccgccgtgtattattgcgccagagacttcggccccgactgggaggatggcgacagctacgatggcagcggcagaggcttcttcgacttctggggccagggaacccttgtgaccgtgtcctcaacgcgtatccagaaccctgatcctgccgtgtaccagctgcgggatagcaagagcagcgacaagagcgtgtgtctgttcaccgacttcgacagccagaccaacgtgtcccagagcaaggactccgacgtgtacatcaccgataagtgcgtgctggacatgcggagcatggacttcaagagcaactccgccgtggcctggtccaacaagtccgatttcgcctgcgccaacgccttcaacaacagcattatccccgaggacacattcttcccaagccccgagagcagcgactccaccgaccacgtgaagcccaaagagacagagaacaccaagcagcccagcaagagctgccacaagcccaaggccatcgtgcacaccgagaaagtgaacatgatgagcctgaccgtgctgggcctgcggatgctgttcgccaaaaccgtggccgtgaacttcctgctgaccgccaagctgttcttcctcctcaccgcc

SEQ ID NO: 6073 - DNA, 2136 bp, synthetic construct
  source 1..2136: mol_type = other DNA
atggccttaccagtgaccgccttgctcctgccgctggccttgctgctccacgccgccaggccggacatccagatgacccagagccccagcagcctgtctgccagcgtgggcgacagagtgaccatcacctgtcaggccagccaggacatcaacaactacctgaactggtatcagcagaagcccggcaaggcccccaagctgctgatctacgacgccagcaatctgcagaccggcgtgcccagcagattttccggctctggcagcggcaccgacttcaccttcaccatcgaggacattgccacctactactgccagcagtacaccttcggccctggcaccaaggtggacatcaaactcgaggacctgaagaacgtgttcccacctgaggtggccgtgttcgagcctagcgaggccgagatcagccacacccagaaagccaccctcgtgtgcctggctaccggcttctaccccgaccatgtggaactgtcttggtgggtcaacggcaaagaggtgcacagcggcgtgtgtaccgacccccagccactgaaagaacagcccgccctgaacgacagccggtactgcctgagcagcagactgagagtgtccgccaccttctggcagaacccccggaaccacttcagatgccaggtgcagttctacggcctgagcgagaacgacgagtggacccaggacagagccaagcccgtgacccagatcgtgtctgccgaagcctggggcagagccgatgatgtgattaagatccactggcaggaaaagaagtccaacaccatcctgggcagccaggaaggcaacaccatgaagaccaacgacacctacatgaagttcagctggctgaccgtgcccgagaagtccctggacaaagaacacagatgcatcgtgcggcacgaaaacaacaagaacggcgtggaccaggaaatcatcttcccacccatcaagaccgatgtgattacaatggaccccaaggacaactgctccaaggacgccaacgataccctgctgctccagctgaccaacaccagcgcctactacatgtacttgttgctgctgctgaagtccgtggtgtacttcgccatcatcacatgctgcctgctgatggctatggtcaagcggaaggacagccggggaagggccaagcgatctggatctggagcaacaaacttctcactactcaaacaagcaggtgacgtggaggagaatcccgggcctactagtatggactggatttggcgcatccttttccttgtcggcgctgctaccggcgcgcattccttcgaagaagtgcaactgctggaatctggcggcggactggtgcagcctggcggatctctgagactgagctgtgccgccagcggcttcacctttagctggtacagcatgacctgggtgcgccaggcccctggcaaaggactggaatgggtgtccagcatcgtgccctggggcgatttcacccagtacgccgatagcgtgaagggccggttcaccatcagccgggacaacagcaagaacaccctgtacctgcagatgaacagcctgcgggccgaggacaccgccgtgtactattgtgccaagggacctggctggggcagcttcgatctgtggggcagaggaacccttgtgaccgtgtccagcacgcgtatccagaaccctgatcctgccgtgtaccagctgcgggatagcaagagcagcgacaagagcgtgtgtctgttcaccgacttcgacagccagaccaacgtgtcccagagcaaggactccgacgtgtacatcaccgataagtgcgtgctggacatgcggagcatggacttcaagagcaactccgccgtggcctggtccaacaagtccgatttcgcctgcgccaacgccttcaacaacagcattatccccgaggacacattcttcccaagccccgagagcagcgactccaccgaccacgtgaagcccaaagagacagagaacaccaagcagcccagcaagagctgccacaagcccaaggccatcgtgcacaccgagaaagtgaacatgatgagcctgaccgtgctgggcctgcggatgctgttcgccaaaaccgtggccgtgaacttcctgctgaccgccaagctgttcttcctcctcaccgcc

SEQ ID NO: 6074 - DNA, 2166 bp, synthetic construct
  source 1..2166: mol_type = other DNA
atggccttaccagtgaccgccttgctcctgccgctggccttgctgctccacgccgccaggccggacatccagatgacccagagccccagcagcctgtctgccagcgtgggcgacagagtgaccatcacctgtaccgccagcctgagcgtgtccagcacctacctgcactggtatcagcagaagcccggcagcagccccaagctgtggatctacagcaccagcaacctggcctccggcgtgcccagcagattttctggcagcggctctggcaccagctacaccctgaccatcagctccctccagcccgaggacttcgccacctactactgccaccagtaccacagaagccccctgacctttggcggaggcaccaaggtggaaatcaagagactcgaggacctgaagaacgtgttcccacctgaggtggccgtgttcgagcctagcgaggccgagatcagccacacccagaaagccaccctcgtgtgcctggctaccggcttctaccccgaccatgtggaactgtcttggtgggtcaacggcaaagaggtgcacagcggcgtgtgtaccgacccccagccactgaaagaacagcccgccctgaacgacagccggtactgcctgagcagcagactgagagtgtccgccaccttctggcagaacccccggaaccacttcagatgccaggtgcagttctacggcctgagcgagaacgacgagtggacccaggacagagccaagcccgtgacccagatcgtgtctgccgaagcctggggcagagccgatgatgtgattaagatccactggcaggaaaagaagtccaacaccatcctgggcagccaggaaggcaacaccatgaagaccaacgacacctacatgaagttcagctggctgaccgtgcccgagaagtccctggacaaagaacacagatgcatcgtgcggcacgaaaacaacaagaacggcgtggaccaggaaatcatcttcccacccatcaagaccgatgtgattacaatggaccccaaggacaactgctccaaggacgccaacgataccctgctgctccagctgaccaacaccagcgcctactacatgtacttgttgctgctgctgaagtccgtggtgtacttcgccatcatcacatgctgcctgctgatggctatggtcaagcggaaggacagccggggaagggccaagcgatctggatctggagcaacaaacttctcactactcaaacaagcaggtgacgtggaggagaatcccgggcctactagtatggactggatttggcgcatccttttccttgtcggcgctgctaccggcgcgcattccttcgaagaagtgcaactggtggaatctggcggcggactggtgcagcctggcggatctctgagactgagctgtgccgccagcggcttcagcctgaccaaatacggcgtgcactgggtgcgccaggcccctggaaaaggactggaatgggtgggagtgaagtgggctggcggctccaccgactacaacagcgccctgatgagccggttcaccatcagcaaggacaacgccaagaacagcctgtacctccagatgaactccctgcgggccgaggacaccgccgtgtactactgtgccagagatcaccgggacgctatggactactggggccagggaacactcgtgaccgtgtcctctacgcgtatccagaaccctgatcctgccgtgtaccagctgcgggatagcaagagcagcgacaagagcgtgtgtctgttcaccgacttcgacagccagaccaacgtgtcccagagcaaggactccgacgtgtacatcaccgataagtgcgtgctggacatgcggagcatggacttcaagagcaactccgccgtggcctggtccaacaagtccgatttcgcctgcgccaacgccttcaacaacagcattatccccgaggacacattcttcccaagccccgagagcagcgactccaccgaccacgtgaagcccaaagagacagagaacaccaagcagcccagcaagagctgccacaagcccaaggccatcgtgcacaccgagaaagtgaacatgatgagcctgaccgtgctgggcctgcggatgctgttcgccaaaaccgtggccgtgaacttcctgctgaccgccaagctgttcttcctcctcaccgcc

SEQ ID NO: 6075 - DNA, 2178 bp, synthetic construct
  source 1..2178: mol_type = other DNA
atggccttaccagtgaccgccttgctcctgccgctggccttgctgctccacgccgccaggccggacatccagatgacccagagccccagcagcctgtctgccagcgtgggcgacagagtgaccatcacatgcaaggccagccaggacgtgggaacagccgtggcctggtatcagcagaagcctggcaaggcccccaagctgctgatctacagcgccagctacagatccaccggcgtgcccagcagattttccggctctggcagcggcaccgacttcaccctgaccatctctagcctccagcccgaggacttcgccacctactactgccagcaccactactccgccccctggacatttggcggaggcaccaaggtggaaatcaagctcgaggacctgaagaacgtgttcccacctgaggtggccgtgttcgagcctagcgaggccgagatcagccacacccagaaagccaccctcgtgtgcctggctaccggcttctaccccgaccatgtggaactgtcttggtgggtcaacggcaaagaggtgcacagcggcgtgtgtaccgacccccagccactgaaagaacagcccgccctgaacgacagccggtactgcctgagcagcagactgagagtgtccgccaccttctggcagaacccccggaaccacttcagatgccaggtgcagttctacggcctgagcgagaacgacgagtggacccaggacagagccaagcccgtgacccagatcgtgtctgccgaagcctggggcagagccgatgatgtgattaagatccactggcaggaaaagaagtccaacaccatcctgggcagccaggaaggcaacaccatgaagaccaacgacacctacatgaagttcagctggctgaccgtgcccgagaagtccctggacaaagaacacagatgcatcgtgcggcacgaaaacaacaagaacggcgtggaccaggaaatcatcttcccacccatcaagaccgatgtgattacaatggaccccaaggacaactgctccaaggacgccaacgataccctgctgctccagctgaccaacaccagcgcctactacatgtacttgttgctgctgctgaagtccgtggtgtacttcgccatcatcacatgctgcctgctgatggctatggtcaagcggaaggacagccggggaagggccaagcgatctggatctggagcaacaaacttctcactactcaaacaagcaggtgacgtggaggagaatcccgggcctactagtatggactggatttggcgcatccttttccttgtcggcgctgctaccggcgcgcattccttcgaagaagtgcaactggtggaatcaggcggcggactggtgcagcctggcggatctctgagactgagctgtgccgccagcggcttcaccttcagcagaaacggcatgagctgggtgcgccaggcccctggaaaaggactggaatgggtggcaaccgtgtccagcggcggcagctacatctactacgccgacagcgtgaagggccggttcaccatctccagagacaacgccaagaacagcctgtacctccagatgaactccctgcgggccgaggacaccgccgtgtactattgtgccagacagggcaccaccgccctggctaccagattcttcgatgtgtggggccagggcaccctcgtgaccgtgtcatctacgcgtatccagaaccctgatcctgccgtgtaccagctgcgggatagcaagagcagcgacaagagcgtgtgtctgttcaccgacttcgacagccagaccaacgtgtcccagagcaaggactccgacgtgtacatcaccgataagtgcgtgctggacatgcggagcatggacttcaagagcaactccgccgtggcctggtccaacaagtccgatttcgcctgcgccaacgccttcaacaacagcattatccccgaggacacattcttcccaagccccgagagcagcgactccaccgaccacgtgaagcccaaagagacagagaacaccaagcagcccagcaagagctgccacaagcccaaggccatcgtgcacaccgagaaagtgaacatgatgagcctgaccgtgctgggcctgcggatgctgttcgccaaaaccgtggccgtgaacttcctgctgaccgccaagctgttcttcctcctcaccgcc

SEQ ID NO: 6076 - DNA, 2166 bp, synthetic construct
  source 1..2166: mol_type = other DNA
atggccttaccagtgaccgccttgctcctgccgctggccttgctgctccacgccgccaggccggacatccagatgacccagagcccccctagcctgtctgcctctgtgggcggcaaagtgaccatcacatgcaaggccagccaggacatcgaccgctacatggcctggtatcaggacaagcccggcaagggacccaagctgctgatccacgataccagcaccctccagcccggcatccccagcagattttctggcagcggctccggcagagactacagcttcagcatcagcaacctggaacccgaggacattgccacctactactgcctccagtacgacaacctgtggaccttcggcggaggcaccaagctggaaatcaagagactcgaggacctgaagaacgtgttcccacctgaggtggccgtgttcgagcctagcgaggccgagatcagccacacccagaaagccaccctcgtgtgcctggctaccggcttctaccccgaccatgtggaactgtcttggtgggtcaacggcaaagaggtgcacagcggcgtgtgtaccgacccccagccactgaaagaacagcccgccctgaacgacagccggtactgcctgagcagcagactgagagtgtccgccaccttctggcagaacccccggaaccacttcagatgccaggtgcagttctacggcctgagcgagaacgacgagtggacccaggacagagccaagcccgtgacccagatcgtgtctgccgaagcctggggcagagccgatgatgtgattaagatccactggcaggaaaagaagtccaacaccatcctgggcagccaggaaggcaacaccatgaagaccaacgacacctacatgaagttcagctggctgaccgtgcccgagaagtccctggacaaagaacacagatgcatcgtgcggcacgaaaacaacaagaacggcgtggaccaggaaatcatcttcccacccatcaagaccgatgtgattacaatggaccccaaggacaactgctccaaggacgccaacgataccctgctgctccagctgaccaacaccagcgcctactacatgtacttgttgctgctgctgaagtccgtggtgtacttcgccatcatcacatgctgcctgctgatggctatggtcaagcggaaggacagccggggaagggccaagcgatctggatctggagcaacaaacttctcactactcaaacaagcaggtgacgtggaggagaatcccgggcctactagtatggactggatttggcgcatccttttccttgtcggcgctgctaccggcgcgcattccttcgaacaggtgcaactggtgcagagcggagccgagcttgtgaagcctggcgcttccgtgaagatgagctgcaaagccagcggctacatcttcaccaactacaacatccactgggtcaagaagtccccaggccagggcctggaatggatcggagccatctaccccggaaacggcgacgccccttacagccagaagttccaggacagagccaccctgaccgccgacaccagcagcagcaccacctacatggaactgagcagcctgaccagcgaggacagcgccgtgtactattgcgtgcgggccaactgggatgtggccttcgcctattggggccagggcacactggtgtccgtgtcctctacgcgtatccagaaccctgatcctgccgtgtaccagctgcgggatagcaagagcagcgacaagagcgtgtgtctgttcaccgacttcgacagccagaccaacgtgtcccagagcaaggactccgacgtgtacatcaccgataagtgcgtgctggacatgcggagcatggacttcaagagcaactccgccgtggcctggtccaacaagtccgatttcgcctgcgccaacgccttcaacaacagcattatccccgaggacacattcttcccaagccccgagagcagcgactccaccgaccacgtgaagcccaaagagacagagaacaccaagcagcccagcaagagctgccacaagcccaaggccatcgtgcacaccgagaaagtgaacatgatgagcctgaccgtgctgggcctgcggatgctgttcgccaaaaccgtggccgtgaacttcctgctgaccgccaagctgttcttcctcctcaccgcc

SEQ ID NO: 6077 - DNA, 2169 bp, synthetic construct
  source 1..2169: mol_type = other DNA
atggccttaccagtgaccgccttgctcctgccgctggccttgctgctccacgccgccaggccggacatccagatgacccagagccctgccagcctgtctgcctctgtgggcgagacagtgaccatcacctgtcgggtgtccggcaacatccacaactacctggcctggtatcagcagaagcagggcaagagcccccaactgctggtgtacaacgccaagaccctggccgatggcgtgcccagcagattttctggctctggcagcggcacccagtacagcctgaagatcaacagcctccagcccgaggacttcggcagctactactgccagcacttctggtccaacccctacaccttcggcggaggcaccaagctggaaatcaagctcgaggacctgaagaacgtgttcccacctgaggtggccgtgttcgagcctagcgaggccgagatcagccacacccagaaagccaccctcgtgtgcctggctaccggcttctaccccgaccatgtggaactgtcttggtgggtcaacggcaaagaggtgcacagcggcgtgtgtaccgacccccagccactgaaagaacagcccgccctgaacgacagccggtactgcctgagcagcagactgagagtgtccgccaccttctggcagaacccccggaaccacttcagatgccaggtgcagttctacggcctgagcgagaacgacgagtggacccaggacagagccaagcccgtgacccagatcgtgtctgccgaagcctggggcagagccgatgatgtgattaagatccactggcaggaaaagaagtccaacaccatcctgggcagccaggaaggcaacaccatgaagaccaacgacacctacatgaagttcagctggctgaccgtgcccgagaagtccctggacaaagaacacagatgcatcgtgcggcacgaaaacaacaagaacggcgtggaccaggaaatcatcttcccacccatcaagaccgatgtgattacaatggaccccaaggacaactgctccaaggacgccaacgataccctgctgctccagctgaccaacaccagcgcctactacatgtacttgttgctgctgctgaagtccgtggtgtacttcgccatcatcacatgctgcctgctgatggctatggtcaagcggaaggacagccggggaagggccaagcgatctggatctggagcaacaaacttctcactactcaaacaagcaggtgacgtggaggagaatcccgggcctactagtatggactggatttggcgcatccttttccttgtcggcgctgctaccggcgcgcattccttcgaacaggtgcaactccagcagtctggcgcttccgtgaaggtgtcctgcaaggccagcgaactcgtgcggcctggcacaggctacgccttcaccaattacctgatcgagtgggtcaagcagaggcccggacagggcctggaatggatcggagtgattaacccaggcagcggcggcaccaactacaacgagaagttcaagggcaaggccaccctgaccgccgacaagagcagcagcacagcctacatgcaactgagcagcctgaccagcgacgacagcgccgtgtacttctgcgcccggtacagaagctacgactggtacttcgacgtgtggggagccggcaccaccgtgacagtgtcatctacgcgtatccagaaccctgatcctgccgtgtaccagctgcgggatagcaagagcagcgacaagagcgtgtgtctgttcaccgacttcgacagccagaccaacgtgtcccagagcaaggactccgacgtgtacatcaccgataagtgcgtgctggacatgcggagcatggacttcaagagcaactccgccgtggcctggtccaacaagtccgatttcgcctgcgccaacgccttcaacaacagcattatccccgaggacacattcttcccaagccccgagagcagcgactccaccgaccacgtgaagcccaaagagacagagaacaccaagcagcccagcaagagctgccacaagcccaaggccatcgtgcacaccgagaaagtgaacatgatgagcctgaccgtgctgggcctgcggatgctgttcgccaaaaccgtggccgtgaacttcctgctgaccgccaagctgttcttcctcctcaccgcc

SEQ ID NO: 6078 - DNA, 2166 bp, synthetic construct
  source 1..2166: mol_type = other DNA
atggccttaccagtgaccgccttgctcctgccgctggccttgctgctccacgccgccaggccggacatccagatgacccagagcttcagcagcctgagcgccagcgtgggcgacagagtgaccatcacctgtagagccagccaggacatcagcaactacctgaactggtatcagcagaagcccggcaaggcccccaagctgctgatctactacaccagcagactgcacagcggcgtgcccagcagattttctggcagcggctccggcaccgactacaccctgacaatcagctccctgcagcccgaggacttcgctacctacttctgtcagcaaggcaacaccctgccctggacctttggcggaggcaccaagctggaaatcaagagactcgaggacctgaagaacgtgttcccacctgaggtggccgtgttcgagcctagcgaggccgagatcagccacacccagaaagccaccctcgtgtgcctggctaccggcttctaccccgaccatgtggaactgtcttggtgggtcaacggcaaagaggtgcacagcggcgtgtgtaccgacccccagccactgaaagaacagcccgccctgaacgacagccggtactgcctgagcagcagactgagagtgtccgccaccttctggcagaacccccggaaccacttcagatgccaggtgcagttctacggcctgagcgagaacgacgagtggacccaggacagagccaagcccgtgacccagatcgtgtctgccgaagcctggggcagagccgatgatgtgattaagatccactggcaggaaaagaagtccaacaccatcctgggcagccaggaaggcaacaccatgaagaccaacgacacctacatgaagttcagctggctgaccgtgcccgagaagtccctggacaaagaacacagatgcatcgtgcggcacgaaaacaacaagaacggcgtggaccaggaaatcatcttcccacccatcaagaccgatgtgattacaatggaccccaaggacaactgctccaaggacgccaacgataccctgctgctccagctgaccaacaccagcgcctactacatgtacttgttgctgctgctgaagtccgtggtgtacttcgccatcatcacatgctgcctgctgatggctatggtcaagcggaaggacagccggggaagggccaagcgatctggatctggagcaacaaacttctcactactcaaacaagcaggtgacgtggaggagaatcccgggcctactagtatggactggatttggcgcatccttttccttgtcggcgctgctaccggcgcgcattccttcgaagaagtgcaactggtgcagtccggcggagggctggtgcagagcggaggatctctgagactgagctgcagagccagcggctacaccttcacccggtactggatgctgtgggtgcgccagaggccaggcaagggactggaatgggtggccgagatcaacccccggaacgaccggaccaactacaacgagaagttcaagacccggttcaccatcagcgtggacagaagcaagaacaccctgtacctgcagatggacagcctgcgggccgaggataccgccgtgtacttttgtgctctgggaggcggctacgctatggactactggggccagggaacccttgtgaccgtgtcctctacgcgtatccagaaccctgatcctgccgtgtaccagctgcgggatagcaagagcagcgacaagagcgtgtgtctgttcaccgacttcgacagccagaccaacgtgtcccagagcaaggactccgacgtgtacatcaccgataagtgcgtgctggacatgcggagcatggacttcaagagcaactccgccgtggcctggtccaacaagtccgatttcgcctgcgccaacgccttcaacaacagcattatccccgaggacacattcttcccaagccccgagagcagcgactccaccgaccacgtgaagcccaaagagacagagaacaccaagcagcccagcaagagctgccacaagcccaaggccatcgtgcacaccgagaaagtgaacatgatgagcctgaccgtgctgggcctgcggatgctgttcgccaaaaccgtggccgtgaacttcctgctgaccgccaagctgttcttcctcctcaccgcc

SEQ ID NO: 6079 - DNA, 2169 bp, synthetic construct
  source 1..2169: mol_type = other DNA
atggccttaccagtgaccgccttgctcctgccgctggccttgctgctccacgccgccaggccggacatccagatgacacagtctccggcgtcactgtccgcctccgtgggggagactgtgactattatttgtagggcatcagttaacatctactcttatttggcctggtaccagcagaagcaaggcaagagtcctcagctgctggtgtataatgcgaagatcctggcagagggcgtgccgagccggttctccggcagcggctcaggtacccaattttccctcaagatcaattcactgcagccagaggactttggcagttactattgtcaacaccactacggcacattcactttcgggtccggtacaaaattggagattaagcgactcgaggacctgaagaacgtgttcccacctgaggtggccgtgttcgagcctagcgaggccgagatcagccacacccagaaagccaccctcgtgtgcctggctaccggcttctaccccgaccatgtggaactgtcttggtgggtcaacggcaaagaggtgcacagcggcgtgtgtaccgacccccagccactgaaagaacagcccgccctgaacgacagccggtactgcctgagcagcagactgagagtgtccgccaccttctggcagaacccccggaaccacttcagatgccaggtgcagttctacggcctgagcgagaacgacgagtggacccaggacagagccaagcccgtgacccagatcgtgtctgccgaagcctggggcagagccgatgatgtgattaagatccactggcaggaaaagaagtccaacaccatcctgggcagccaggaaggcaacaccatgaagaccaacgacacctacatgaagttcagctggctgaccgtgcccgagaagtccctggacaaagaacacagatgcatcgtgcggcacgaaaacaacaagaacggcgtggaccaggaaatcatcttcccacccatcaagaccgatgtgattacaatggaccccaaggacaactgctccaaggacgccaacgataccctgctgctccagctgaccaacaccagcgcctactacatgtacttgttgctgctgctgaagtccgtggtgtacttcgccatcatcacatgctgcctgctgatggctatggtcaagcggaaggacagccggggaagggccaagcgatctggatctggagcaacaaacttctcactactcaaacaagcaggtgacgtggaggagaatcccgggcctactagtatggactggatttggcgcatccttttccttgtcggcgctgctaccggcgcgcattccttcgaacaggtacagttgaaagaaagcgggcctggactggtagcgccttcccaatctctctccatcacgtgcaccatctctggcttctccctgacttcctatggagttcactgggtgaggcagccccccggcaagggactggaatggctggtcgtcatctggtccgacgggtccacaacctacaactccgctctgaaaagtcggctctctatttctaaagataatagcaagagccaggtgtttctgaaaatgaactctctgcagaccgatgatacggccatttactactgcgcttcacactatggctcaaccttggcattcgcttcctggggccacggaacactggtgaccgtttccgcagccacgcgtatccagaaccctgatcctgccgtgtaccagctgcgggatagcaagagcagcgacaagagcgtgtgtctgttcaccgacttcgacagccagaccaacgtgtcccagagcaaggactccgacgtgtacatcaccgataagtgcgtgctggacatgcggagcatggacttcaagagcaactccgccgtggcctggtccaacaagtccgatttcgcctgcgccaacgccttcaacaacagcattatccccgaggacacattcttcccaagccccgagagcagcgactccaccgaccacgtgaagcccaaagagacagagaacaccaagcagcccagcaagagctgccacaagcccaaggccatcgtgcacaccgagaaagtgaacatgatgagcctgaccgtgctgggcctgcggatgctgttcgccaaaaccgtggccgtgaacttcctgctgaccgccaagctgttcttcctcctcaccgcc

SEQ ID NO: 6080 - DNA, 2193 bp, synthetic construct
  source 1..2193: mol_type = other DNA
atggccttaccagtgaccgccttgctcctgccgctggccttgctgctccacgccgccaggccggacattgtgatgacccagtctcacaaattcatgtccacatcagtaggagacagggtcagcgtcacctgcaaggccagtcagaatgtgggtaataatgtagcctggtatcaacagaaaccagggcaatctcctaaagtactgatttactcggcatcctaccggtacagtggagtccctgatcgcttcacaggcagtggatctgggacagatttcactctcaccatcagtaatgtgcagtctgaagacttggcagagtatttctgtcagcaatataacacctatccattcacgttcggctcggggacaaagttggaaataaaactcgaggacctgaagaacgtgttcccacctgaggtggccgtgttcgagcctagcgaggccgagatcagccacacccagaaagccaccctcgtgtgcctggctaccggcttctaccccgaccatgtggaactgtcttggtgggtcaacggcaaagaggtgcacagcggcgtgtgtaccgacccccagccactgaaagaacagcccgccctgaacgacagccggtactgcctgagcagcagactgagagtgtccgccaccttctggcagaacccccggaaccacttcagatgccaggtgcagttctacggcctgagcgagaacgacgagtggacccaggacagagccaagcccgtgacccagatcgtgtctgccgaagcctggggcagagccgatgatgtgattaagatccactggcaggaaaagaagtccaacaccatcctgggcagccaggaaggcaacaccatgaagaccaacgacacctacatgaagttcagctggctgaccgtgcccgagaagtccctggacaaagaacacagatgcatcgtgcggcacgaaaacaacaagaacggcgtggaccaggaaatcatcttcccacccatcaagaccgatgtgattacaatggaccccaaggacaactgctccaaggacgccaacgataccctgctgctccagctgaccaacaccagcgcctactacatgtacttgttgctgctgctgaagtccgtggtgtacttcgccatcatcacatgctgcctgctgatggctatggtcaagcggaaggacagccggggaagggccaagcgatctggatctggagcaacaaacttctcactactcaaacaagcaggtgacgtggaggagaatcccgggcctactagtatggactggatttggcgcatccttttccttgtcggcgctgctaccggcgcgcattccttcgaagaggtacagctggaggaaagcggtggaggactggtgcaacctggagggtctatgaagctctcttgcgtagcttctgggttcacgttctccaattactggatgaactgggtgcggcagtcccccgagaaaggcctggaatgggtagcagaaattcggttcaagtcccataactatgctacacactttgccgagtctgtcaaaggccggttcactattagtcgagacgacagcaagtcttcagtctacctgcagatgaataacttgcgggcagaggacacaggtatctactactgcaccaggagaatcggcaactccgactatgactggtggtactttgacgtctggggagcaggcaccagcgtgacggtgagttcagcctcaacgcgtatccagaaccctgatcctgccgtgtaccagctgcgggatagcaagagcagcgacaagagcgtgtgtctgttcaccgacttcgacagccagaccaacgtgtcccagagcaaggactccgacgtgtacatcaccgataagtgcgtgctggacatgcggagcatggacttcaagagcaactccgccgtggcctggtccaacaagtccgatttcgcctgcgccaacgccttcaacaacagcattatccccgaggacacattcttcccaagccccgagagcagcgactccaccgaccacgtgaagcccaaagagacagagaacaccaagcagcccagcaagagctgccacaagcccaaggccatcgtgcacaccgagaaagtgaacatgatgagcctgaccgtgctgggcctgcggatgctgttcgccaaaaccgtggccgtgaacttcctgctgaccgccaagctgttcttcctcctcaccgcc

SEQ ID NO: 6081 - DNA, 2172 bp, synthetic construct
  source 1..2172: mol_type = other DNA
atggccttaccagtgaccgccttgctcctgccgctggccttgctgctccacgccgccaggccggaccagatcgtgctgacccagtcccccgctattatgtccgcatcaccgggcgaaaaagtgacgatctcctgtagcgcttcatctagcgtctcctacatgtattggtatcaacagaaacctgggtctagcccaaagccgtggatctacagaaccagtaaccttgccagtggggtgccagcccgcttcagcggtagtggcagtggaacttcctatagcctcacaataagcaacatggaggctgaagatgccgctgcctattactgccagcagtaccacagttacccaaccacgttcggcgggggaactaagctcgaagtaaaactcgaggacctgaagaacgtgttcccacctgaggtggccgtgttcgagcctagcgaggccgagatcagccacacccagaaagccaccctcgtgtgcctggctaccggcttctaccccgaccatgtggaactgtcttggtgggtcaacggcaaagaggtgcacagcggcgtgtgtaccgacccccagccactgaaagaacagcccgccctgaacgacagccggtactgcctgagcagcagactgagagtgtccgccaccttctggcagaacccccggaaccacttcagatgccaggtgcagttctacggcctgagcgagaacgacgagtggacccaggacagagccaagcccgtgacccagatcgtgtctgccgaagcctggggcagagccgatgatgtgattaagatccactggcaggaaaagaagtccaacaccatcctgggcagccaggaaggcaacaccatgaagaccaacgacacctacatgaagttcagctggctgaccgtgcccgagaagtccctggacaaagaacacagatgcatcgtgcggcacgaaaacaacaagaacggcgtggaccaggaaatcatcttcccacccatcaagaccgatgtgattacaatggaccccaaggacaactgctccaaggacgccaacgataccctgctgctccagctgaccaacaccagcgcctactacatgtacttgttgctgctgctgaagtccgtggtgtacttcgccatcatcacatgctgcctgctgatggctatggtcaagcggaaggacagccggggaagggccaagcgatctggatctggagcaacaaacttctcactactcaaacaagcaggtgacgtggaggagaatcccgggcctactagtatggactggatttggcgcatccttttccttgtcggcgctgctaccggcgcgcattccttcgaagaggtgcagctggtggaatctgggggcggcctggtccaacctaagggatcactcaagctctcttgtgcggccagcggattctctttcaatacctatgctatgaattgggtgagacaggcgcccggaaagggcctcgaatggatagcccatatccggtcaaaatcaaacaatttcgcaacctactatgcggactccgtgaaggaccgattttccatctcccgagatgcctccgagaatattctgttcctgcagatgaataacctcaagacagaggacaccgccatgtactactgtgtgcgccagggcggtgactttcccatggattactgggggcaggggaccagcgtgaccgtgagctctacgcgtatccagaaccctgatcctgccgtgtaccagctgcgggatagcaagagcagcgacaagagcgtgtgtctgttcaccgacttcgacagccagaccaacgtgtcccagagcaaggactccgacgtgtacatcaccgataagtgcgtgctggacatgcggagcatggacttcaagagcaactccgccgtggcctggtccaacaagtccgatttcgcctgcgccaacgccttcaacaacagcattatccccgaggacacattcttcccaagccccgagagcagcgactccaccgaccacgtgaagcccaaagagacagagaacaccaagcagcccagcaagagctgccacaagcccaaggccatcgtgcacaccgagaaagtgaacatgatgagcctgaccgtgctgggcctgcggatgctgttcgccaaaaccgtggccgtgaacttcctgctgaccgccaagctgttcttcctcctcaccgcc

SEQ ID NO: 6082 - DNA, 2169 bp, synthetic construct
  source 1..2169: mol_type = other DNA
atggccttaccagtgaccgccttgctcctgccgctggccttgctgctccacgccgccaggccggacgacatccagatgacccagagcagcagcagcttcagcgtgagcctgggcgacagagtgaccatcacctgcatggccagcgaggacatctacatcagactggcctggtaccagcagaagcccggcaacgcccccagactgctgatcagcgccgccaccagcctggagaccggcgtgcccagcagattcagcggcagcggcagcggcaaggactacaccctgagcatcaccagcctgcagaccgaggacgtgggcacctactactgccagcagtactggagcagcccctggaccttcggcggcggcaccaagctggagatcaacctcgaggacctgaagaacgtgttcccacctgaggtggccgtgttcgagcctagcgaggccgagatcagccacacccagaaagccaccctcgtgtgcctggctaccggcttctaccccgaccatgtggaactgtcttggtgggtcaacggcaaagaggtgcacagcggcgtgtgtaccgacccccagccactgaaagaacagcccgccctgaacgacagccggtactgcctgagcagcagactgagagtgtccgccaccttctggcagaacccccggaaccacttcagatgccaggtgcagttctacggcctgagcgagaacgacgagtggacccaggacagagccaagcccgtgacccagatcgtgtctgccgaagcctggggcagagccgatgatgtgattaagatccactggcaggaaaagaagtccaacaccatcctgggcagccaggaaggcaacaccatgaagaccaacgacacctacatgaagttcagctggctgaccgtgcccgagaagtccctggacaaagaacacagatgcatcgtgcggcacgaaaacaacaagaacggcgtggaccaggaaatcatcttcccacccatcaagaccgatgtgattacaatggaccccaaggacaactgctccaaggacgccaacgataccctgctgctccagctgaccaacaccagcgcctactacatgtacttgttgctgctgctgaagtccgtggtgtacttcgccatcatcacatgctgcctgctgatggctatggtcaagcggaaggacagccggggaagggccaagcgatctggatctggagcaacaaacttctcactactcaaacaagcaggtgacgtggaggagaatcccgggcctactagtatggactggatttggcgcatccttttccttgtcggcgctgctaccggcgcgcattccttcgaagacgtgcagctgcaggagagcggccccggcctggtgaagcccagccagagcctgagcctgacctgcaccgtgaccggctacagcatcaccagcgactacacctggaactggatcagacagttccccggcaacaagctggagtggatgggctacatcacctacagcggcagcaccagctacaaccccagcctgaagagcagaaacagcatcaccagagacaccagcaagaaccagttcttcctgcagctgaacagcgtgaccaccgaggacaccgccacctactactgcgccagactgggcagaagatacacaatggactactggggccagggcaccagcgtgaccgtgagcagcacgcgtatccagaaccctgatcctgccgtgtaccagctgcgggatagcaagagcagcgacaagagcgtgtgtctgttcaccgacttcgacagccagaccaacgtgtcccagagcaaggactccgacgtgtacatcaccgataagtgcgtgctggacatgcggagcatggacttcaagagcaactccgccgtggcctggtccaacaagtccgatttcgcctgcgccaacgccttcaacaacagcattatccccgaggacacattcttcccaagccccgagagcagcgactccaccgaccacgtgaagcccaaagagacagagaacaccaagcagcccagcaagagctgccacaagcccaaggccatcgtgcacaccgagaaagtgaacatgatgagcctgaccgtgctgggcctgcggatgctgttcgccaaaaccgtggccgtgaacttcctgctgaccgccaagctgttcttcctcctcaccgcc

SEQ ID NO: 6083 - DNA, 2178 bp, synthetic construct
  source 1..2178: mol_type = other DNA
atggccttaccagtgaccgccttgctcctgccgctggccttgctgctccacgccgccaggccggacgacatccagatgacccagagccccagcagcctgtctgccagcgtgggcgacagagtgaccatcacctgtagagccagccagagcatcagcagctacctgaactggtatcagcagaagcccggcaaggcccccaaactgctgatctacgacgccagcaacctggaaaccggcgtgcccagcagattttccggcagcggctctggcaccgacttcaccttcaccatcagctccctccagcccgaggacattgccacctactactgccagcagtacgacaacctgcccctgacctttggcggaggcaccaaggtggacatcaagagactcgaggacctgaagaacgtgttcccacctgaggtggccgtgttcgagcctagcgaggccgagatcagccacacccagaaagccaccctcgtgtgcctggctaccggcttctaccccgaccatgtggaactgtcttggtgggtcaacggcaaagaggtgcacagcggcgtgtgtaccgacccccagccactgaaagaacagcccgccctgaacgacagccggtactgcctgagcagcagactgagagtgtccgccaccttctggcagaacccccggaaccacttcagatgccaggtgcagttctacggcctgagcgagaacgacgagtggacccaggacagagccaagcccgtgacccagatcgtgtctgccgaagcctggggcagagccgatgatgtgattaagatccactggcaggaaaagaagtccaacaccatcctgggcagccaggaaggcaacaccatgaagaccaacgacacctacatgaagttcagctggctgaccgtgcccgagaagtccctggacaaagaacacagatgcatcgtgcggcacgaaaacaacaagaacggcgtggaccaggaaatcatcttcccacccatcaagaccgatgtgattacaatggaccccaaggacaactgctccaaggacgccaacgataccctgctgctccagctgaccaacaccagcgcctactacatgtacttgttgctgctgctgaagtccgtggtgtacttcgccatcatcacatgctgcctgctgatggctatggtcaagcggaaggacagccggggaagggccaagcgatctggatctggagcaacaaacttctcactactcaaacaagcaggtgacgtggaggagaatcccgggcctactagtatggactggatttggcgcatccttttccttgtcggcgctgctaccggcgcgcattccttcgaacaggtgcaactggtggaatctggcggcggagtggtgcagcctggcagaagcctgagactgagctgtgccgccagcggcttcacctttagcagctacgccatgcactgggtgcgccaggcccctggaaaaggcctggaatgggtggccgtgatctcctacgacggctccaacaagtattacgccgacagcgtgaagggccggttcaccatctccagagacaacagcaagaacaccctgtacctccagatgaacagcctgcgggccgaggacaccgccgtgtactattgtgccagggctcacaacagcagctcttggagcttcgactactggggccagggcaccctcgtgaccgtgtcatctacgcgtatccagaaccctgatcctgccgtgtaccagctgcgggatagcaagagcagcgacaagagcgtgtgtctgttcaccgacttcgacagccagaccaacgtgtcccagagcaaggactccgacgtgtacatcaccgataagtgcgtgctggacatgcggagcatggacttcaagagcaactccgccgtggcctggtccaacaagtccgatttcgcctgcgccaacgccttcaacaacagcattatccccgaggacacattcttcccaagccccgagagcagcgactccaccgaccacgtgaagcccaaagagacagagaacaccaagcagcccagcaagagctgccacaagcccaaggccatcgtgcacaccgagaaagtgaacatgatgagcctgaccgtgctgggcctgcggatgctgttcgccaaaaccgtggccgtgaacttcctgctgaccgccaagctgttcttcctcctcaccgcc

SEQ ID NO: 6084 - DNA, 2205 bp, synthetic construct
  source 1..2205: mol_type = other DNA
atggccttaccagtgaccgccttgctcctgccgctggccttgctgctccacgccgccaggccggacgacgtcgtgatgacccagagccctctgagcctgcctgtgtccctgggcgatcaggccagcatctcctgcagatccagccagagactggtgcacagcaacggcaacacctacctgcactggtatctgcagaagcccggccagagccccaagctgctgatctaccgggtgtccaacagattccccggcgtgcccgatagattcagcggctctggcagcggcaccgacttcaccctgaagatcagccgggtggaagccgaggacctgggcatctatttctgcagccagagcacccacgtgccctacacctttggcggaggcaccaagctggaaatcaagcggctcgaggacctgaagaacgtgttcccacctgaggtggccgtgttcgagcctagcgaggccgagatcagccacacccagaaagccaccctcgtgtgcctggctaccggcttctaccccgaccatgtggaactgtcttggtgggtcaacggcaaagaggtgcacagcggcgtgtgtaccgacccccagccactgaaagaacagcccgccctgaacgacagccggtactgcctgagcagcagactgagagtgtccgccaccttctggcagaacccccggaaccacttcagatgccaggtgcagttctacggcctgagcgagaacgacgagtggacccaggacagagccaagcccgtgacccagatcgtgtctgccgaagcctggggcagagccgatgatgtgattaagatccactggcaggaaaagaagtccaacaccatcctgggcagccaggaaggcaacaccatgaagaccaacgacacctacatgaagttcagctggctgaccgtgcccgagaagtccctggacaaagaacacagatgcatcgtgcggcacgaaaacaacaagaacggcgtggaccaggaaatcatcttcccacccatcaagaccgatgtgattacaatggaccccaaggacaactgctccaaggacgccaacgataccctgctgctccagctgaccaacaccagcgcctactacatgtacttgttgctgctgctgaagtccgtggtgtacttcgccatcatcacatgctgcctgctgatggctatggtcaagcggaaggacagccggggaagggccaagcgatctggatctggagcaacaaacttctcactactcaaacaagcaggtgacgtggaggagaatcccgggcctactagtatggactggatttggcgcatccttttccttgtcggcgctgctaccggcgcgcattccttcgaagaagtgcggctgcagcagtctggccccgacctgattaagcctggggccagcgtgaagatgagctgcaaggccagcggctacaccttcaccggctacgtgatgcactgggtcaagcagaggccaggccagggcctggaatggatcggcttcatcaacccctacaacgacgacatccagagcaacgagcggttccggggcaaggccaccctgaccagcgataagagcagcaccaccgcctacatggaactgagcagcctgacctccgaggacagcgccgtgtactactgtgctaggggagccggctacaacttcgacggggcctacagattcttcgacttttggggccagggcaccacactgaccgtgtcctctacgcgtatccagaaccctgatcctgccgtgtaccagctgcgggatagcaagagcagcgacaagagcgtgtgtctgttcaccgacttcgacagccagaccaacgtgtcccagagcaaggactccgacgtgtacatcaccgataagtgcgtgctggacatgcggagcatggacttcaagagcaactccgccgtggcctggtccaacaagtccgatttcgcctgcgccaacgccttcaacaacagcattatccccgaggacacattcttcccaagccccgagagcagcgactccaccgaccacgtgaagcccaaagagacagagaacaccaagcagcccagcaagagctgccacaagcccaaggccatcgtgcacaccgagaaagtgaacatgatgagcctgaccgtgctgggcctgcggatgctgttcgccaaaaccgtggccgtgaacttcctgctgaccgccaagctgttcttcctcctcaccgcc

SEQ ID NO: 6085 - DNA, 2178 bp, synthetic construct
  source 1..2178: mol_type = other DNA
atggccttaccagtgaccgccttgctcctgccgctggccttgctgctccacgccgccaggccggacagctacgagctgacccagcctcctagcgtgtccgtgtctcctggacagaccgccaccatctcttgcagcggcgatcaactgggcgggaagtacggccactggtatcagaagaagcccggccagagccccgtgctggtgctgtaccaggacagaaaacggcctgccggcatccccgagagattcagcggaagcagcagcggcaacaccatcaccctgaccatcagcggcacccaggccgtggatgaggccgactactactgccaggcttgggacaccaatctgggcggcgtgttcggcggaggcaccaaagtgacagtgctgggacagctcgaggacctgaagaacgtgttcccacctgaggtggccgtgttcgagcctagcgaggccgagatcagccacacccagaaagccaccctcgtgtgcctggctaccggcttctaccccgaccatgtggaactgtcttggtgggtcaacggcaaagaggtgcacagcggcgtgtgtaccgacccccagccactgaaagaacagcccgccctgaacgacagccggtactgcctgagcagcagactgagagtgtccgccaccttctggcagaacccccggaaccacttcagatgccaggtgcagttctacggcctgagcgagaacgacgagtggacccaggacagagccaagcccgtgacccagatcgtgtctgccgaagcctggggcagagccgatgatgtgattaagatccactggcaggaaaagaagtccaacaccatcctgggcagccaggaaggcaacaccatgaagaccaacgacacctacatgaagttcagctggctgaccgtgcccgagaagtccctggacaaagaacacagatgcatcgtgcggcacgaaaacaacaagaacggcgtggaccaggaaatcatcttcccacccatcaagaccgatgtgattacaatggaccccaaggacaactgctccaaggacgccaacgataccctgctgctccagctgaccaacaccagcgcctactacatgtacttgttgctgctgctgaagtccgtggtgtacttcgccatcatcacatgctgcctgctgatggctatggtcaagcggaaggacagccggggaagggccaagcgatctggatctggagcaacaaacttctcactactcaaacaagcaggtgacgtggaggagaatcccgggcctactagtatggactggatttggcgcatccttttccttgtcggcgctgctaccggcgcgcattccttcgaacaggtgcaactggtggaaagcggagccgaagtgaagaaacctggggccagcgtgaaggtgtcctgcaaggccagcggctacacctttaccggctactacatgcactgggtgcgccaggctccaggccagggactggaatggatgggccggatcaaccccaatagcggcggcaccaactacgcccagaaattccagggcagagtgaccatgaccagagacaccagcatcagcaccgcctacatggaactgagccggctgagaagcgacgacaccgccgtgtactactgcgccagccctagaggcagaggcagcgccttcgatatttggggccagggcacactcgtgaccgtgtcctctacgcgtatccagaaccctgatcctgccgtgtaccagctgcgggatagcaagagcagcgacaagagcgtgtgtctgttcaccgacttcgacagccagaccaacgtgtcccagagcaaggactccgacgtgtacatcaccgataagtgcgtgctggacatgcggagcatggacttcaagagcaactccgccgtggcctggtccaacaagtccgatttcgcctgcgccaacgccttcaacaacagcattatccccgaggacacattcttcccaagccccgagagcagcgactccaccgaccacgtgaagcccaaagagacagagaacaccaagcagcccagcaagagctgccacaagcccaaggccatcgtgcacaccgagaaagtgaacatgatgagcctgaccgtgctgggcctgcggatgctgttcgccaaaaccgtggccgtgaacttcctgctgaccgccaagctgttcttcctcctcaccgcc

SEQ ID NO: 6086 - DNA, 2187 bp, synthetic construct
  source 1..2187: mol_type = other DNA
atggccttaccagtgaccgccttgctcctgccgctggccttgctgctccacgccgccaggccggacaacttcatgctgacccagccccacagcgtgtccgagagccctggcaagaccgtgaccatctcctgcaccagaagcagcggctctatcgccagcaaatacgtgcagtggtatcagcagaggcccggcagcagccctaccaccgtgatctacgaggacaaccagaggcctagcggcgtgcccgatagattcagcggcagcatcgacaccagcagcaacagcgccagcctgaccatcagcggcctgagaacagaggacgaggccgactactactgccacagctacgacagcaacaaccactccgtgttcggcggaggcaccaaagtgacagtgctgggacagctcgaggacctgaagaacgtgttcccacctgaggtggccgtgttcgagcctagcgaggccgagatcagccacacccagaaagccaccctcgtgtgcctggctaccggcttctaccccgaccatgtggaactgtcttggtgggtcaacggcaaagaggtgcacagcggcgtgtgtaccgacccccagccactgaaagaacagcccgccctgaacgacagccggtactgcctgagcagcagactgagagtgtccgccaccttctggcagaacccccggaaccacttcagatgccaggtgcagttctacggcctgagcgagaacgacgagtggacccaggacagagccaagcccgtgacccagatcgtgtctgccgaagcctggggcagagccgatgatgtgattaagatccactggcaggaaaagaagtccaacaccatcctgggcagccaggaaggcaacaccatgaagaccaacgacacctacatgaagttcagctggctgaccgtgcccgagaagtccctggacaaagaacacagatgcatcgtgcggcacgaaaacaacaagaacggcgtggaccaggaaatcatcttcccacccatcaagaccgatgtgattacaatggaccccaaggacaactgctccaaggacgccaacgataccctgctgctccagctgaccaacaccagcgcctactacatgtacttgttgctgctgctgaagtccgtggtgtacttcgccatcatcacatgctgcctgctgatggctatggtcaagcggaaggacagccggggaagggccaagcgatctggatctggagcaacaaacttctcactactcaaacaagcaggtgacgtggaggagaatcccgggcctactagtatggactggatttggcgcatccttttccttgtcggcgctgctaccggcgcgcattccttcgaagaagtgcaactggtggaaagcgggggaggcgtggtgcagccaggcggatctctgagactgagctgtgccgccagcggcttcaccttcagcagctacgccatgagctgggtgcgccaggcccctggaaaaggcctggaatgggtgtccgccatctctggctctggcggcagcacctactacgccgatagcgtgaagggccggttcagcatcagccgggacaacagcaagaacaccctgtacctccagatgaacagcctgcgggccgaggacaccgccgtgtactactgtgccagaaccagaagctccggggccttcgacatctggggccagggaacactcgtgaccgtgtcctctacgcgtatccagaaccctgatcctgccgtgtaccagctgcgggatagcaagagcagcgacaagagcgtgtgtctgttcaccgacttcgacagccagaccaacgtgtcccagagcaaggactccgacgtgtacatcaccgataagtgcgtgctggacatgcggagcatggacttcaagagcaactccgccgtggcctggtccaacaagtccgatttcgcctgcgccaacgccttcaacaacagcattatccccgaggacacattcttcccaagccccgagagcagcgactccaccgaccacgtgaagcccaaagagacagagaacaccaagcagcccagcaagagctgccacaagcccaaggccatcgtgcacaccgagaaagtgaacatgatgagcctgaccgtgctgggcctgcggatgctgttcgccaaaaccgtggccgtgaacttcctgctgaccgccaagctgttcttcctcctcaccgcc

SEQ ID NO: 6087 - DNA, 2172 bp, synthetic construct
  source 1..2172: mol_type = other DNA
atggccttaccagtgaccgccttgctcctgccgctggccttgctgctccacgccgccaggccggacatccagatgaaccagagccccagcagcctgagcgccagcctgggcgataccatcaccatcacctgtcacgccagccagaacatcaacgtgtggctgagctggtatcagcagaagcccggcaacatccccaagctgctgatctacaaggccagcaacctgcacaccggcgtgcccagcagattttctggcagcggctctggcaccggcttcaccattaccatcagctccctccagcccgaggacattgccacctactactgccagcagggccagagctacccctggacatttggcggaggcaccaagctggaaatcaagagactcgaggacctgaagaacgtgttcccacctgaggtggccgtgttcgagcctagcgaggccgagatcagccacacccagaaagccaccctcgtgtgcctggctaccggcttctaccccgaccatgtggaactgtcttggtgggtcaacggcaaagaggtgcacagcggcgtgtgtaccgacccccagccactgaaagaacagcccgccctgaacgacagccggtactgcctgagcagcagactgagagtgtccgccaccttctggcagaacccccggaaccacttcagatgccaggtgcagttctacggcctgagcgagaacgacgagtggacccaggacagagccaagcccgtgacccagatcgtgtctgccgaagcctggggcagagccgatgatgtgattaagatccactggcaggaaaagaagtccaacaccatcctgggcagccaggaaggcaacaccatgaagaccaacgacacctacatgaagttcagctggctgaccgtgcccgagaagtccctggacaaagaacacagatgcatcgtgcggcacgaaaacaacaagaacggcgtggaccaggaaatcatcttcccacccatcaagaccgatgtgattacaatggaccccaaggacaactgctccaaggacgccaacgataccctgctgctccagctgaccaacaccagcgcctactacatgtacttgttgctgctgctgaagtccgtggtgtacttcgccatcatcacatgctgcctgctgatggctatggtcaagcggaaggacagccggggaagggccaagcgatctggatctggagcaacaaacttctcactactcaaacaagcaggtgacgtggaggagaatcccgggcctactagtatggactggatttggcgcatccttttccttgtcggcgctgctaccggcgcgcattccttcgaagaagtgcaactccagcagagcggcccagagcttgtgaagcctggcgcttccgtgaagattagctgcaaagccagcggctacagcttcaccggctacttcatgaactgggtcaagcagagccacggcaagagcctggagtacatcggcagattcaacccctacaacggcgagacactgtacaaccagaagttcaagggcaaggccaccctgaccgtggacaagagcagcagcaccgtgcacatggaactgctgagcgtgaccagcgaggacagcgccgtgtactactgtggcagaagcggcaacgacgacgctatggactattggggccagggcaccagcgtgaccgtgtctagtgctacgcgtatccagaaccctgatcctgccgtgtaccagctgcgggatagcaagagcagcgacaagagcgtgtgtctgttcaccgacttcgacagccagaccaacgtgtcccagagcaaggactccgacgtgtacatcaccgataagtgcgtgctggacatgcggagcatggacttcaagagcaactccgccgtggcctggtccaacaagtccgatttcgcctgcgccaacgccttcaacaacagcattatccccgaggacacattcttcccaagccccgagagcagcgactccaccgaccacgtgaagcccaaagagacagagaacaccaagcagcccagcaagagctgccacaagcccaaggccatcgtgcacaccgagaaagtgaacatgatgagcctgaccgtgctgggcctgcggatgctgttcgccaaaaccgtggccgtgaacttcctgctgaccgccaagctgttcttcctcctcaccgcc

SEQ ID NO: 6088 - DNA, 2175 bp, synthetic construct
  source 1..2175: mol_type = other DNA
atggccttaccagtgaccgccttgctcctgccgctggccttgctgctccacgccgccaggccggagatcgtgctgacacagagccctgccaccctgtctctgagccctggcgaaagagccaccctgagctgtagagccagccagagcgtgcggagctacctggcctggtatcagcagaagcctggacaggcccccagactgctgatctacgacgccagcaatcgggccacaggcatccccgccagattttctggctctggcagcggcaccgacttcaccctgacaatcagcagcctggaacccgaggacttcgccgtgtactactgccagcagcggagcaactggccccctacctttggacagggcaccaaggtggaaatcaagctcgaggacctgaagaacgtgttcccacctgaggtggccgtgttcgagcctagcgaggccgagatcagccacacccagaaagccaccctcgtgtgcctggctaccggcttctaccccgaccatgtggaactgtcttggtgggtcaacggcaaagaggtgcacagcggcgtgtgtaccgacccccagccactgaaagaacagcccgccctgaacgacagccggtactgcctgagcagcagactgagagtgtccgccaccttctggcagaacccccggaaccacttcagatgccaggtgcagttctacggcctgagcgagaacgacgagtggacccaggacagagccaagcccgtgacccagatcgtgtctgccgaagcctggggcagagccgatgatgtgattaagatccactggcaggaaaagaagtccaacaccatcctgggcagccaggaaggcaacaccatgaagaccaacgacacctacatgaagttcagctggctgaccgtgcccgagaagtccctggacaaagaacacagatgcatcgtgcggcacgaaaacaacaagaacggcgtggaccaggaaatcatcttcccacccatcaagaccgatgtgattacaatggaccccaaggacaactgctccaaggacgccaacgataccctgctgctccagctgaccaacaccagcgcctactacatgtacttgttgctgctgctgaagtccgtggtgtacttcgccatcatcacatgctgcctgctgatggctatggtcaagcggaaggacagccggggaagggccaagcgatctggatctggagcaacaaacttctcactactcaaacaagcaggtgacgtggaggagaatcccgggcctactagtatggactggatttggcgcatccttttccttgtcggcgctgctaccggcgcgcattccttcgaacaactccaggtgcaggaatctggccccggactcgtgaagcccagcgagacactgagcctgacctgtaccgtgtccggcggcagcatcagcaacagctacttctcctggggctggatcagacagccccctggcaagggcctggaatggatcggcagcttctactacggcgagaaaacctactacaaccccagcctgaagtccagagccaccatcagcatcgacaccagcaagagccagttctccctgaagctgagcagcgtgacagccgccgacaccgccgtgtattattgccccagaggccccaccatgatccggggcgtgatcgactcttggggccagggaacactcgtgaccgtgtcctctacgcgtatccagaaccctgatcctgccgtgtaccagctgcgggatagcaagagcagcgacaagagcgtgtgtctgttcaccgacttcgacagccagaccaacgtgtcccagagcaaggactccgacgtgtacatcaccgataagtgcgtgctggacatgcggagcatggacttcaagagcaactccgccgtggcctggtccaacaagtccgatttcgcctgcgccaacgccttcaacaacagcattatccccgaggacacattcttcccaagccccgagagcagcgactccaccgaccacgtgaagcccaaagagacagagaacaccaagcagcccagcaagagctgccacaagcccaaggccatcgtgcacaccgagaaagtgaacatgatgagcctgaccgtgctgggcctgcggatgctgttcgccaaaaccgtggccgtgaacttcctgctgaccgccaagctgttcttcctcctcaccgcc

SEQ ID NO: 6089 - DNA, 2202 bp, synthetic construct
  source 1..2202: mol_type = other DNA
atggccttaccagtgaccgccttgctcctgccgctggccttgctgctccacgccgccaggccggacatcgtgatgacccagacccccctgagcctgcctgtgacacctggcgagcctgccagcatctcctgcagaagcagcagaagcctgctggacagcgacgacggcaacacctacctggactggtatctgcagaaacccggccagagcccccaactgctgatctacaccctgagctacagagccagcggcgtgcccgatagattttccggctctggcagcggcaccgacttcaccctgaagatcagccgggtggaagccgaggacgtgggcgtgtactactgtatgcagcgggtggaatttcccatcaccttcggccagggcaccagactggaaatcaagagactcgaggacctgaagaacgtgttcccacctgaggtggccgtgttcgagcctagcgaggccgagatcagccacacccagaaagccaccctcgtgtgcctggctaccggcttctaccccgaccatgtggaactgtcttggtgggtcaacggcaaagaggtgcacagcggcgtgtgtaccgacccccagccactgaaagaacagcccgccctgaacgacagccggtactgcctgagcagcagactgagagtgtccgccaccttctggcagaacccccggaaccacttcagatgccaggtgcagttctacggcctgagcgagaacgacgagtggacccaggacagagccaagcccgtgacccagatcgtgtctgccgaagcctggggcagagccgatgatgtgattaagatccactggcaggaaaagaagtccaacaccatcctgggcagccaggaaggcaacaccatgaagaccaacgacacctacatgaagttcagctggctgaccgtgcccgagaagtccctggacaaagaacacagatgcatcgtgcggcacgaaaacaacaagaacggcgtggaccaggaaatcatcttcccacccatcaagaccgatgtgattacaatggaccccaaggacaactgctccaaggacgccaacgataccctgctgctccagctgaccaacaccagcgcctactacatgtacttgttgctgctgctgaagtccgtggtgtacttcgccatcatcacatgctgcctgctgatggctatggtcaagcggaaggacagccggggaagggccaagcgatctggatctggagcaacaaacttctcactactcaaacaagcaggtgacgtggaggagaatcccgggcctactagtatggactggatttggcgcatccttttccttgtcggcgctgctaccggcgcgcattccttcgaacaggtgcaactggtggaatctggcgggggagtggtgcagcctggcagatccctgagactgagctgtgccgccagcggcttcatcttcagcagatacggaatgcactgggtgcgccaggcccctggcaagggactgaaatgggtggccgtgatttggtacgacggcagcaacaagctgtacgccgacagcgtgaagggccggttcaccatcagcagagacaacagcaagaacaccctgtacctgcagatgaacagcctgcgggccgaggacaccgccgtgtactattgcgccagagactactacgacaacagccggcaccactggggcttcgactattggggccagggaacccttgtgaccgtgtcctctacgcgtatccagaaccctgatcctgccgtgtaccagctgcgggatagcaagagcagcgacaagagcgtgtgtctgttcaccgacttcgacagccagaccaacgtgtcccagagcaaggactccgacgtgtacatcaccgataagtgcgtgctggacatgcggagcatggacttcaagagcaactccgccgtggcctggtccaacaagtccgatttcgcctgcgccaacgccttcaacaacagcattatccccgaggacacattcttcccaagccccgagagcagcgactccaccgaccacgtgaagcccaaagagacagagaacaccaagcagcccagcaagagctgccacaagcccaaggccatcgtgcacaccgagaaagtgaacatgatgagcctgaccgtgctgggcctgcggatgctgttcgccaaaaccgtggccgtgaacttcctgctgaccgccaagctgttcttcctcctcaccgcc

SEQ ID NO: 6090 - DNA, 2172 bp, synthetic construct
  source 1..2172: mol_type = other DNA
atggccttaccagtgaccgccttgctcctgccgctggccttgctgctccacgccgccaggccggagatccagatgacccagagccccagcagcatgtctgccagcctgggcgacaccatcaccatcacatgccaggccacccaggacatcttcaagaacctgaactggtatcagcagaagcccggcaagccccccagcctgctgatctactatgccaccgaactggccgagggcgtgcccagcagattttctggcagcggcagcggctccgactacagcctgaccatcagcaacctggaaagcgaggacttcgccgcctactactgcctccagttcttcgagttcccattcaccttcggctccggcaccaagctggaaatgaagctcgaggacctgaagaacgtgttcccacctgaggtggccgtgttcgagcctagcgaggccgagatcagccacacccagaaagccaccctcgtgtgcctggctaccggcttctaccccgaccatgtggaactgtcttggtgggtcaacggcaaagaggtgcacagcggcgtgtgtaccgacccccagccactgaaagaacagcccgccctgaacgacagccggtactgcctgagcagcagactgagagtgtccgccaccttctggcagaacccccggaaccacttcagatgccaggtgcagttctacggcctgagcgagaacgacgagtggacccaggacagagccaagcccgtgacccagatcgtgtctgccgaagcctggggcagagccgatgatgtgattaagatccactggcaggaaaagaagtccaacaccatcctgggcagccaggaaggcaacaccatgaagaccaacgacacctacatgaagttcagctggctgaccgtgcccgagaagtccctggacaaagaacacagatgcatcgtgcggcacgaaaacaacaagaacggcgtggaccaggaaatcatcttcccacccatcaagaccgatgtgattacaatggaccccaaggacaactgctccaaggacgccaacgataccctgctgctccagctgaccaacaccagcgcctactacatgtacttgttgctgctgctgaagtccgtggtgtacttcgccatcatcacatgctgcctgctgatggctatggtcaagcggaaggacagccggggaagggccaagcgatctggatctggagcaacaaacttctcactactcaaacaagcaggtgacgtggaggagaatcccgggcctactagtatggactggatttggcgcatccttttccttgtcggcgctgctaccggcgcgcattccttcgaacaggtgcaactccagcagtctggcgctgagcttgtgcggcctggcacctctgtgaaggtgtcctgtaaagccagcggctacgtgttcaccaactactggatcgagtggatcaagcagcggccaggccagggcctggaatggatcggcgtgatgaatccaggcagcggcgagacaacctacaacgagaagttcaagggcaaggccaccctgaccgccgacaagagcagcagcacagcctacatgcaactgtcctccctgaccagcgtggacagcgccgtgtacttctgcgccagggaccacgaccgggactactacgctatggactactggggccagggcaccagcgtgaccgtgtcatctacgcgtatccagaaccctgatcctgccgtgtaccagctgcgggatagcaagagcagcgacaagagcgtgtgtctgttcaccgacttcgacagccagaccaacgtgtcccagagcaaggactccgacgtgtacatcaccgataagtgcgtgctggacatgcggagcatggacttcaagagcaactccgccgtggcctggtccaacaagtccgatttcgcctgcgccaacgccttcaacaacagcattatccccgaggacacattcttcccaagccccgagagcagcgactccaccgaccacgtgaagcccaaagagacagagaacaccaagcagcccagcaagagctgccacaagcccaaggccatcgtgcacaccgagaaagtgaacatgatgagcctgaccgtgctgggcctgcggatgctgttcgccaaaaccgtggccgtgaacttcctgctgaccgccaagctgttcttcctcctcaccgcc

SEQ ID NO: 6091 - DNA, 2163 bp, synthetic construct
  source 1..2163: mol_type = other DNA
atggccttaccagtgaccgccttgctcctgccgctggccttgctgctccacgccgccaggccggacatcctgctgacacagagccccgccatcctgtccgtgtctccaggcgagagagtgtcctttagctgccgggccagccagaacatcggcaccagcatccactggtatcagcagcggaccaacggcagccccagactgctgattaagtacgccagcgagtccgtgtccggcatccccagcagattttctggcagcggctccggcaccgacttcaccctgagcatcaacagcgtggaaagcgaggacattgccgactactactgccagcacaccaatagctggcccaccacctttggcggaggcaccaagctggaaatcaagagactcgaggacctgaagaacgtgttcccacctgaggtggccgtgttcgagcctagcgaggccgagatcagccacacccagaaagccaccctcgtgtgcctggctaccggcttctaccccgaccatgtggaactgtcttggtgggtcaacggcaaagaggtgcacagcggcgtgtgtaccgacccccagccactgaaagaacagcccgccctgaacgacagccggtactgcctgagcagcagactgagagtgtccgccaccttctggcagaacccccggaaccacttcagatgccaggtgcagttctacggcctgagcgagaacgacgagtggacccaggacagagccaagcccgtgacccagatcgtgtctgccgaagcctggggcagagccgatgatgtgattaagatccactggcaggaaaagaagtccaacaccatcctgggcagccaggaaggcaacaccatgaagaccaacgacacctacatgaagttcagctggctgaccgtgcccgagaagtccctggacaaagaacacagatgcatcgtgcggcacgaaaacaacaagaacggcgtggaccaggaaatcatcttcccacccatcaagaccgatgtgattacaatggaccccaaggacaactgctccaaggacgccaacgataccctgctgctccagctgaccaacaccagcgcctactacatgtacttgttgctgctgctgaagtccgtggtgtacttcgccatcatcacatgctgcctgctgatggctatggtcaagcggaaggacagccggggaagggccaagcgatctggatctggagcaacaaacttctcactactcaaacaagcaggtgacgtggaggagaatcccgggcctactagtatggactggatttggcgcatccttttccttgtcggcgctgctaccggcgcgcattccttcgaacaggtgcaactccagcagtccgacgccgagcttgtgaagcctggcgcttccgtgaagattagctgcaaggccagcggctacaccttcaccgaccacgccattcactgggtcaagcagaagcccgagcagggcctggaatggatcggctacttcagccccggcaacggcgacatcaagtacaacgagaagttcaagggcaaggccaccctgaccgccgacaagagcagcagcacagcctacatgcaactgaacagcctgaccagcgaggactccgccgtgtacttctgcaagcggagctacggcaactacgactactggggccagggcaccacactgaccgtgtctagtacgcgtatccagaaccctgatcctgccgtgtaccagctgcgggatagcaagagcagcgacaagagcgtgtgtctgttcaccgacttcgacagccagaccaacgtgtcccagagcaaggactccgacgtgtacatcaccgataagtgcgtgctggacatgcggagcatggacttcaagagcaactccgccgtggcctggtccaacaagtccgatttcgcctgcgccaacgccttcaacaacagcattatccccgaggacacattcttcccaagccccgagagcagcgactccaccgaccacgtgaagcccaaagagacagagaacaccaagcagcccagcaagagctgccacaagcccaaggccatcgtgcacaccgagaaagtgaacatgatgagcctgaccgtgctgggcctgcggatgctgttcgccaaaaccgtggccgtgaacttcctgctgaccgccaagctgttcttcctcctcaccgcc

SEQ ID NO: 6092 - DNA, 2178 bp, synthetic construct
  source 1..2178: mol_type = other DNA
atggccttaccagtgaccgccttgctcctgccgctggccttgctgctccacgccgccaggccggacatcgtgatgacccagagccccgatagcctggccgtgtctctgggagagagagccaccatcaactgcaagagcagccagagcctgctgaacagcggcgaccagaagaactacctgacctggtatcagcagaagcccggccagccccccaagctgctgatctactgggccagcaccagagaaagcggcgtgcccgatagattcagcggcagcggaagtggcaccgacttcaccctgaccatcagttctcttcaggccgaggacgtggccgtgtactactgccagaacgactacagctaccccctgaccttcggccagggcaccaaggtggaaatcaagctcgaggacctgaagaacgtgttcccacctgaggtggccgtgttcgagcctagcgaggccgagatcagccacacccagaaagccaccctcgtgtgcctggctaccggcttctaccccgaccatgtggaactgtcttggtgggtcaacggcaaagaggtgcacagcggcgtgtgtaccgacccccagccactgaaagaacagcccgccctgaacgacagccggtactgcctgagcagcagactgagagtgtccgccaccttctggcagaacccccggaaccacttcagatgccaggtgcagttctacggcctgagcgagaacgacgagtggacccaggacagagccaagcccgtgacccagatcgtgtctgccgaagcctggggcagagccgatgatgtgattaagatccactggcaggaaaagaagtccaacaccatcctgggcagccaggaaggcaacaccatgaagaccaacgacacctacatgaagttcagctggctgaccgtgcccgagaagtccctggacaaagaacacagatgcatcgtgcggcacgaaaacaacaagaacggcgtggaccaggaaatcatcttcccacccatcaagaccgatgtgattacaatggaccccaaggacaactgctccaaggacgccaacgataccctgctgctccagctgaccaacaccagcgcctactacatgtacttgttgctgctgctgaagtccgtggtgtacttcgccatcatcacatgctgcctgctgatggctatggtcaagcggaaggacagccggggaagggccaagcgatctggatctggagcaacaaacttctcactactcaaacaagcaggtgacgtggaggagaatcccgggcctactagtatggactggatttggcgcatccttttccttgtcggcgctgctaccggcgcgcattccttcgaacaggtgcagctggtgcagtctggggccgaagtgaagaaaaccggcagcagcgtgaaggtgtcctgcaaggccagcggctacacctttaccgaccacgccattcacgtgtggcggcaggctccaggacaggccctggaatggatgggccacttcagccccggcaacaccgacatcaagtacaacgacaagttcaagggcagagtgaccctgaccgtggaccgcagcatgagcaccgcctacatggaactgagcagcctgcggagcgaggacaccgccatgtactattgcaagaccagcaccttctttttcgactactggggccagggaacaatggtcaccgtgtccagcacgcgtatccagaaccctgatcctgccgtgtaccagctgcgggatagcaagagcagcgacaagagcgtgtgtctgttcaccgacttcgacagccagaccaacgtgtcccagagcaaggactccgacgtgtacatcaccgataagtgcgtgctggacatgcggagcatggacttcaagagcaactccgccgtggcctggtccaacaagtccgatttcgcctgcgccaacgccttcaacaacagcattatccccgaggacacattcttcccaagccccgagagcagcgactccaccgaccacgtgaagcccaaagagacagagaacaccaagcagcccagcaagagctgccacaagcccaaggccatcgtgcacaccgagaaagtgaacatgatgagcctgaccgtgctgggcctgcggatgctgttcgccaaaaccgtggccgtgaacttcctgctgaccgccaagctgttcttcctcctcaccgcc

SEQ ID NO: 6093 - DNA, 2175 bp, synthetic construct
  source 1..2175: mol_type = other DNA
atggccttaccagtgaccgccttgctcctgccgctggccttgctgctccacgccgccaggccggacatccagatgacccagagccccagcagcctgtctgccagcgtgggcgacagagtgaccatcacatgcaaggccagccaggacgtgtccattgccgtggcctggtatcagcagaagcccggcaaggcccccaaggtgctgatctacagcgccagctacagatacaccggcgtgcccgacagattcagcggctctggcagcggcaccgacttcaccttcaccatcagctccctccagcccgaggatattgccgtgtactactgccagcagcactacatcacccccctgacctttggcggaggcaccaaggtggaaatcaagctcgaggacctgaagaacgtgttcccacctgaggtggccgtgttcgagcctagcgaggccgagatcagccacacccagaaagccaccctcgtgtgcctggctaccggcttctaccccgaccatgtggaactgtcttggtgggtcaacggcaaagaggtgcacagcggcgtgtgtaccgacccccagccactgaaagaacagcccgccctgaacgacagccggtactgcctgagcagcagactgagagtgtccgccaccttctggcagaacccccggaaccacttcagatgccaggtgcagttctacggcctgagcgagaacgacgagtggacccaggacagagccaagcccgtgacccagatcgtgtctgccgaagcctggggcagagccgatgatgtgattaagatccactggcaggaaaagaagtccaacaccatcctgggcagccaggaaggcaacaccatgaagaccaacgacacctacatgaagttcagctggctgaccgtgcccgagaagtccctggacaaagaacacagatgcatcgtgcggcacgaaaacaacaagaacggcgtggaccaggaaatcatcttcccacccatcaagaccgatgtgattacaatggaccccaaggacaactgctccaaggacgccaacgataccctgctgctccagctgaccaacaccagcgcctactacatgtacttgttgctgctgctgaagtccgtggtgtacttcgccatcatcacatgctgcctgctgatggctatggtcaagcggaaggacagccggggaagggccaagcgatctggatctggagcaacaaacttctcactactcaaacaagcaggtgacgtggaggagaatcccgggcctactagtatggactggatttggcgcatccttttccttgtcggcgctgctaccggcgcgcattccttcgaacagatccaactggtgcagagcggccacgaagtgaagaaacctggggccagcgtgaaggtgtcctgcaaagccagcggctacacctttaccaactacggcatgaactgggtgcgccaggcccctggacagggcctggaatggatgggctggatcaacaccaagaccggcgagcccacctacgccgaagagttcaagggcagattcgtgttcagcctggaaaccagcgcctccaccgcctacctccagatcagctctctgaaggccgaggacaccgccatgtacttttgcggcagaggcggctacggcagcagctactggtacttcgatgtgtggggccagggcaccaccgtgaccgtgtcatctacgcgtatccagaaccctgatcctgccgtgtaccagctgcgggatagcaagagcagcgacaagagcgtgtgtctgttcaccgacttcgacagccagaccaacgtgtcccagagcaaggactccgacgtgtacatcaccgataagtgcgtgctggacatgcggagcatggacttcaagagcaactccgccgtggcctggtccaacaagtccgatttcgcctgcgccaacgccttcaacaacagcattatccccgaggacacattcttcccaagccccgagagcagcgactccaccgaccacgtgaagcccaaagagacagagaacaccaagcagcccagcaagagctgccacaagcccaaggccatcgtgcacaccgagaaagtgaacatgatgagcctgaccgtgctgggcctgcggatgctgttcgccaaaaccgtggccgtgaacttcctgctgaccgccaagctgttcttcctcctcaccgcc

SEQ ID NO: 6094 - DNA, 2181 bp, synthetic construct
  source 1..2181: mol_type = other DNA
atggccttaccagtgaccgccttgctcctgccgctggccttgctgctccacgccgccaggccggacatcgtgatgacccagagccccgatagcctggccgtgtctctgggagagagagccaccatcaactgccgggccagcaagagcgtgtccaccagcggctacagctacatgcactggtatcagcagaagcccggccagccccccaagctgctgatctacctggcctccaacctggaaagcggcgtgcccgatagattcagcggcagcggctctggcaccgacttcaccctgaccatcagttctcttcaggccgaggacgtggccgtgtactactgccagcacagcagagagctgccctacaccttcggccagggcaccaagctggaaatcaagctcgaggacctgaagaacgtgttcccacctgaggtggccgtgttcgagcctagcgaggccgagatcagccacacccagaaagccaccctcgtgtgcctggctaccggcttctaccccgaccatgtggaactgtcttggtgggtcaacggcaaagaggtgcacagcggcgtgtgtaccgacccccagccactgaaagaacagcccgccctgaacgacagccggtactgcctgagcagcagactgagagtgtccgccaccttctggcagaacccccggaaccacttcagatgccaggtgcagttctacggcctgagcgagaacgacgagtggacccaggacagagccaagcccgtgacccagatcgtgtctgccgaagcctggggcagagccgatgatgtgattaagatccactggcaggaaaagaagtccaacaccatcctgggcagccaggaaggcaacaccatgaagaccaacgacacctacatgaagttcagctggctgaccgtgcccgagaagtccctggacaaagaacacagatgcatcgtgcggcacgaaaacaacaagaacggcgtggaccaggaaatcatcttcccacccatcaagaccgatgtgattacaatggaccccaaggacaactgctccaaggacgccaacgataccctgctgctccagctgaccaacaccagcgcctactacatgtacttgttgctgctgctgaagtccgtggtgtacttcgccatcatcacatgctgcctgctgatggctatggtcaagcggaaggacagccggggaagggccaagcgatctggatctggagcaacaaacttctcactactcaaacaagcaggtgacgtggaggagaatcccgggcctactagtatggactggatttggcgcatccttttccttgtcggcgctgctaccggcgcgcattccttcgaacaggtgcaactccaggaatctggccctggccttgtgaagcccagcgagacactgagcctgacctgtaccgtgtccggcggcagcatcagctcttacggcgtgcactggattcggcagcctccaggcaagggcctggaatggatcggcgtgatctggacctccggcgtgaccgactacaacagcgccctgatgggcagagtgaccatctccgtggacaccagcaagaaccagttcagcctgaagctgagcagcgtgacagccgccgataccgccgtgtattattgcgccagagatggcgactacgaccgctacacaatggactactggggccagggaacccttgtgaccgtgtcctctacgcgtatccagaaccctgatcctgccgtgtaccagctgcgggatagcaagagcagcgacaagagcgtgtgtctgttcaccgacttcgacagccagaccaacgtgtcccagagcaaggactccgacgtgtacatcaccgataagtgcgtgctggacatgcggagcatggacttcaagagcaactccgccgtggcctggtccaacaagtccgatttcgcctgcgccaacgccttcaacaacagcattatccccgaggacacattcttcccaagccccgagagcagcgactccaccgaccacgtgaagcccaaagagacagagaacaccaagcagcccagcaagagctgccacaagcccaaggccatcgtgcacaccgagaaagtgaacatgatgagcctgaccgtgctgggcctgcggatgctgttcgccaaaaccgtggccgtgaacttcctgctgaccgccaagctgttcttcctcctcaccgcc

SEQ ID NO: 6095 - DNA, 2181 bp, synthetic construct
  source 1..2181: mol_type = other DNA
atggccttaccagtgaccgccttgctcctgccgctggccttgctgctccacgccgccaggccggacatccagatgacccagagccccagcagcctgtctgccagcgtgggcgacagagtgaccatcacctgtagagccagccagagcatcggcaccagcctgcactggtatcagcagaagcctggcaaggcccccaagctgctgattaagttcgccagcagactgcagagcggcgtgcccagcagattttctggcagcggctccggcaccgacttcaccctgacaatcagctccctgcagcccgaggacttcgccacctactactgccagcagagccccggcttccctccaacctttggacagggcaccaagctggaaatcaagcggctcgaggacctgaagaacgtgttcccacctgaggtggccgtgttcgagcctagcgaggccgagatcagccacacccagaaagccaccctcgtgtgcctggctaccggcttctaccccgaccatgtggaactgtcttggtgggtcaacggcaaagaggtgcacagcggcgtgtgtaccgacccccagccactgaaagaacagcccgccctgaacgacagccggtactgcctgagcagcagactgagagtgtccgccaccttctggcagaacccccggaaccacttcagatgccaggtgcagttctacggcctgagcgagaacgacgagtggacccaggacagagccaagcccgtgacccagatcgtgtctgccgaagcctggggcagagccgatgatgtgattaagatccactggcaggaaaagaagtccaacaccatcctgggcagccaggaaggcaacaccatgaagaccaacgacacctacatgaagttcagctggctgaccgtgcccgagaagtccctggacaaagaacacagatgcatcgtgcggcacgaaaacaacaagaacggcgtggaccaggaaatcatcttcccacccatcaagaccgatgtgattacaatggaccccaaggacaactgctccaaggacgccaacgataccctgctgctccagctgaccaacaccagcgcctactacatgtacttgttgctgctgctgaagtccgtggtgtacttcgccatcatcacatgctgcctgctgatggctatggtcaagcggaaggacagccggggaagggccaagcgatctggatctggagcaacaaacttctcactactcaaacaagcaggtgacgtggaggagaatcccgggcctactagtatggactggatttggcgcatccttttccttgtcggcgctgctaccggcgcgcattccttcgaacaggtgcaactggtggaatctggcggcggacttgtgaagccaggcggcagcctgagactgagctgtgccgccagcggcttcagcatcaccaccagcggctactactggacctggatcagacagttccccggcaagggcctggaatggatgggctacatcggctacaacagcaagacctactacaaccccgccctgaagtcccggatcaccatcagcagagacaacgccaagaacagcctgtacctgcagatgaactccctgagagccgaggataccgccgtgtactactgcgccagatccctgtacggcggctacaaggacgccttcgatagctggggccagggaacccttgtgaccgtgtctagcacgcgtatccagaaccctgatcctgccgtgtaccagctgcgggatagcaagagcagcgacaagagcgtgtgtctgttcaccgacttcgacagccagaccaacgtgtcccagagcaaggactccgacgtgtacatcaccgataagtgcgtgctggacatgcggagcatggacttcaagagcaactccgccgtggcctggtccaacaagtccgatttcgcctgcgccaacgccttcaacaacagcattatccccgaggacacattcttcccaagccccgagagcagcgactccaccgaccacgtgaagcccaaagagacagagaacaccaagcagcccagcaagagctgccacaagcccaaggccatcgtgcacaccgagaaagtgaacatgatgagcctgaccgtgctgggcctgcggatgctgttcgccaaaaccgtggccgtgaacttcctgctgaccgccaagctgttcttcctcctcaccgcc

SEQ ID NO: 6096 - DNA, 2196 bp, synthetic construct
  source 1..2196: mol_type = other DNA
atggccttaccagtgaccgccttgctcctgccgctggccttgctgctccacgccgccaggccggacgagatcgtgctgacccagagccctctgagcctgcctgtgacacctggcgagcctgccagcatctcctgtagaagcagccagagcctgctgcacagcatcggctacaactacctggactggtatctccagaagcccggccagagcccccaactgctgatctacctgggcagcaacagagccagcggcgtgcccgatagattttccggcagcggctccggcaccgacttcaccctgaagatcagccgggtggaagccgaggacgtgggcgtgtactactgtatgcaggccctccagacccccctgacctttggcggaggcaccaaggtggaaatcaagcggctcgaggacctgaagaacgtgttcccacctgaggtggccgtgttcgagcctagcgaggccgagatcagccacacccagaaagccaccctcgtgtgcctggctaccggcttctaccccgaccatgtggaactgtcttggtgggtcaacggcaaagaggtgcacagcggcgtgtgtaccgacccccagccactgaaagaacagcccgccctgaacgacagccggtactgcctgagcagcagactgagagtgtccgccaccttctggcagaacccccggaaccacttcagatgccaggtgcagttctacggcctgagcgagaacgacgagtggacccaggacagagccaagcccgtgacccagatcgtgtctgccgaagcctggggcagagccgatgatgtgattaagatccactggcaggaaaagaagtccaacaccatcctgggcagccaggaaggcaacaccatgaagaccaacgacacctacatgaagttcagctggctgaccgtgcccgagaagtccctggacaaagaacacagatgcatcgtgcggcacgaaaacaacaagaacggcgtggaccaggaaatcatcttcccacccatcaagaccgatgtgattacaatggaccccaaggacaactgctccaaggacgccaacgataccctgctgctccagctgaccaacaccagcgcctactacatgtacttgttgctgctgctgaagtccgtggtgtacttcgccatcatcacatgctgcctgctgatggctatggtcaagcggaaggacagccggggaagggccaagcgatctggatctggagcaacaaacttctcactactcaaacaagcaggtgacgtggaggagaatcccgggcctactagtatggactggatttggcgcatccttttccttgtcggcgctgctaccggcgcgcattccttcgaagaagtgcaactggtggaaagcggaggcggcgtggtgcagcctggaagaagcctgagactgagctgtgccgccagcggcttcaccttccggtcctacggaatgcactgggtgcgccaggcccctggcaaaggactggaatgggtggccgtgatctcctacgacggctccaacaagtactacaccgacagcgtgaacggcagattcaccatcagcagagacaacagcaagaacaccctgtacctccagatgaacagcctgcgggccgaggacaccgccgtgtactattgtgctagaggcggaggctactacgagacaagcggccctgattactggggccagggcacactcgtgaccgtgtctagtacgcgtatccagaaccctgatcctgccgtgtaccagctgcgggatagcaagagcagcgacaagagcgtgtgtctgttcaccgacttcgacagccagaccaacgtgtcccagagcaaggactccgacgtgtacatcaccgataagtgcgtgctggacatgcggagcatggacttcaagagcaactccgccgtggcctggtccaacaagtccgatttcgcctgcgccaacgccttcaacaacagcattatccccgaggacacattcttcccaagccccgagagcagcgactccaccgaccacgtgaagcccaaagagacagagaacaccaagcagcccagcaagagctgccacaagcccaaggccatcgtgcacaccgagaaagtgaacatgatgagcctgaccgtgctgggcctgcggatgctgttcgccaaaaccgtggccgtgaacttcctgctgaccgccaagctgttcttcctcctcaccgcc

SEQ ID NO: 6097 - DNA, 2190 bp, synthetic construct
  source 1..2190: mol_type = other DNA
atggccttaccagtgaccgccttgctcctgccgctggccttgctgctccacgccgccaggccggacgacgtcgtgatgacccagagccctctgagcctgcctgtgacacctggcgagcctgccagcatctcctgtagaagcagccagagcctgctgcacagcatcggctacaactacctgcactggtttctccagaagcccggccagagcccccaactgctgatctacctgggcagcaacagagccagcggcgtgcccgatagattttccggcagcggctccggcaccgacttcaccctgaagatcagccgggtggaagccgaggacgtgggcgtgtactactgtatgcaggccctccagacccctcccacctttggacagggcaccagactggaaatcaagcggctcgaggacctgaagaacgtgttcccacctgaggtggccgtgttcgagcctagcgaggccgagatcagccacacccagaaagccaccctcgtgtgcctggctaccggcttctaccccgaccatgtggaactgtcttggtgggtcaacggcaaagaggtgcacagcggcgtgtgtaccgacccccagccactgaaagaacagcccgccctgaacgacagccggtactgcctgagcagcagactgagagtgtccgccaccttctggcagaacccccggaaccacttcagatgccaggtgcagttctacggcctgagcgagaacgacgagtggacccaggacagagccaagcccgtgacccagatcgtgtctgccgaagcctggggcagagccgatgatgtgattaagatccactggcaggaaaagaagtccaacaccatcctgggcagccaggaaggcaacaccatgaagaccaacgacacctacatgaagttcagctggctgaccgtgcccgagaagtccctggacaaagaacacagatgcatcgtgcggcacgaaaacaacaagaacggcgtggaccaggaaatcatcttcccacccatcaagaccgatgtgattacaatggaccccaaggacaactgctccaaggacgccaacgataccctgctgctccagctgaccaacaccagcgcctactacatgtacttgttgctgctgctgaagtccgtggtgtacttcgccatcatcacatgctgcctgctgatggctatggtcaagcggaaggacagccggggaagggccaagcgatctggatctggagcaacaaacttctcactactcaaacaagcaggtgacgtggaggagaatcccgggcctactagtatggactggatttggcgcatccttttccttgtcggcgctgctaccggcgcgcattccttcgaacaactccaactccaggaaagcggccctggcctcgtgaagcctagcggcacactgagcctgacatgtgccgtgtctggcggcagcatcagcagcagcaactggtggtcttgggtgcgccagcctcctggcaagggcctggaatggatcggcgaaatctaccacagcggcagcaccaactacaaccccagcctgaagtccagagtgaccatcagcgtggacaagagcaagaaccagttctccctgaagctgagcagcgtgacagccgccgataccgccgtgtactattgcgtgggcagcccctacggcgactacgtgctggattattggggccagggcaccctcgtgaccgtgtctagtacgcgtatccagaaccctgatcctgccgtgtaccagctgcgggatagcaagagcagcgacaagagcgtgtgtctgttcaccgacttcgacagccagaccaacgtgtcccagagcaaggactccgacgtgtacatcaccgataagtgcgtgctggacatgcggagcatggacttcaagagcaactccgccgtggcctggtccaacaagtccgatttcgcctgcgccaacgccttcaacaacagcattatccccgaggacacattcttcccaagccccgagagcagcgactccaccgaccacgtgaagcccaaagagacagagaacaccaagcagcccagcaagagctgccacaagcccaaggccatcgtgcacaccgagaaagtgaacatgatgagcctgaccgtgctgggcctgcggatgctgttcgccaaaaccgtggccgtgaacttcctgctgaccgccaagctgttcttcctcctcaccgcc

SEQ ID NO: 6098 - DNA, 2184 bp, synthetic construct
  source 1..2184: mol_type = other DNA
atggccttaccagtgaccgccttgctcctgccgctggccttgctgctccacgccgccaggccggacgagatcgtgctgacacagagccctggcaccctgagcctgtctctgggagagagagccacactgagctgtcgggccagccagtctatcagcagcagcttcctggcctggtatcagcagaagcccggccaggcccctaagctgctgatctacgccgccagcacaagagccaccggcatccccgatagattcagcggctctggcagcggcaccgacttcaccctgaccatcagcagactggaacccgaggacttcgccgtgtactactgccagcagtacggcagaagcctgagcttcggcggaggcaccaaggtggaagtgaagctcgaggacctgaagaacgtgttcccacctgaggtggccgtgttcgagcctagcgaggccgagatcagccacacccagaaagccaccctcgtgtgcctggctaccggcttctaccccgaccatgtggaactgtcttggtgggtcaacggcaaagaggtgcacagcggcgtgtgtaccgacccccagccactgaaagaacagcccgccctgaacgacagccggtactgcctgagcagcagactgagagtgtccgccaccttctggcagaacccccggaaccacttcagatgccaggtgcagttctacggcctgagcgagaacgacgagtggacccaggacagagccaagcccgtgacccagatcgtgtctgccgaagcctggggcagagccgatgatgtgattaagatccactggcaggaaaagaagtccaacaccatcctgggcagccaggaaggcaacaccatgaagaccaacgacacctacatgaagttcagctggctgaccgtgcccgagaagtccctggacaaagaacacagatgcatcgtgcggcacgaaaacaacaagaacggcgtggaccaggaaatcatcttcccacccatcaagaccgatgtgattacaatggaccccaaggacaactgctccaaggacgccaacgataccctgctgctccagctgaccaacaccagcgcctactacatgtacttgttgctgctgctgaagtccgtggtgtacttcgccatcatcacatgctgcctgctgatggctatggtcaagcggaaggacagccggggaagggccaagcgatctggatctggagcaacaaacttctcactactcaaacaagcaggtgacgtggaggagaatcccgggcctactagtatggactggatttggcgcatccttttccttgtcggcgctgctaccggcgcgcattccttcgaacaggtgcaactccagcagtctggccccggactcgtgaagcctagccagacactgagcctgacctgcgccatcagcggcgatagcgtgtccggcaatagcgccacctggaactggatcagacagagcccatctcggggcctggaatggctgggccggacctactaccgcagcaagtggaaccacgactacgccgagagcgtgaagtcccggatcaccatcaaccccgacaccagcaagaaccagttctccttgcaactgaacagcgtgacccccgaggacacagccgtgtattattgcgccagaggcgacagcagctcttggtacgccttcgactattggggccagggcaccctcgtgaccgtgtctagtacgcgtatccagaaccctgatcctgccgtgtaccagctgcgggatagcaagagcagcgacaagagcgtgtgtctgttcaccgacttcgacagccagaccaacgtgtcccagagcaaggactccgacgtgtacatcaccgataagtgcgtgctggacatgcggagcatggacttcaagagcaactccgccgtggcctggtccaacaagtccgatttcgcctgcgccaacgccttcaacaacagcattatccccgaggacacattcttcccaagccccgagagcagcgactccaccgaccacgtgaagcccaaagagacagagaacaccaagcagcccagcaagagctgccacaagcccaaggccatcgtgcacaccgagaaagtgaacatgatgagcctgaccgtgctgggcctgcggatgctgttcgccaaaaccgtggccgtgaacttcctgctgaccgccaagctgttcttcctcctcaccgcc

SEQ ID NO: 6099 - DNA, 2181 bp, synthetic construct
  source 1..2181: mol_type = other DNA
atggccttaccagtgaccgccttgctcctgccgctggccttgctgctccacgccgccaggccggaccagagcgtcgtgacacagcctcctagcgtgtcagtggcccctggcaagaccgccagaatcacctgtggccggaacaacatcggcagcaagagcgtgcactggtatcagcagaagcccggccaggctcctgtgctggtggtgtacgacgacagcgacagacccagcggcatccccgagagattcagcggcagcaactccggcaataccgccaccctgaccatcagcagagtggaagccggcgacgaggccgactactactgccaagtgtgggacagcagcagcgatcacgtggtgtttggcggaggcaccaagctgacagtgctgggtctcgaggacctgaagaacgtgttcccacctgaggtggccgtgttcgagcctagcgaggccgagatcagccacacccagaaagccaccctcgtgtgcctggctaccggcttctaccccgaccatgtggaactgtcttggtgggtcaacggcaaagaggtgcacagcggcgtgtgtaccgacccccagccactgaaagaacagcccgccctgaacgacagccggtactgcctgagcagcagactgagagtgtccgccaccttctggcagaacccccggaaccacttcagatgccaggtgcagttctacggcctgagcgagaacgacgagtggacccaggacagagccaagcccgtgacccagatcgtgtctgccgaagcctggggcagagccgatgatgtgattaagatccactggcaggaaaagaagtccaacaccatcctgggcagccaggaaggcaacaccatgaagaccaacgacacctacatgaagttcagctggctgaccgtgcccgagaagtccctggacaaagaacacagatgcatcgtgcggcacgaaaacaacaagaacggcgtggaccaggaaatcatcttcccacccatcaagaccgatgtgattacaatggaccccaaggacaactgctccaaggacgccaacgataccctgctgctccagctgaccaacaccagcgcctactacatgtacttgttgctgctgctgaagtccgtggtgtacttcgccatcatcacatgctgcctgctgatggctatggtcaagcggaaggacagccggggaagggccaagcgatctggatctggagcaacaaacttctcactactcaaacaagcaggtgacgtggaggagaatcccgggcctactagtatggactggatttggcgcatccttttccttgtcggcgctgctaccggcgcgcattccttcgaagtgcaactggtgcagtctggcggaggggtcatgcggcctggcggatctctgagactgtcttgtgccgccagcggcttcaccttcgacgactacggcatgagctgggtgcgccaggcccctggaaaaggcctggaatgggtgtccggcatcaactggaatggcggcagcaccggctacgccgattctgtgcggggcagattcaccatcagccgggacaacgccaagaacagcctgtacctgcagatgaactccctgcgggccgaggacaccgccctgtactattgcgccagagagcggggctacggctaccacgaccctcacgattattggggccagggcacccttgttaccgtgtcctctacgcgtatccagaaccctgatcctgccgtgtaccagctgcgggatagcaagagcagcgacaagagcgtgtgtctgttcaccgacttcgacagccagaccaacgtgtcccagagcaaggactccgacgtgtacatcaccgataagtgcgtgctggacatgcggagcatggacttcaagagcaactccgccgtggcctggtccaacaagtccgatttcgcctgcgccaacgccttcaacaacagcattatccccgaggacacattcttcccaagccccgagagcagcgactccaccgaccacgtgaagcccaaagagacagagaacaccaagcagcccagcaagagctgccacaagcccaaggccatcgtgcacaccgagaaagtgaacatgatgagcctgaccgtgctgggcctgcggatgctgttcgccaaaaccgtggccgtgaacttcctgctgaccgccaagctgttcttcctcctcaccgcc

SEQ ID NO: 6100 - DNA, 2220 bp, synthetic construct
  source 1..2220: mol_type = other DNA
atggccttaccagtgaccgccttgctcctgccgctggccttgctgctccacgccgccaggccggaacagaaactcatcagtgaagaagacctggaattccaggctgtcgtgacacagcctcctagcgcctctggcacaccaggccagagagtgaccatctcctgtagcggcagcagcagcaacatcggcagcaacaccgtgaactggtatcagcaggtgcccggcaccgctcccaagctgctgatctacagcaacaaccagcggcccagcggcgtgcccgatagattttctggcagcaagagcggcaccagcgccagcctggctatctctggactccagtccgaggacgaggccgactactattgcgccgcctgggacgatagcctgaacggctgggtgttcggcggaggcaccaagctgacagtgctgctcgaggacctgaagaacgtgttcccacctgaggtggccgtgttcgagcctagcgaggccgagatcagccacacccagaaagccaccctcgtgtgcctggctaccggcttctaccccgaccatgtggaactgtcttggtgggtcaacggcaaagaggtgcacagcggcgtgtgtaccgacccccagccactgaaagaacagcccgccctgaacgacagccggtactgcctgagcagcagactgagagtgtccgccaccttctggcagaacccccggaaccacttcagatgccaggtgcagttctacggcctgagcgagaacgacgagtggacccaggacagagccaagcccgtgacccagatcgtgtctgccgaagcctggggcagagccgatgatgtgattaagatccactggcaggaaaagaagtccaacaccatcctgggcagccaggaaggcaacaccatgaagaccaacgacacctacatgaagttcagctggctgaccgtgcccgagaagtccctggacaaagaacacagatgcatcgtgcggcacgaaaacaacaagaacggcgtggaccaggaaatcatcttcccacccatcaagaccgatgtgattacaatggaccccaaggacaactgctccaaggacgccaacgataccctgctgctccagctgaccaacaccagcgcctactacatgtacttgttgctgctgctgaagtccgtggtgtacttcgccatcatcacatgctgcctgctgatggctatggtcaagcggaaggacagccggggaagggccaagcgatctggatctggagcaacaaacttctcactactcaaacaagcaggtgacgtggaggagaatcccgggcctactagtatggactggatttggcgcatccttttccttgtcggcgctgctaccggcgcgcattccttcgaacagatgcaactggtgcagagcggagccgaagtgaaagagcctggcgagagcctgcggatctcctgcaagggcagcggctacagcttcaccaatttctggatctcttgggtgcgccagatgcccggcaagggcctggaatggatgggcagagtggaccccggctactcctacagcacctacagccctagcttccagggccacgtgaccatcagcgccgacaagagcaccagcaccgcctacctccagtggaacagcctgaaggccagcgacaccgccatgtactactgcgccagagtgcagtacagcggctattacgattggttcgacccctggggccagggcacactcgtgacagtgtcaagcacgcgtatccagaaccctgatcctgccgtgtaccagctgcgggatagcaagagcagcgacaagagcgtgtgtctgttcaccgacttcgacagccagaccaacgtgtcccagagcaaggactccgacgtgtacatcaccgataagtgcgtgctggacatgcggagcatggacttcaagagcaactccgccgtggcctggtccaacaagtccgatttcgcctgcgccaacgccttcaacaacagcattatccccgaggacacattcttcccaagccccgagagcagcgactccaccgaccacgtgaagcccaaagagacagagaacaccaagcagcccagcaagagctgccacaagcccaaggccatcgtgcacaccgagaaagtgaacatgatgagcctgaccgtgctgggcctgcggatgctgttcgccaaaaccgtggccgtgaacttcctgctgaccgccaagctgttcttcctcctcaccgcc

SEQ ID NO: 6101 - DNA, 2202 bp, synthetic construct
  source 1..2202: mol_type = other DNA
atggccttaccagtgaccgccttgctcctgccgctggccttgctgctccacgccgccaggccggaacagaaactcatcagtgaagaagacctggaattcgacatccagatgacccagagccccagcacactgagcgccagcgtgggcgacagagtgaccatcacctgtcgggccagccagaacatcaacaagtggctggcctggtatcagcagaggcccggaaaagccccccagctgctgatctacaaggccagcagcctggaaagcggcgtgcccagcagattttctggcagcggctctggcaccgagtacaccctgaccatcagctccctccagcccgacgacttcgccacctactactgccagcagtacaacagctacgccaccttcggccagggcaccaaggtggaaatcaagagactcgaggacctgaagaacgtgttcccacctgaggtggccgtgttcgagcctagcgaggccgagatcagccacacccagaaagccaccctcgtgtgcctggctaccggcttctaccccgaccatgtggaactgtcttggtgggtcaacggcaaagaggtgcacagcggcgtgtgtaccgacccccagccactgaaagaacagcccgccctgaacgacagccggtactgcctgagcagcagactgagagtgtccgccaccttctggcagaacccccggaaccacttcagatgccaggtgcagttctacggcctgagcgagaacgacgagtggacccaggacagagccaagcccgtgacccagatcgtgtctgccgaagcctggggcagagccgatgatgtgattaagatccactggcaggaaaagaagtccaacaccatcctgggcagccaggaaggcaacaccatgaagaccaacgacacctacatgaagttcagctggctgaccgtgcccgagaagtccctggacaaagaacacagatgcatcgtgcggcacgaaaacaacaagaacggcgtggaccaggaaatcatcttcccacccatcaagaccgatgtgattacaatggaccccaaggacaactgctccaaggacgccaacgataccctgctgctccagctgaccaacaccagcgcctactacatgtacttgttgctgctgctgaagtccgtggtgtacttcgccatcatcacatgctgcctgctgatggctatggtcaagcggaaggacagccggggaagggccaagcgatctggatctggagcaacaaacttctcactactcaaacaagcaggtgacgtggaggagaatcccgggcctactagtatggactggatttggcgcatccttttccttgtcggcgctgctaccggcgcgcattccttcgaacaggtgcagctggtgcagtctggggccgaagtgaagaagcctggcgagagcctgaagatcagctgcaagggctccggctacaacttctctaacaagtggatcggctgggtgcgccagctgcctggcagaggactggaatggatcgccatcatctaccccggctacagcgacatcacctacagccccagcttccagggccgcgtgacaatcagcgccgacaccagcatcaacaccgcctacctgcactggcacagcctgaaggccagcgacaccgccatgtactactgcgtgcggcatacagccctggctggcttcgattattggggcctgggcaccctcgtgaccgtgtctagtacgcgtatccagaaccctgatcctgccgtgtaccagctgcgggatagcaagagcagcgacaagagcgtgtgtctgttcaccgacttcgacagccagaccaacgtgtcccagagcaaggactccgacgtgtacatcaccgataagtgcgtgctggacatgcggagcatggacttcaagagcaactccgccgtggcctggtccaacaagtccgatttcgcctgcgccaacgccttcaacaacagcattatccccgaggacacattcttcccaagccccgagagcagcgactccaccgaccacgtgaagcccaaagagacagagaacaccaagcagcccagcaagagctgccacaagcccaaggccatcgtgcacaccgagaaagtgaacatgatgagcctgaccgtgctgggcctgcggatgctgttcgccaaaaccgtggccgtgaacttcctgctgaccgccaagctgttcttcctcctcaccgcc

SEQ ID NO: 6102 - DNA, 2175 bp, synthetic construct
  source 1..2175: mol_type = other DNA
atggccttaccagtgaccgccttgctcctgccgctggccttgctgctccacgccgccaggccgatcgtgctgacacagagccctgcttctctggccgtgtctctgggacagagagccaccatcagctgtagagccagcgagagcgtggacaactacggcaacaccttcatgcactggtatcagcagaagcccggccagcctcctaagctgctgatctacagagccagcaacctggaaagcggcatccccgccagattttctggcagcggcagcagaaccgacttcaccctgaccatcaatcccgtggaagccgacgacgtggcaacctactactgccagcagagcaacgaggaccctcctacatttggagccggcaccaagctggaactgaaactcgaggacctgaagaacgtgttcccacctgaggtggccgtgttcgagcctagcgaggccgagatcagccacacccagaaagccaccctcgtgtgcctggctaccggcttctaccccgaccatgtggaactgtcttggtgggtcaacggcaaagaggtgcacagcggcgtgtgtaccgacccccagccactgaaagaacagcccgccctgaacgacagccggtactgcctgagcagcagactgagagtgtccgccaccttctggcagaacccccggaaccacttcagatgccaggtgcagttctacggcctgagcgagaacgacgagtggacccaggacagagccaagcccgtgacccagatcgtgtctgccgaagcctggggcagagccgatgatgtgattaagatccactggcaggaaaagaagtccaacaccatcctgggcagccaggaaggcaacaccatgaagaccaacgacacctacatgaagttcagctggctgaccgtgcccgagaagtccctggacaaagaacacagatgcatcgtgcggcacgaaaacaacaagaacggcgtggaccaggaaatcatcttcccacccatcaagaccgatgtgattacaatggaccccaaggacaactgctccaaggacgccaacgataccctgctgctccagctgaccaacaccagcgcctactacatgtacttgttgctgctgctgaagtccgtggtgtacttcgccatcatcacatgctgcctgctgatggctatggtcaagcggaaggacagccggggaagggccaagcgatctggatctggagcaacaaacttctcactactcaaacaagcaggtgacgtggaggagaatcccgggcctactagtatggactggatttggcgcatccttttccttgtcggcgctgctaccggcgcgcattccttcgaacagattcagctggtgcagtctggccccgagctgaagaaacctggcgagacagtgaagatcagctgcaaggccagcggctacatcttcaccaattacggcatgaactgggtcaagcaggcccctggcaagagcttcaagtggatgggctggatcaacacctacaccggcgagagcacatacagcgccgacttcaagggcagattcgccttcagcctggaaaccagcgccagcacagcctacctgcacatcaacgacctgaagaacgaggacaccgccacctacttttgcgccagaagcggcggctacgaccctatggattattggggccagggcaccagcgtgaccgtttcttctacgcgtatccagaaccctgatcctgccgtgtaccagctgcgggatagcaagagcagcgacaagagcgtgtgtctgttcaccgacttcgacagccagaccaacgtgtcccagagcaaggactccgacgtgtacatcaccgataagtgcgtgctggacatgcggagcatggacttcaagagcaactccgccgtggcctggtccaacaagtccgatttcgcctgcgccaacgccttcaacaacagcattatccccgaggacacattcttcccaagccccgagagcagcgactccaccgaccacgtgaagcccaaagagacagagaacaccaagcagcccagcaagagctgccacaagcccaaggccatcgtgcacaccgagaaagtgaacatgatgagcctgaccgtgctgggcctgcggatgctgttcgccaaaaccgtggccgtgaacttcctgctgaccgccaagctgttcttcctcctcaccgcc

SEQ ID NO: 6103 - DNA, 2172 bp, synthetic construct
  source 1..2172: mol_type = other DNA
atggccttaccagtgaccgccttgctcctgccgctggccttgctgctccacgccgccaggccggagatcgtgctgacacagagccctggcaccctgagcctgtctccaggcgaaagagccacactgagctgtcgggccagccagagcgtgtccaatacctacctggcctggtatcaccagaggcccggacaggctccccggctgctgatctatggcgcttctagcagagccaccggcatccccgatagattcagcggctctggcagcggcaccgacttcgccctgacaatcagctccctggaacccgaggacttcgccgtgtactactgccagcagtacagcaactcctggaccttcggccagggcaccaaggtggaaatcaagagactcgaggacctgaagaacgtgttcccacctgaggtggccgtgttcgagcctagcgaggccgagatcagccacacccagaaagccaccctcgtgtgcctggctaccggcttctaccccgaccatgtggaactgtcttggtgggtcaacggcaaagaggtgcacagcggcgtgtgtaccgacccccagccactgaaagaacagcccgccctgaacgacagccggtactgcctgagcagcagactgagagtgtccgccaccttctggcagaacccccggaaccacttcagatgccaggtgcagttctacggcctgagcgagaacgacgagtggacccaggacagagccaagcccgtgacccagatcgtgtctgccgaagcctggggcagagccgatgatgtgattaagatccactggcaggaaaagaagtccaacaccatcctgggcagccaggaaggcaacaccatgaagaccaacgacacctacatgaagttcagctggctgaccgtgcccgagaagtccctggacaaagaacacagatgcatcgtgcggcacgaaaacaacaagaacggcgtggaccaggaaatcatcttcccacccatcaagaccgatgtgattacaatggaccccaaggacaactgctccaaggacgccaacgataccctgctgctccagctgaccaacaccagcgcctactacatgtacttgttgctgctgctgaagtccgtggtgtacttcgccatcatcacatgctgcctgctgatggctatggtcaagcggaaggacagccggggaagggccaagcgatctggatctggagcaacaaacttctcactactcaaacaagcaggtgacgtggaggagaatcccgggcctactagtatggactggatttggcgcatccttttccttgtcggcgctgctaccggcgcgcattccttcgaacaggtgcaactggtggaatctggcgggggagtggtgcagcctggcagaagcctgagactgtcttgtgccgccagcggcttcaccttcagcagctacgacatgcactgggtgcgccaggcccctggcaaaggactggaatgggtggccgtgatctcctacgacggcaccaacgagtattacgccgacagcgtgaagggccggttcaccatctccagagacaccagcaagaacaccctgtacctccagatgaacagcctgcgggccgaggacacagccgtgtattattgcgccagagagcggtacttcgactggtccttcgactactggggccagggaaccctggtgtccgtgtctagtacgcgtatccagaaccctgatcctgccgtgtaccagctgcgggatagcaagagcagcgacaagagcgtgtgtctgttcaccgacttcgacagccagaccaacgtgtcccagagcaaggactccgacgtgtacatcaccgataagtgcgtgctggacatgcggagcatggacttcaagagcaactccgccgtggcctggtccaacaagtccgatttcgcctgcgccaacgccttcaacaacagcattatccccgaggacacattcttcccaagccccgagagcagcgactccaccgaccacgtgaagcccaaagagacagagaacaccaagcagcccagcaagagctgccacaagcccaaggccatcgtgcacaccgagaaagtgaacatgatgagcctgaccgtgctgggcctgcggatgctgttcgccaaaaccgtggccgtgaacttcctgctgaccgccaagctgttcttcctcctcaccgcc

SEQ ID NO: 6104 - DNA, 2169 bp, synthetic construct
  source 1..2169: mol_type = other DNA
atggccttaccagtgaccgccttgctcctgccgctggccttgctgctccacgccgccaggccggagctgacacaggaccctgctgtgtctgttgccctgggccagacagtgcggattacctgtcaaggcgacagcctgagaagcaactacgccaactggtatcagcagaagcccggacaggctcccgtgctggttatctacggccagaacaacagacccagcggcatccccgatagattcagcggctctagctctggcaataccgccagcctgacaatcactggcgctcaggctgccgatgaggccgactactactgcgatagcagagtgtccaccggcaatcacgtggtgtttggcggcggaacaaagctgacagtgctcggacaactcgaggacctgaagaacgtgttcccacctgaggtggccgtgttcgagcctagcgaggccgagatcagccacacccagaaagccaccctcgtgtgcctggctaccggcttctaccccgaccatgtggaactgtcttggtgggtcaacggcaaagaggtgcacagcggcgtgtgtaccgacccccagccactgaaagaacagcccgccctgaacgacagccggtactgcctgagcagcagactgagagtgtccgccaccttctggcagaacccccggaaccacttcagatgccaggtgcagttctacggcctgagcgagaacgacgagtggacccaggacagagccaagcccgtgacccagatcgtgtctgccgaagcctggggcagagccgatgatgtgattaagatccactggcaggaaaagaagtccaacaccatcctgggcagccaggaaggcaacaccatgaagaccaacgacacctacatgaagttcagctggctgaccgtgcccgagaagtccctggacaaagaacacagatgcatcgtgcggcacgaaaacaacaagaacggcgtggaccaggaaatcatcttcccacccatcaagaccgatgtgattacaatggaccccaaggacaactgctccaaggacgccaacgataccctgctgctccagctgaccaacaccagcgcctactacatgtacttgttgctgctgctgaagtccgtggtgtacttcgccatcatcacatgctgcctgctgatggctatggtcaagcggaaggacagccggggaagggccaagcgatctggatctggagcaacaaacttctcactactcaaacaagcaggtgacgtggaggagaatcccgggcctactagtatggactggatttggcgcatccttttccttgtcggcgctgctaccggcgcgcattccttcgaagaagttcagctggtgcagagcggagccgaagtgaagaaacctggggcctctgtgaaggtgtcctgcaaggcttccggctacacctttaccagctacgccatgcactgggtccgacaggcacctggacaacggcttgaatggatgggctggatcaacgccggcaacggcaacaccaagtacagccagaaattccagggccgcgtgaccatcaccagagatacaagcgccagcaccgcctacatggaactgtctagcctgagatccgaggacaccgccgtgtactactgtgccagagacatcagctacggcagcttcgactattggggccagggcacactggtcaccgttagctctacgcgtatccagaaccctgatcctgccgtgtaccagctgcgggatagcaagagcagcgacaagagcgtgtgtctgttcaccgacttcgacagccagaccaacgtgtcccagagcaaggactccgacgtgtacatcaccgataagtgcgtgctggacatgcggagcatggacttcaagagcaactccgccgtggcctggtccaacaagtccgatttcgcctgcgccaacgccttcaacaacagcattatccccgaggacacattcttcccaagccccgagagcagcgactccaccgaccacgtgaagcccaaagagacagagaacaccaagcagcccagcaagagctgccacaagcccaaggccatcgtgcacaccgagaaagtgaacatgatgagcctgaccgtgctgggcctgcggatgctgttcgccaaaaccgtggccgtgaacttcctgctgaccgccaagctgttcttcctcctcaccgcc

SEQ ID NO: 6105 - DNA, 2175 bp, synthetic construct
  source 1..2175: mol_type = other DNA
atggccttaccagtgaccgccttgctcctgccgctggccttgctgctccacgccgccaggccggacatcgtgctgacacagacaccagccacactgagcgtgacacctggcgattctgtgtccctgagctgtagagccagccagagcatcagcaacaacctgcactggtatcagcagaagtcccacgagagccccagactgctgattaagaacgccagccagtctatcagcggcatccccagcaagtttagcggctctggcagcggcaccgacttcaccctgagaatcaacagcgtggaaaccgaggacttcgggatgtacttctgccagcagagcaatagctggccctacacatttggctccggcaccaagctggaaatcaaactcgaggacctgaagaacgtgttcccacctgaggtggccgtgttcgagcctagcgaggccgagatcagccacacccagaaagccaccctcgtgtgcctggctaccggcttctaccccgaccatgtggaactgtcttggtgggtcaacggcaaagaggtgcacagcggcgtgtgtaccgacccccagccactgaaagaacagcccgccctgaacgacagccggtactgcctgagcagcagactgagagtgtccgccaccttctggcagaacccccggaaccacttcagatgccaggtgcagttctacggcctgagcgagaacgacgagtggacccaggacagagccaagcccgtgacccagatcgtgtctgccgaagcctggggcagagccgatgatgtgattaagatccactggcaggaaaagaagtccaacaccatcctgggcagccaggaaggcaacaccatgaagaccaacgacacctacatgaagttcagctggctgaccgtgcccgagaagtccctggacaaagaacacagatgcatcgtgcggcacgaaaacaacaagaacggcgtggaccaggaaatcatcttcccacccatcaagaccgatgtgattacaatggaccccaaggacaactgctccaaggacgccaacgataccctgctgctccagctgaccaacaccagcgcctactacatgtacttgttgctgctgctgaagtccgtggtgtacttcgccatcatcacatgctgcctgctgatggctatggtcaagcggaaggacagccggggaagggccaagcgatctggatctggagcaacaaacttctcactactcaaacaagcaggtgacgtggaggagaatcccgggcctactagtatggactggatttggcgcatccttttccttgtcggcgctgctaccggcgcgcattccttcgaacaagtgaagctgcaacagagcggacccgagctggttaagccaggcgcttccgtgaagattagctgcaaggccagcggctacagcttcaccggctactacatgcactgggtcaagcagagccacggcaacatcctggactggatcggctacatctacccctacaacggcgtgtccagctacaaccagaagttcaagggcaaagccactctgaccgtggacaagagcagcagcaccgcctacatggaactgagaagcctgaccagcgaggacagcgccgtgtactattgtgccagagagcggggcctgtaccagctcagagcaatggattattggggccagggcaccagcgtgaccgtttcttctacgcgtatccagaaccctgatcctgccgtgtaccagctgcgggatagcaagagcagcgacaagagcgtgtgtctgttcaccgacttcgacagccagaccaacgtgtcccagagcaaggactccgacgtgtacatcaccgataagtgcgtgctggacatgcggagcatggacttcaagagcaactccgccgtggcctggtccaacaagtccgatttcgcctgcgccaacgccttcaacaacagcattatccccgaggacacattcttcccaagccccgagagcagcgactccaccgaccacgtgaagcccaaagagacagagaacaccaagcagcccagcaagagctgccacaagcccaaggccatcgtgcacaccgagaaagtgaacatgatgagcctgaccgtgctgggcctgcggatgctgttcgccaaaaccgtggccgtgaacttcctgctgaccgccaagctgttcttcctcctcaccgcc

SEQ ID NO: 6106 - DNA, 2148 bp, synthetic construct
  source 1..2148: mol_type = other DNA
atggccttaccagtgaccgccttgctcctgccgctggccttgctgctccacgccgccaggccggacatcgtgatgacacagacccctgccatcatgagcgcctctccaggccagaaagtgaccatcacatgtagcgccagcagcagcgtgaactacatgcactggtatcagcagaagctgggcagcagccccaagctgtggatctacgataccagcaaactggcccctggcgtgccagccagattttctggttctggcagcggcaccagctacagcctgacaatcagcagcatggaagccgaggatgccgccagctacttctgccatcagtggtctagctacccctacacctttggctccggcaccaagctggaaatcaaactcgaggacctgaagaacgtgttcccacctgaggtggccgtgttcgagcctagcgaggccgagatcagccacacccagaaagccaccctcgtgtgcctggctaccggcttctaccccgaccatgtggaactgtcttggtgggtcaacggcaaagaggtgcacagcggcgtgtgtaccgacccccagccactgaaagaacagcccgccctgaacgacagccggtactgcctgagcagcagactgagagtgtccgccaccttctggcagaacccccggaaccacttcagatgccaggtgcagttctacggcctgagcgagaacgacgagtggacccaggacagagccaagcccgtgacccagatcgtgtctgccgaagcctggggcagagccgatgatgtgattaagatccactggcaggaaaagaagtccaacaccatcctgggcagccaggaaggcaacaccatgaagaccaacgacacctacatgaagttcagctggctgaccgtgcccgagaagtccctggacaaagaacacagatgcatcgtgcggcacgaaaacaacaagaacggcgtggaccaggaaatcatcttcccacccatcaagaccgatgtgattacaatggaccccaaggacaactgctccaaggacgccaacgataccctgctgctccagctgaccaacaccagcgcctactacatgtacttgttgctgctgctgaagtccgtggtgtacttcgccatcatcacatgctgcctgctgatggctatggtcaagcggaaggacagccggggaagggccaagcgatctggatctggagcaacaaacttctcactactcaaacaagcaggtgacgtggaggagaatcccgggcctactagtatggactggatttggcgcatccttttccttgtcggcgctgctaccggcgcgcattccttcgaagaagttcagctccaagagtctggccccgacctggtcaagcctagccaaagcctgagcctgacctgtaccgtgaccggctacagcatcacaagcggctatggatggcactggatcagacagttccccggcaacaaactggaatggatgggctacatccactacagcggcagcaccacctacaatcccagcctgaagtcccggatcagcatcagcagagacaccagcaagaaccagttcttcctgcaactgaacagcgtgaccaccgaggacaccgccacctactattgtgctcggagcctgagatattggggccagggcacaaccctgaccgtgtcatctacgcgtatccagaaccctgatcctgccgtgtaccagctgcgggatagcaagagcagcgacaagagcgtgtgtctgttcaccgacttcgacagccagaccaacgtgtcccagagcaaggactccgacgtgtacatcaccgataagtgcgtgctggacatgcggagcatggacttcaagagcaactccgccgtggcctggtccaacaagtccgatttcgcctgcgccaacgccttcaacaacagcattatccccgaggacacattcttcccaagccccgagagcagcgactccaccgaccacgtgaagcccaaagagacagagaacaccaagcagcccagcaagagctgccacaagcccaaggccatcgtgcacaccgagaaagtgaacatgatgagcctgaccgtgctgggcctgcggatgctgttcgccaaaaccgtggccgtgaacttcctgctgaccgccaagctgttcttcctcctcaccgcc

SEQ ID NO: 6107 - DNA, 2157 bp, synthetic construct
  source 1..2157: mol_type = other DNA
atggccttaccagtgaccgccttgctcctgccgctggccttgctgctccacgccgccaggccggacatccagatgacacagagccctagcagcctgtctgccagcgtgggagacagagtgaccatcacctgtagcgccaccagcagcatcagctacatgcactggtatcagcagaagcccggcaaggcccctaaaggctggatctacgataccagcaaactggcccacggcgtgcccagcagattttctggttctggcagcggcaccgacttcaccctgacaatatctagcctccagcctgaggacttcgccacctactactgccaccagagaagaagctaccccttcaccttcggccagggcaccaaggtggaaatcaaactcgaggacctgaagaacgtgttcccacctgaggtggccgtgttcgagcctagcgaggccgagatcagccacacccagaaagccaccctcgtgtgcctggctaccggcttctaccccgaccatgtggaactgtcttggtgggtcaacggcaaagaggtgcacagcggcgtgtgtaccgacccccagccactgaaagaacagcccgccctgaacgacagccggtactgcctgagcagcagactgagagtgtccgccaccttctggcagaacccccggaaccacttcagatgccaggtgcagttctacggcctgagcgagaacgacgagtggacccaggacagagccaagcccgtgacccagatcgtgtctgccgaagcctggggcagagccgatgatgtgattaagatccactggcaggaaaagaagtccaacaccatcctgggcagccaggaaggcaacaccatgaagaccaacgacacctacatgaagttcagctggctgaccgtgcccgagaagtccctggacaaagaacacagatgcatcgtgcggcacgaaaacaacaagaacggcgtggaccaggaaatcatcttcccacccatcaagaccgatgtgattacaatggaccccaaggacaactgctccaaggacgccaacgataccctgctgctccagctgaccaacaccagcgcctactacatgtacttgttgctgctgctgaagtccgtggtgtacttcgccatcatcacatgctgcctgctgatggctatggtcaagcggaaggacagccggggaagggccaagcgatctggatctggagcaacaaacttctcactactcaaacaagcaggtgacgtggaggagaatcccgggcctactagtatggactggatttggcgcatccttttccttgtcggcgctgctaccggcgcgcattccttcgaagaagtgcaactggttcagagcggagccgaagtgaagaaacctggggcctctgtgaaggtgtcctgcaaggcttccggctacacctttaccaatttctggattcactgggtccgacaggctccaggccaaggactggaatggatcggagagatcgaccccagcgacagctacaccaactacaaccagaaattcaaaggccgggtcaccatcaccagagacaccagcacaagcaccgcctacctggaactgagcagcctgagaagcgaggacaccgccgtgtactactgcgccagggaaatcaccaccgtggattattggggccagggaaccctggtcaccgtgtcatctacgcgtatccagaaccctgatcctgccgtgtaccagctgcgggatagcaagagcagcgacaagagcgtgtgtctgttcaccgacttcgacagccagaccaacgtgtcccagagcaaggactccgacgtgtacatcaccgataagtgcgtgctggacatgcggagcatggacttcaagagcaactccgccgtggcctggtccaacaagtccgatttcgcctgcgccaacgccttcaacaacagcattatccccgaggacacattcttcccaagccccgagagcagcgactccaccgaccacgtgaagcccaaagagacagagaacaccaagcagcccagcaagagctgccacaagcccaaggccatcgtgcacaccgagaaagtgaacatgatgagcctgaccgtgctgggcctgcggatgctgttcgccaaaaccgtggccgtgaacttcctgctgaccgccaagctgttcttcctcctcaccgcc

SEQ ID NO: 6108 - DNA, 2178 bp, synthetic construct
  source 1..2178: mol_type = other DNA
atggccttaccagtgaccgccttgctcctgccgctggccttgctgctccacgccgccaggccggacatccagatgacacagagccctagcagcctgtctgccagcgtgggagacagagtgaccatcacatgcaaggccagccagggcttcaacaaatacgtggcctggtatcagcagaagcccggcaaggctcctaagctgctgatctactacaccagcacactccagcctggcgtgcccagcagattttctggctctggcagcggcagagactacaccctgacaatatccagcctccagccagaggacttcgccacctactactgtctccagtacggcaacctgctgtacgcctttggacagggcaccaaggtggaaatcaagagactcgaggacctgaagaacgtgttcccacctgaggtggccgtgttcgagcctagcgaggccgagatcagccacacccagaaagccaccctcgtgtgcctggctaccggcttctaccccgaccatgtggaactgtcttggtgggtcaacggcaaagaggtgcacagcggcgtgtgtaccgacccccagccactgaaagaacagcccgccctgaacgacagccggtactgcctgagcagcagactgagagtgtccgccaccttctggcagaacccccggaaccacttcagatgccaggtgcagttctacggcctgagcgagaacgacgagtggacccaggacagagccaagcccgtgacccagatcgtgtctgccgaagcctggggcagagccgatgatgtgattaagatccactggcaggaaaagaagtccaacaccatcctgggcagccaggaaggcaacaccatgaagaccaacgacacctacatgaagttcagctggctgaccgtgcccgagaagtccctggacaaagaacacagatgcatcgtgcggcacgaaaacaacaagaacggcgtggaccaggaaatcatcttcccacccatcaagaccgatgtgattacaatggaccccaaggacaactgctccaaggacgccaacgataccctgctgctccagctgaccaacaccagcgcctactacatgtacttgttgctgctgctgaagtccgtggtgtacttcgccatcatcacatgctgcctgctgatggctatggtcaagcggaaggacagccggggaagggccaagcgatctggatctggagcaacaaacttctcactactcaaacaagcaggtgacgtggaggagaatcccgggcctactagtatggactggatttggcgcatccttttccttgtcggcgctgctaccggcgcgcattccttcgaagaagttcagcttgtgcagagcggagccgaagtgaagaaacctggggcctctgtgaaggtgtcctgcaaagccagcggctacacctttaccagctactggatcggctgggtccgacaggctcctggacaaggactggaatggatcggcgacatctatcccggcggaggctacaccaactacaacgagaagttcaagggccgcgtgacaatcaccagagacacctctacaagcaccgcctacctggaactgagcagcctgagaagcgaggacaccgccgtgtactactgcgccagactggatggcagcagctacagaggcgctatggattcttggggccagggcacactggtcaccgtttcttctacgcgtatccagaaccctgatcctgccgtgtaccagctgcgggatagcaagagcagcgacaagagcgtgtgtctgttcaccgacttcgacagccagaccaacgtgtcccagagcaaggactccgacgtgtacatcaccgataagtgcgtgctggacatgcggagcatggacttcaagagcaactccgccgtggcctggtccaacaagtccgatttcgcctgcgccaacgccttcaacaacagcattatccccgaggacacattcttcccaagccccgagagcagcgactccaccgaccacgtgaagcccaaagagacagagaacaccaagcagcccagcaagagctgccacaagcccaaggccatcgtgcacaccgagaaagtgaacatgatgagcctgaccgtgctgggcctgcggatgctgttcgccaaaaccgtggccgtgaacttcctgctgaccgccaagctgttcttcctcctcaccgcc

SEQ ID NO: 6109 - DNA, 2166 bp, synthetic construct
  source 1..2166: mol_type = other DNA
atggccttaccagtgaccgccttgctcctgccgctggccttgctgctccacgccgccaggccggacatccagatgacacagagccctagcagcctgtctgccagcgtgggagacagagtgaccatcacctgtagagccagccaggacatccggtactacctgaactggtatcagcagaagcccggcaaggcccctaagctgctgatctatgtggcctccagcctccagagcggagtgccttctagattttctggcagcggctccggcaccgagtttaccctgacagtgtctagcttgcagcccgaggacttcgccacctactactgcctgcaagtgtacagcacccctcggacctttggacagggcaccaaggtggaaatcaaactcgaggacctgaagaacgtgttcccacctgaggtggccgtgttcgagcctagcgaggccgagatcagccacacccagaaagccaccctcgtgtgcctggctaccggcttctaccccgaccatgtggaactgtcttggtgggtcaacggcaaagaggtgcacagcggcgtgtgtaccgacccccagccactgaaagaacagcccgccctgaacgacagccggtactgcctgagcagcagactgagagtgtccgccaccttctggcagaacccccggaaccacttcagatgccaggtgcagttctacggcctgagcgagaacgacgagtggacccaggacagagccaagcccgtgacccagatcgtgtctgccgaagcctggggcagagccgatgatgtgattaagatccactggcaggaaaagaagtccaacaccatcctgggcagccaggaaggcaacaccatgaagaccaacgacacctacatgaagttcagctggctgaccgtgcccgagaagtccctggacaaagaacacagatgcatcgtgcggcacgaaaacaacaagaacggcgtggaccaggaaatcatcttcccacccatcaagaccgatgtgattacaatggaccccaaggacaactgctccaaggacgccaacgataccctgctgctccagctgaccaacaccagcgcctactacatgtacttgttgctgctgctgaagtccgtggtgtacttcgccatcatcacatgctgcctgctgatggctatggtcaagcggaaggacagccggggaagggccaagcgatctggatctggagcaacaaacttctcactactcaaacaagcaggtgacgtggaggagaatcccgggcctactagtatggactggatttggcgcatccttttccttgtcggcgctgctaccggcgcgcattccttcgaagaagtgcagcttgttgaatctggcggcggactggctaagcctggcggatctctgagactgtcttgtgccgccagcggcttccggttcaccttcaacaactactacatggactgggtccgacaggcccctggacaaggacttgaatgggtgtccagaatcagcagcagcggcgaccctacttggtacgccgattctgtgaagggcagattcaccatcagcagagagaacgccaagaacaccctgttcctccagatgaactccctgagagccgaggacaccgccgtgtactattgtgcctctctgaccaccggcagcgattcttggggacagggcgtgctggttaccgtgtcatctacgcgtatccagaaccctgatcctgccgtgtaccagctgcgggatagcaagagcagcgacaagagcgtgtgtctgttcaccgacttcgacagccagaccaacgtgtcccagagcaaggactccgacgtgtacatcaccgataagtgcgtgctggacatgcggagcatggacttcaagagcaactccgccgtggcctggtccaacaagtccgatttcgcctgcgccaacgccttcaacaacagcattatccccgaggacacattcttcccaagccccgagagcagcgactccaccgaccacgtgaagcccaaagagacagagaacaccaagcagcccagcaagagctgccacaagcccaaggccatcgtgcacaccgagaaagtgaacatgatgagcctgaccgtgctgggcctgcggatgctgttcgccaaaaccgtggccgtgaacttcctgctgaccgccaagctgttcttcctcctcaccgcc

SEQ ID NO: 6110 - DNA, 2169 bp, synthetic construct
  source 1..2169: mol_type = other DNA
atggccttaccagtgaccgccttgctcctgccgctggccttgctgctccacgccgccaggccggagatcgtgatgacacagagccccgccacactgagtgtgtctccaggcgaaagagccacactgtcctgtagagccagccagagcgtgtccagaaacctggcctggtatcagcagaagcctggacaggctccccggctgttgatctacggcgcttctacaagagccaccggcattcccgccagattttctggctctggcagcggcaccgagttcaccctgacaatcggaagcctccagagcgaggacttcgccgtgtactactgccagcagtacaagacctggcctcggacctttggacagggcaccaacgtggaaatcaaactcgaggacctgaagaacgtgttcccacctgaggtggccgtgttcgagcctagcgaggccgagatcagccacacccagaaagccaccctcgtgtgcctggctaccggcttctaccccgaccatgtggaactgtcttggtgggtcaacggcaaagaggtgcacagcggcgtgtgtaccgacccccagccactgaaagaacagcccgccctgaacgacagccggtactgcctgagcagcagactgagagtgtccgccaccttctggcagaacccccggaaccacttcagatgccaggtgcagttctacggcctgagcgagaacgacgagtggacccaggacagagccaagcccgtgacccagatcgtgtctgccgaagcctggggcagagccgatgatgtgattaagatccactggcaggaaaagaagtccaacaccatcctgggcagccaggaaggcaacaccatgaagaccaacgacacctacatgaagttcagctggctgaccgtgcccgagaagtccctggacaaagaacacagatgcatcgtgcggcacgaaaacaacaagaacggcgtggaccaggaaatcatcttcccacccatcaagaccgatgtgattacaatggaccccaaggacaactgctccaaggacgccaacgataccctgctgctccagctgaccaacaccagcgcctactacatgtacttgttgctgctgctgaagtccgtggtgtacttcgccatcatcacatgctgcctgctgatggctatggtcaagcggaaggacagccggggaagggccaagcgatctggatctggagcaacaaacttctcactactcaaacaagcaggtgacgtggaggagaatcccgggcctactagtatggactggatttggcgcatccttttccttgtcggcgctgctaccggcgcgcattccttcgaacaagttcagctgcaacaatggggagccggcctgctgaagcctagcgaaacactgtctctgacctgcgccgtgttcggcggctctttcagcggctactactggtcctggatcagacagcctcctggcaaaggactggaatggatcggcgagatcaaccaccggggcaacaccaacgacaaccccagcctgaaaagcagagtgaccatcagcgtggacaccagcaagaaccagttcgccctgaagctgagcagcgtgacagccgctgataccgccgtgtattattgcgccagagagcggggctacacctacggcaatttcgatcactggggccagggcaccctggtcacagtttcttctacgcgtatccagaaccctgatcctgccgtgtaccagctgcgggatagcaagagcagcgacaagagcgtgtgtctgttcaccgacttcgacagccagaccaacgtgtcccagagcaaggactccgacgtgtacatcaccgataagtgcgtgctggacatgcggagcatggacttcaagagcaactccgccgtggcctggtccaacaagtccgatttcgcctgcgccaacgccttcaacaacagcattatccccgaggacacattcttcccaagccccgagagcagcgactccaccgaccacgtgaagcccaaagagacagagaacaccaagcagcccagcaagagctgccacaagcccaaggccatcgtgcacaccgagaaagtgaacatgatgagcctgaccgtgctgggcctgcggatgctgttcgccaaaaccgtggccgtgaacttcctgctgaccgccaagctgttcttcctcctcaccgcc

SEQ ID NO: 6111 - DNA, 2172 bp, synthetic construct
  source 1..2172: mol_type = other DNA
atggccttaccagtgaccgccttgctcctgccgctggccttgctgctccacgccgccaggccggagatcgtgatgacccctagcagcgccacactgagtgtgtctccaggcgaaagagccacactgtcctgtagagccagccagagcgtgtccagaaacctggcctggtatcagcagaagcctggacaggctccccggctgttgatctacggcgcttctacaagagccaccggcattcccgccagattttctggctctggcagcggcaccgagttcaccctgacaatctctagcctccagagcgaggacttcgccgtgtactactgccaccagtacagcaactggatgtgcagcttcggccagggcaccaagctggaaatcaaactcgaggacctgaagaacgtgttcccacctgaggtggccgtgttcgagcctagcgaggccgagatcagccacacccagaaagccaccctcgtgtgcctggctaccggcttctaccccgaccatgtggaactgtcttggtgggtcaacggcaaagaggtgcacagcggcgtgtgtaccgacccccagccactgaaagaacagcccgccctgaacgacagccggtactgcctgagcagcagactgagagtgtccgccaccttctggcagaacccccggaaccacttcagatgccaggtgcagttctacggcctgagcgagaacgacgagtggacccaggacagagccaagcccgtgacccagatcgtgtctgccgaagcctggggcagagccgatgatgtgattaagatccactggcaggaaaagaagtccaacaccatcctgggcagccaggaaggcaacaccatgaagaccaacgacacctacatgaagttcagctggctgaccgtgcccgagaagtccctggacaaagaacacagatgcatcgtgcggcacgaaaacaacaagaacggcgtggaccaggaaatcatcttcccacccatcaagaccgatgtgattacaatggaccccaaggacaactgctccaaggacgccaacgataccctgctgctccagctgaccaacaccagcgcctactacatgtacttgttgctgctgctgaagtccgtggtgtacttcgccatcatcacatgctgcctgctgatggctatggtcaagcggaaggacagccggggaagggccaagcgatctggatctggagcaacaaacttctcactactcaaacaagcaggtgacgtggaggagaatcccgggcctactagtatggactggatttggcgcatccttttccttgtcggcgctgctaccggcgcgcattccttcgaagaagttcagctccttgagtcaggtggcggcctggttcaacctggcggatctctgagactgagctgtgccgccagcggcttcacctttagcagatacgccatgaactgggtccgacaggcccctggcaaaggactggaatgggtgtccggcatctctggaagcggcggcagaacctactacgccgattctgtgaagggcagattcaccatcagccgggacaacagcaagaacaccctgtacctccagatgaacagcctgagagccgaggacacagccgtgtattattgcgccaaggaccgggacttttggagcggcccttttgactattggggccagggaaccctggtcaccgttagctctacgcgtatccagaaccctgatcctgccgtgtaccagctgcgggatagcaagagcagcgacaagagcgtgtgtctgttcaccgacttcgacagccagaccaacgtgtcccagagcaaggactccgacgtgtacatcaccgataagtgcgtgctggacatgcggagcatggacttcaagagcaactccgccgtggcctggtccaacaagtccgatttcgcctgcgccaacgccttcaacaacagcattatccccgaggacacattcttcccaagccccgagagcagcgactccaccgaccacgtgaagcccaaagagacagagaacaccaagcagcccagcaagagctgccacaagcccaaggccatcgtgcacaccgagaaagtgaacatgatgagcctgaccgtgctgggcctgcggatgctgttcgccaaaaccgtggccgtgaacttcctgctgaccgccaagctgttcttcctcctcaccgcc

SEQ ID NO: 6112 - DNA, 2187 bp, synthetic construct
  source 1..2187: mol_type = other DNA
atggccttaccagtgaccgccttgctcctgccgctggccttgctgctccacgccgccaggccggacatccagatgacccagagccccagcagcctgtctgccagcgtgggcgacagagtgaccatcacatgcaaggccagcaagaacatcagaagctacctggcctggtatcagcagaagcccggcaaggcccccaagctgctgatctacagcggcagcacactgcacagcggcgtgcccagcagattttccggctctggcagcggcaccgacttcaccctgaccatctctagcctccagcccgaggacttcgccacctactactgccagcagcaccacgagtaccccctgacattcggccagggcaccaaggtggaaatcaagagactcgaggacctgaagaacgtgttcccacctgaggtggccgtgttcgagcctagcgaggccgagatcagccacacccagaaagccaccctcgtgtgcctggctaccggcttctaccccgaccatgtggaactgtcttggtgggtcaacggcaaagaggtgcacagcggcgtgtgtaccgacccccagccactgaaagaacagcccgccctgaacgacagccggtactgcctgagcagcagactgagagtgtccgccaccttctggcagaacccccggaaccacttcagatgccaggtgcagttctacggcctgagcgagaacgacgagtggacccaggacagagccaagcccgtgacccagatcgtgtctgccgaagcctggggcagagccgatgatgtgattaagatccactggcaggaaaagaagtccaacaccatcctgggcagccaggaaggcaacaccatgaagaccaacgacacctacatgaagttcagctggctgaccgtgcccgagaagtccctggacaaagaacacagatgcatcgtgcggcacgaaaacaacaagaacggcgtggaccaggaaatcatcttcccacccatcaagaccgatgtgattacaatggaccccaaggacaactgctccaaggacgccaacgataccctgctgctccagctgaccaacaccagcgcctactacatgtacttgttgctgctgctgaagtccgtggtgtacttcgccatcatcacatgctgcctgctgatggctatggtcaagcggaaggacagccggggaagggccaagcgatctggatctggagcaacaaacttctcactactcaaacaagcaggtgacgtggaggagaatcccgggcctactagtatggactggatttggcgcatccttttccttgtcggcgctgctaccggcgcgcattccttcgaacaggtgcaactccaggaatctggccccggactcgtgaagcccagcgagacactgagcctgacctgtaccgtgtccggctacaccatcaccagcggctacgactggtcctggatcagacagcctcctggcaagggcctggaatggatcggctacatcaactacggcggctccaccaactacaagcccagcctgggaagccgcgtgacaatcagcgtggacacctccaagaaccagttcagcctgaagctgagcagcgtgacagccgccgataccgccgtgtactactgcgcccggtacaacgagtacaagagctacatctacgattggtacttcgacttctggggccagggaaccctcgtgaccgtgtctagtacgcgtatccagaaccctgatcctgccgtgtaccagctgcgggatagcaagagcagcgacaagagcgtgtgtctgttcaccgacttcgacagccagaccaacgtgtcccagagcaaggactccgacgtgtacatcaccgataagtgcgtgctggacatgcggagcatggacttcaagagcaactccgccgtggcctggtccaacaagtccgatttcgcctgcgccaacgccttcaacaacagcattatccccgaggacacattcttcccaagccccgagagcagcgactccaccgaccacgtgaagcccaaagagacagagaacaccaagcagcccagcaagagctgccacaagcccaaggccatcgtgcacaccgagaaagtgaacatgatgagcctgaccgtgctgggcctgcggatgctgttcgccaaaaccgtggccgtgaacttcctgctgaccgccaagctgttcttcctcctcaccgcc

SEQ ID NO: 6113 - DNA, 2193 bp, synthetic construct
  source 1..2193: mol_type = other DNA
atggccttaccagtgaccgccttgctcctgccgctggccttgctgctccacgccgccaggccgcagtctgtggtcacacagcctccatccgtgtctgctgcccctggacagaaagtgaccatctcctgtagcggcagcagcagcaacatcggcaacaactacgtgtcctggtatcagcagctccccggcacagctcccaaactgctgatctacgacaacaacaagcggcccagcggcatccccgatagattttctggcagcaagagcggcaccagcgccacactgggaattaccggacttcagacaggcgacgaggccgactactactgtggcacatgggatggcagcctgtacaccatgcttttcggcggaggcaccaagctgacagtgcttctcgaggacctgaagaacgtgttcccacctgaggtggccgtgttcgagcctagcgaggccgagatcagccacacccagaaagccaccctcgtgtgcctggctaccggcttctaccccgaccatgtggaactgtcttggtgggtcaacggcaaagaggtgcacagcggcgtgtgtaccgacccccagccactgaaagaacagcccgccctgaacgacagccggtactgcctgagcagcagactgagagtgtccgccaccttctggcagaacccccggaaccacttcagatgccaggtgcagttctacggcctgagcgagaacgacgagtggacccaggacagagccaagcccgtgacccagatcgtgtctgccgaagcctggggcagagccgatgatgtgattaagatccactggcaggaaaagaagtccaacaccatcctgggcagccaggaaggcaacaccatgaagaccaacgacacctacatgaagttcagctggctgaccgtgcccgagaagtccctggacaaagaacacagatgcatcgtgcggcacgaaaacaacaagaacggcgtggaccaggaaatcatcttcccacccatcaagaccgatgtgattacaatggaccccaaggacaactgctccaaggacgccaacgataccctgctgctccagctgaccaacaccagcgcctactacatgtacttgttgctgctgctgaagtccgtggtgtacttcgccatcatcacatgctgcctgctgatggctatggtcaagcggaaggacagccggggaagggccaagcgatctggatctggagcaacaaacttctcactactcaaacaagcaggtgacgtggaggagaatcccgggcctactagtatggactggatttggcgcatccttttccttgtcggcgctgctaccggcgcgcattccttcgaagaagtgcaactggtggaatctggcggcggactggttaagcctggcggatctctgagactgtcttgtgccgccagcggcttcaccttcagcaatgcctggatgagctgggttcgacaggcccctggaaaaggactggaatgggtcggattcatccggtccaaagcctacggcggcaccacagaatatgccgcctctgtgaagggcagattcaccatcagccgggacgacagcaagtctatcgcctacctccagatgaacaacctgaaaaccgaggacaccgccgtgtactactgcgccagagatggcctgtacagcagctcttggtacgacagcgattactggggccagggcacactggtcacagtgtcatctacgcgtatccagaaccctgatcctgccgtgtaccagctgcgggatagcaagagcagcgacaagagcgtgtgtctgttcaccgacttcgacagccagaccaacgtgtcccagagcaaggactccgacgtgtacatcaccgataagtgcgtgctggacatgcggagcatggacttcaagagcaactccgccgtggcctggtccaacaagtccgatttcgcctgcgccaacgccttcaacaacagcattatccccgaggacacattcttcccaagccccgagagcagcgactccaccgaccacgtgaagcccaaagagacagagaacaccaagcagcccagcaagagctgccacaagcccaaggccatcgtgcacaccgagaaagtgaacatgatgagcctgaccgtgctgggcctgcggatgctgttcgccaaaaccgtggccgtgaacttcctgctgaccgccaagctgttcttcctcctcaccgcc

SEQ ID NO: 6114 - DNA, 2208 bp, synthetic construct
  source 1..2208: mol_type = other DNA
atggccttaccagtgaccgccttgctcctgccgctggccttgctgctccacgccgccaggccgcagtctgtgctgacacagcctcctagtgtgtctggcgctcctggacagagagtgaccatctcttgtaccggcagcagcagcaatatcggagccggctatgacgtgcactggtatcagcagctccctggcacagcccctaaactgctgatcttcggcaacagcaacagacccagcggcgtgcccgatagattcagcggctttaagagcggcacaagcgccagcctggctatcactggactgcaagccgaggacgaggccgactacttctgccagagctacgatagcagcctgagcggcagcggagtgtttggcacaggcaccaaagtgacagtgcttggcctcgaggacctgaagaacgtgttcccacctgaggtggccgtgttcgagcctagcgaggccgagatcagccacacccagaaagccaccctcgtgtgcctggctaccggcttctaccccgaccatgtggaactgtcttggtgggtcaacggcaaagaggtgcacagcggcgtgtgtaccgacccccagccactgaaagaacagcccgccctgaacgacagccggtactgcctgagcagcagactgagagtgtccgccaccttctggcagaacccccggaaccacttcagatgccaggtgcagttctacggcctgagcgagaacgacgagtggacccaggacagagccaagcccgtgacccagatcgtgtctgccgaagcctggggcagagccgatgatgtgattaagatccactggcaggaaaagaagtccaacaccatcctgggcagccaggaaggcaacaccatgaagaccaacgacacctacatgaagttcagctggctgaccgtgcccgagaagtccctggacaaagaacacagatgcatcgtgcggcacgaaaacaacaagaacggcgtggaccaggaaatcatcttcccacccatcaagaccgatgtgattacaatggaccccaaggacaactgctccaaggacgccaacgataccctgctgctccagctgaccaacaccagcgcctactacatgtacttgttgctgctgctgaagtccgtggtgtacttcgccatcatcacatgctgcctgctgatggctatggtcaagcggaaggacagccggggaagggccaagcgatctggatctggagcaacaaacttctcactactcaaacaagcaggtgacgtggaggagaatcccgggcctactagtatggactggatttggcgcatccttttccttgtcggcgctgctaccggcgcgcattccttcgaacaaatgcaactggttcaaagcggcggtggcctggtgcaacctggaagaagtctgagactgagctgtgccgccagcggcttcaccttcgatgattacgccatgcactgggtccgacaggcccctggaaaaggactggaatgggtgtccggcatctcctggaatagcggctctatcggctacgccgacagcgtgaagggcagattcaccatcagccgggacaacgccaagaacagcctgtacctccagatgaactccctgagagccgaggatacagccctgtactactgcgccaaggacatccacagcggcagctactacggcctgctgtactacgctatggacgtgtggggccagggcacaaccgtgacagtttcttctacgcgtatccagaaccctgatcctgccgtgtaccagctgcgggatagcaagagcagcgacaagagcgtgtgtctgttcaccgacttcgacagccagaccaacgtgtcccagagcaaggactccgacgtgtacatcaccgataagtgcgtgctggacatgcggagcatggacttcaagagcaactccgccgtggcctggtccaacaagtccgatttcgcctgcgccaacgccttcaacaacagcattatccccgaggacacattcttcccaagccccgagagcagcgactccaccgaccacgtgaagcccaaagagacagagaacaccaagcagcccagcaagagctgccacaagcccaaggccatcgtgcacaccgagaaagtgaacatgatgagcctgaccgtgctgggcctgcggatgctgttcgccaaaaccgtggccgtgaacttcctgctgaccgccaagctgttcttcctcctcaccgcc

SEQ ID NO: 6115 - DNA, 2208 bp, synthetic construct
  source 1..2208: mol_type = other DNA
atggccttaccagtgaccgccttgctcctgccgctggccttgctgctccacgccgccaggccgctgcctgttctgacacagcctccatctgcctctggcacacctggacagagagtgaccatcagctgtagcggcagaagcagcaacatcggcagcaacagcgtgaactggtacagacagcttcctggcgctgcccctaagctgctgatctacagcaacaaccagcggcctcctggcgtgccagtcagattttctggcagcaagagcggcacaagcgccagcctggctatttctggactccagtctgaggacgaggccacctactactgtgccacctgggacgacaacctgaacgtgcactacgtgttcggcaccggcaccaaagtgacagtgcttggaagtagactcgaggacctgaagaacgtgttcccacctgaggtggccgtgttcgagcctagcgaggccgagatcagccacacccagaaagccaccctcgtgtgcctggctaccggcttctaccccgaccatgtggaactgtcttggtgggtcaacggcaaagaggtgcacagcggcgtgtgtaccgacccccagccactgaaagaacagcccgccctgaacgacagccggtactgcctgagcagcagactgagagtgtccgccaccttctggcagaacccccggaaccacttcagatgccaggtgcagttctacggcctgagcgagaacgacgagtggacccaggacagagccaagcccgtgacccagatcgtgtctgccgaagcctggggcagagccgatgatgtgattaagatccactggcaggaaaagaagtccaacaccatcctgggcagccaggaaggcaacaccatgaagaccaacgacacctacatgaagttcagctggctgaccgtgcccgagaagtccctggacaaagaacacagatgcatcgtgcggcacgaaaacaacaagaacggcgtggaccaggaaatcatcttcccacccatcaagaccgatgtgattacaatggaccccaaggacaactgctccaaggacgccaacgataccctgctgctccagctgaccaacaccagcgcctactacatgtacttgttgctgctgctgaagtccgtggtgtacttcgccatcatcacatgctgcctgctgatggctatggtcaagcggaaggacagccggggaagggccaagcgatctggatctggagcaacaaacttctcactactcaaacaagcaggtgacgtggaggagaatcccgggcctactagtatggactggatttggcgcatccttttccttgtcggcgctgctaccggcgcgcattccttcgaacttgaaatggctcaggtgcagctggtgcagagcggagccgaagtgaagaaacctggcagcagcgtgaaggtgtcctgcaaagcttctggcggcaccttcagcagctacgccatctcttgggttcgacaggcccctggacaaggactggaatggatgggcagaatcatccccatcctgggaatcgccaactacgcccagaaattccagggcagagtgacaatcaccgccgacaagagcaccagcaccgcctacatggaactgagcagcctgagaagcgaggacaccgccgtgtactattgtgcaagaggcggctactacagccacgacatgtggagcgaagattggggccagggcacactggtcacagtgtcatctacgcgtatccagaaccctgatcctgccgtgtaccagctgcgggatagcaagagcagcgacaagagcgtgtgtctgttcaccgacttcgacagccagaccaacgtgtcccagagcaaggactccgacgtgtacatcaccgataagtgcgtgctggacatgcggagcatggacttcaagagcaactccgccgtggcctggtccaacaagtccgatttcgcctgcgccaacgccttcaacaacagcattatccccgaggacacattcttcccaagccccgagagcagcgactccaccgaccacgtgaagcccaaagagacagagaacaccaagcagcccagcaagagctgccacaagcccaaggccatcgtgcacaccgagaaagtgaacatgatgagcctgaccgtgctgggcctgcggatgctgttcgccaaaaccgtggccgtgaacttcctgctgaccgccaagctgttcttcctcctcaccgcc

SEQ ID NO: 6116 - DNA, 2190 bp, synthetic construct
  source 1..2190: mol_type = other DNA
atggccttaccagtgaccgccttgctcctgccgctggccttgctgctccacgccgccaggccggacttcgtgatgacacagagccctgatagcctggccgtgtctctcggcgagcgagtgaccatgagctgcaagtctagccagagcctgctgaacagcggcaaccagaagaactacctgacctggtatcagcagaagcccggccagcctcctaagctgctgatctactgggccagcaccagagaaagcggcgtgcccgatagattttctggctctggcagcggcaccgacttcaccctgacaatttctagcctgcaagccgaggacgtggccgtgtactactgccagaacgactacagctacccctacaccttcggccagggcaccaagctggaaatcaaactcgaggacctgaagaacgtgttcccacctgaggtggccgtgttcgagcctagcgaggccgagatcagccacacccagaaagccaccctcgtgtgcctggctaccggcttctaccccgaccatgtggaactgtcttggtgggtcaacggcaaagaggtgcacagcggcgtgtgtaccgacccccagccactgaaagaacagcccgccctgaacgacagccggtactgcctgagcagcagactgagagtgtccgccaccttctggcagaacccccggaaccacttcagatgccaggtgcagttctacggcctgagcgagaacgacgagtggacccaggacagagccaagcccgtgacccagatcgtgtctgccgaagcctggggcagagccgatgatgtgattaagatccactggcaggaaaagaagtccaacaccatcctgggcagccaggaaggcaacaccatgaagaccaacgacacctacatgaagttcagctggctgaccgtgcccgagaagtccctggacaaagaacacagatgcatcgtgcggcacgaaaacaacaagaacggcgtggaccaggaaatcatcttcccacccatcaagaccgatgtgattacaatggaccccaaggacaactgctccaaggacgccaacgataccctgctgctccagctgaccaacaccagcgcctactacatgtacttgttgctgctgctgaagtccgtggtgtacttcgccatcatcacatgctgcctgctgatggctatggtcaagcggaaggacagccggggaagggccaagcgatctggatctggagcaacaaacttctcactactcaaacaagcaggtgacgtggaggagaatcccgggcctactagtatggactggatttggcgcatccttttccttgtcggcgctgctaccggcgcgcattccttcgaagaagtgcaactggttcagagcggagccgagctgaagaaacctggggccagcgtgaaggtgtcctgtaaagccagcggctacacctttaccgactactacatgaaatgggtccgacaggccccaggccagggactcgaatggatcggcgatattatccccagcaacggggccaccttctacaaccagaaattcaagggccgcgtgaccatcaccgtggacaagagcacaagcaccgcctacatggaactgagcagcctgagaagcgaggacaccgccgtgtattattgcgccagaagccatctgctgcgggccagttggttcgcctattggggacagggaaccctggtcaccgttagctctacgcgtatccagaaccctgatcctgccgtgtaccagctgcgggatagcaagagcagcgacaagagcgtgtgtctgttcaccgacttcgacagccagaccaacgtgtcccagagcaaggactccgacgtgtacatcaccgataagtgcgtgctggacatgcggagcatggacttcaagagcaactccgccgtggcctggtccaacaagtccgatttcgcctgcgccaacgccttcaacaacagcattatccccgaggacacattcttcccaagccccgagagcagcgactccaccgaccacgtgaagcccaaagagacagagaacaccaagcagcccagcaagagctgccacaagcccaaggccatcgtgcacaccgagaaagtgaacatgatgagcctgaccgtgctgggcctgcggatgctgttcgccaaaaccgtggccgtgaacttcctgctgaccgccaagctgttcttcctcctcaccgcc

SEQ ID NO: 6117 - DNA, 2190 bp, synthetic construct
  source 1..2190: mol_type = other DNA
atggccttaccagtgaccgccttgctcctgccgctggccttgctgctccacgccgccaggccggacttcgtgatgacacagagccctgatagcctggccgtgtctctcggcgagcgagtgaccatgagctgcaagtctagccagagcctgctgaacagcggcaaccagaagaactacctgacctggtatcagcagaagcccggccagcctcctaagctgctgatctactgggccagcaccagagaaagcggcgtgcccgatagattttctggctctggcagcggcaccgacttcaccctgacaatttctagcctgcaagccgaggacgtggccgtgtactactgccagaacgactacagctacccctacaccttcggccagggcaccaagctggaaatcaaactcgaggacctgaagaacgtgttcccacctgaggtggccgtgttcgagcctagcgaggccgagatcagccacacccagaaagccaccctcgtgtgcctggctaccggcttctaccccgaccatgtggaactgtcttggtgggtcaacggcaaagaggtgcacagcggcgtgtgtaccgacccccagccactgaaagaacagcccgccctgaacgacagccggtactgcctgagcagcagactgagagtgtccgccaccttctggcagaacccccggaaccacttcagatgccaggtgcagttctacggcctgagcgagaacgacgagtggacccaggacagagccaagcccgtgacccagatcgtgtctgccgaagcctggggcagagccgatgatgtgattaagatccactggcaggaaaagaagtccaacaccatcctgggcagccaggaaggcaacaccatgaagaccaacgacacctacatgaagttcagctggctgaccgtgcccgagaagtccctggacaaagaacacagatgcatcgtgcggcacgaaaacaacaagaacggcgtggaccaggaaatcatcttcccacccatcaagaccgatgtgattacaatggaccccaaggacaactgctccaaggacgccaacgataccctgctgctccagctgaccaacaccagcgcctactacatgtacttgttgctgctgctgaagtccgtggtgtacttcgccatcatcacatgctgcctgctgatggctatggtcaagcggaaggacagccggggaagggccaagcgatctggatctggagcaacaaacttctcactactcaaacaagcaggtgacgtggaggagaatcccgggcctactagtatggactggatttggcgcatccttttccttgtcggcgctgctaccggcgcgcattccttcgaacaagtgcaactggttcagagcggagccgagctgaagaaacctggggccagcgtgaaggtgtcctgtaaagccagcggctacacctttaccgactactacatgaaatgggtccgacaggccccaggccagggactcgaatggatcggcgatattatccccagcaacggggccaccttctacaaccagaaattcaagggccgcgtgaccatcaccgtggacaagagcacaagcaccgcctacatggaactgagcagcctgagaagcgaggacaccgccgtgtattattgcgccagaagccatctgctgcgggccagttggttcgcctattggggacagggaaccctggtcaccgttagctctacgcgtatccagaaccctgatcctgccgtgtaccagctgcgggatagcaagagcagcgacaagagcgtgtgtctgttcaccgacttcgacagccagaccaacgtgtcccagagcaaggactccgacgtgtacatcaccgataagtgcgtgctggacatgcggagcatggacttcaagagcaactccgccgtggcctggtccaacaagtccgatttcgcctgcgccaacgccttcaacaacagcattatccccgaggacacattcttcccaagccccgagagcagcgactccaccgaccacgtgaagcccaaagagacagagaacaccaagcagcccagcaagagctgccacaagcccaaggccatcgtgcacaccgagaaagtgaacatgatgagcctgaccgtgctgggcctgcggatgctgttcgccaaaaccgtggccgtgaacttcctgctgaccgccaagctgttcttcctcctcaccgcc

SEQ ID NO: 6118 - DNA, 2160 bp, synthetic construct
  source 1..2160: mol_type = other DNA
atggccttaccagtgaccgccttgctcctgccgctggccttgctgctccacgccgccaggccggacgtgcagatcacacagagccctagctacctggctgcctctcctggcgagacaatcaccatcaactgtcgggccagcaagagcatcagcaaggacctggcctggtatcaagagaagcccggcaagaccaacaagctgctgatctacagcggcagcacactccagtctggcatccccagcagattttccggctctggcagcggcaccgatttcaccctgaccataagcagcctggaacctgaggacttcgccatgtactactgccagcagcacaacaagtacccctacacctttggcggaggcaccaagctggaaatcaagagactcgaggacctgaagaacgtgttcccacctgaggtggccgtgttcgagcctagcgaggccgagatcagccacacccagaaagccaccctcgtgtgcctggctaccggcttctaccccgaccatgtggaactgtcttggtgggtcaacggcaaagaggtgcacagcggcgtgtgtaccgacccccagccactgaaagaacagcccgccctgaacgacagccggtactgcctgagcagcagactgagagtgtccgccaccttctggcagaacccccggaaccacttcagatgccaggtgcagttctacggcctgagcgagaacgacgagtggacccaggacagagccaagcccgtgacccagatcgtgtctgccgaagcctggggcagagccgatgatgtgattaagatccactggcaggaaaagaagtccaacaccatcctgggcagccaggaaggcaacaccatgaagaccaacgacacctacatgaagttcagctggctgaccgtgcccgagaagtccctggacaaagaacacagatgcatcgtgcggcacgaaaacaacaagaacggcgtggaccaggaaatcatcttcccacccatcaagaccgatgtgattacaatggaccccaaggacaactgctccaaggacgccaacgataccctgctgctccagctgaccaacaccagcgcctactacatgtacttgttgctgctgctgaagtccgtggtgtacttcgccatcatcacatgctgcctgctgatggctatggtcaagcggaaggacagccggggaagggccaagcgatctggatctggagcaacaaacttctcactactcaaacaagcaggtgacgtggaggagaatcccgggcctactagtatggactggatttggcgcatccttttccttgtcggcgctgctaccggcgcgcattccttcgaacaagttcaactgcaacagcctggggccgagcttgttagacctggcgcttctgtgaagctgagctgcaaggccagcggctacaccttcaccagctactggatgaactgggtcaagcagcggcctgaccagggcctcgaatggatcggcagaatcgacccctacgacagcgagacacactacaaccagaagttcaaggacaaggccatcctgaccgtggacaagagcagctccaccgcctacatgcaactgagcagcctgacctctgaggatagcgccgtgtactattgcgccagaggcaactgggacgactattggggccagggcacaaccctgacagtgtctagtacgcgtatccagaaccctgatcctgccgtgtaccagctgcgggatagcaagagcagcgacaagagcgtgtgtctgttcaccgacttcgacagccagaccaacgtgtcccagagcaaggactccgacgtgtacatcaccgataagtgcgtgctggacatgcggagcatggacttcaagagcaactccgccgtggcctggtccaacaagtccgatttcgcctgcgccaacgccttcaacaacagcattatccccgaggacacattcttcccaagccccgagagcagcgactccaccgaccacgtgaagcccaaagagacagagaacaccaagcagcccagcaagagctgccacaagcccaaggccatcgtgcacaccgagaaagtgaacatgatgagcctgaccgtgctgggcctgcggatgctgttcgccaaaaccgtggccgtgaacttcctgctgaccgccaagctgttcttcctcctcaccgcc

SEQ ID NO: 6119 - DNA, 2166 bp, synthetic construct
  source 1..2166: mol_type = other DNA
atggccttaccagtgaccgccttgctcctgccgctggccttgctgctccacgccgccaggccggagatcgtgctgacacagagccctaccagcatgacagcctctccaggcgagcaagtgaccatcacctgtagagccagcagcagcatcaactacatgcactggtatcagcagaagcctggcgcaagccccagaccttggatctacgagacaagcaagctggcctccggcgtgcccgatagattttctggatctgccagcggcaccagctacagcctgaccatcaacaacatggaagccgaggacgccgccacctactactgccagcagtggaattacccctcctggacctttggcggaggcaccaagctggaacttaaactcgaggacctgaagaacgtgttcccacctgaggtggccgtgttcgagcctagcgaggccgagatcagccacacccagaaagccaccctcgtgtgcctggctaccggcttctaccccgaccatgtggaactgtcttggtgggtcaacggcaaagaggtgcacagcggcgtgtgtaccgacccccagccactgaaagaacagcccgccctgaacgacagccggtactgcctgagcagcagactgagagtgtccgccaccttctggcagaacccccggaaccacttcagatgccaggtgcagttctacggcctgagcgagaacgacgagtggacccaggacagagccaagcccgtgacccagatcgtgtctgccgaagcctggggcagagccgatgatgtgattaagatccactggcaggaaaagaagtccaacaccatcctgggcagccaggaaggcaacaccatgaagaccaacgacacctacatgaagttcagctggctgaccgtgcccgagaagtccctggacaaagaacacagatgcatcgtgcggcacgaaaacaacaagaacggcgtggaccaggaaatcatcttcccacccatcaagaccgatgtgattacaatggaccccaaggacaactgctccaaggacgccaacgataccctgctgctccagctgaccaacaccagcgcctactacatgtacttgttgctgctgctgaagtccgtggtgtacttcgccatcatcacatgctgcctgctgatggctatggtcaagcggaaggacagccggggaagggccaagcgatctggatctggagcaacaaacttctcactactcaaacaagcaggtgacgtggaggagaatcccgggcctactagtatggactggatttggcgcatccttttccttgtcggcgctgctaccggcgcgcattccttcgaagaagtgcagctcgttgagtctggtggcggactggttcagcctggaagaagcctgaagctgagctgtgccgccagcggcttcaccttcagcgactacaatatggcctgggtccgacaggcccctaagaaaggactggaatgggtcgccaccatcctgtacgatggcggcagaacctactaccggggcagcgtgaagggcagattcaccatcagcagagacaacgccaagagcaccctgtacctgcggatggactctctgagaagcgaggataccgccacatattactgtgccacacacagccggggcaccgactactttgattattggggccagggcgtgatggttaccgtgtctagtacgcgtatccagaaccctgatcctgccgtgtaccagctgcgggatagcaagagcagcgacaagagcgtgtgtctgttcaccgacttcgacagccagaccaacgtgtcccagagcaaggactccgacgtgtacatcaccgataagtgcgtgctggacatgcggagcatggacttcaagagcaactccgccgtggcctggtccaacaagtccgatttcgcctgcgccaacgccttcaacaacagcattatccccgaggacacattcttcccaagccccgagagcagcgactccaccgaccacgtgaagcccaaagagacagagaacaccaagcagcccagcaagagctgccacaagcccaaggccatcgtgcacaccgagaaagtgaacatgatgagcctgaccgtgctgggcctgcggatgctgttcgccaaaaccgtggccgtgaacttcctgctgaccgccaagctgttcttcctcctcaccgcc

SEQ ID NO: 6120 - DNA, 2193 bp, synthetic construct
  source 1..2193: mol_type = other DNA
atggccttaccagtgaccgccttgctcctgccgctggccttgctgctccacgccgccaggccggacatcgtgatgacacagagcccttctagcctggccgtgtctgagggcgagacagtgaccatcaactgcaagagcagccagagcttcctgtctagcggcgacggcaagaattacgtggcctggtatcagtacaagcccggacagagccccaagctgctgatctactgggccagcacaagacagagcggcgtgcccgatagattcatcggctctggcagcggcaccgacttcaccctgacaatctctacagtgcaggccgaggacctggctatctactactgccagcagtattacgacacccctctgacctttggctccggcaccaagctggaaatcaaactcgaggacctgaagaacgtgttcccacctgaggtggccgtgttcgagcctagcgaggccgagatcagccacacccagaaagccaccctcgtgtgcctggctaccggcttctaccccgaccatgtggaactgtcttggtgggtcaacggcaaagaggtgcacagcggcgtgtgtaccgacccccagccactgaaagaacagcccgccctgaacgacagccggtactgcctgagcagcagactgagagtgtccgccaccttctggcagaacccccggaaccacttcagatgccaggtgcagttctacggcctgagcgagaacgacgagtggacccaggacagagccaagcccgtgacccagatcgtgtctgccgaagcctggggcagagccgatgatgtgattaagatccactggcaggaaaagaagtccaacaccatcctgggcagccaggaaggcaacaccatgaagaccaacgacacctacatgaagttcagctggctgaccgtgcccgagaagtccctggacaaagaacacagatgcatcgtgcggcacgaaaacaacaagaacggcgtggaccaggaaatcatcttcccacccatcaagaccgatgtgattacaatggaccccaaggacaactgctccaaggacgccaacgataccctgctgctccagctgaccaacaccagcgcctactacatgtacttgttgctgctgctgaagtccgtggtgtacttcgccatcatcacatgctgcctgctgatggctatggtcaagcggaaggacagccggggaagggccaagcgatctggatctggagcaacaaacttctcactactcaaacaagcaggtgacgtggaggagaatcccgggcctactagtatggactggatttggcgcatccttttccttgtcggcgctgctaccggcgcgcattccttcgaagaagtgaagctgcaagagtctggccccagcctggtgcagagtagccaaacactgagcctgacctgtaccgtgtccggctttagcctgaccagctaccacatccactgggtccgacagacccctggcaaaggactggaatggatgggcgtgatgtggagcgacggcgacaccagctataacagcgccctgaagtcccggctgagcatcagcagagatacaagccagagccaggtgttcctgaagatgaacagcctccagaccgaggacaccgccacctactattgtgccagaggctactacagcagctacctgtacctttggttcgcctattggggccagggcaccctggttacagtcagctctacgcgtatccagaaccctgatcctgccgtgtaccagctgcgggatagcaagagcagcgacaagagcgtgtgtctgttcaccgacttcgacagccagaccaacgtgtcccagagcaaggactccgacgtgtacatcaccgataagtgcgtgctggacatgcggagcatggacttcaagagcaactccgccgtggcctggtccaacaagtccgatttcgcctgcgccaacgccttcaacaacagcattatccccgaggacacattcttcccaagccccgagagcagcgactccaccgaccacgtgaagcccaaagagacagagaacaccaagcagcccagcaagagctgccacaagcccaaggccatcgtgcacaccgagaaagtgaacatgatgagcctgaccgtgctgggcctgcggatgctgttcgccaaaaccgtggccgtgaacttcctgctgaccgccaagctgttcttcctcctcaccgcc

SEQ ID NO: 6121 - DNA, 2205 bp, synthetic construct
  source 1..2205: mol_type = other DNA
atggccttaccagtgaccgccttgctcctgccgctggccttgctgctccacgccgccaggccggacgtgctgatgacccagacacctgtgtctctgccagtgtctctcggaggccaggtgtccatctcctgtagaagcagccagagcctggtgcactccgacggcgatacctacctgcactggtatctccagaagcctggacagagccctcagctcctgatctaccgggtgtccaacagattcagcggcgtgcccgatagattttccggcagcggctctggcaccgacttcaccctgaagatcagcagagtggaacccgaggacctgggcctgtactactgtctccagaccacacacttcccaccttggacctttggcggaggcaccaagctggaaatgaaactcgaggacctgaagaacgtgttcccacctgaggtggccgtgttcgagcctagcgaggccgagatcagccacacccagaaagccaccctcgtgtgcctggctaccggcttctaccccgaccatgtggaactgtcttggtgggtcaacggcaaagaggtgcacagcggcgtgtgtaccgacccccagccactgaaagaacagcccgccctgaacgacagccggtactgcctgagcagcagactgagagtgtccgccaccttctggcagaacccccggaaccacttcagatgccaggtgcagttctacggcctgagcgagaacgacgagtggacccaggacagagccaagcccgtgacccagatcgtgtctgccgaagcctggggcagagccgatgatgtgattaagatccactggcaggaaaagaagtccaacaccatcctgggcagccaggaaggcaacaccatgaagaccaacgacacctacatgaagttcagctggctgaccgtgcccgagaagtccctggacaaagaacacagatgcatcgtgcggcacgaaaacaacaagaacggcgtggaccaggaaatcatcttcccacccatcaagaccgatgtgattacaatggaccccaaggacaactgctccaaggacgccaacgataccctgctgctccagctgaccaacaccagcgcctactacatgtacttgttgctgctgctgaagtccgtggtgtacttcgccatcatcacatgctgcctgctgatggctatggtcaagcggaaggacagccggggaagggccaagcgatctggatctggagcaacaaacttctcactactcaaacaagcaggtgacgtggaggagaatcccgggcctactagtatggactggatttggcgcatccttttccttgtcggcgctgctaccggcgcgcattccttcgaacaggttcagctccagcagtctggacccgagcttagaaggccaggatctagcgtcagactgagctgcaaggccagcggctaccggatcaaggacttcctgatccactggattaagaacagacccgagcacggcctggaatggatcggatggattgaccctgaggacggcgagactaagtacgcccagaagttccagaccaaggccacactgaccgccgacacctctagcaacaccgcctacatgcaactgagcagcctgaccagcgaggacaccgccacctacttttgtgctagatggggcgacgtgtactacggcctgatgagaggccatgtgatggatgcctggggccagggaacaagcgtgacagtctcttctacgcgtatccagaaccctgatcctgccgtgtaccagctgcgggatagcaagagcagcgacaagagcgtgtgtctgttcaccgacttcgacagccagaccaacgtgtcccagagcaaggactccgacgtgtacatcaccgataagtgcgtgctggacatgcggagcatggacttcaagagcaactccgccgtggcctggtccaacaagtccgatttcgcctgcgccaacgccttcaacaacagcattatccccgaggacacattcttcccaagccccgagagcagcgactccaccgaccacgtgaagcccaaagagacagagaacaccaagcagcccagcaagagctgccacaagcccaaggccatcgtgcacaccgagaaagtgaacatgatgagcctgaccgtgctgggcctgcggatgctgttcgccaaaaccgtggccgtgaacttcctgctgaccgccaagctgttcttcctcctcaccgcc

SEQ ID NO: 6122 - DNA, 2190 bp, synthetic construct
  source 1..2190: mol_type = other DNA
atggccttaccagtgaccgccttgctcctgccgctggccttgctgctccacgccgccaggccggacatcgtgatgacacagagccccgccacactgtcactgtctccaggcgaaagagccacactgagctgtcggagcagcaagagcctccagaacgtgaacggcaacacctacctgtactggttccagcagaagcccggccagtctcctcagctcctgatctacagaatgagcaacctgaacagcggcgtgcccgacagattttctggcagcggaagcggcaccgagttcaccctgaccataagcagcctggaacctgaggacttcgccgtgtactactgtatgcagcacctggaataccccatcaccttcggagccggcaccaagctggaaatcaaactcgaggacctgaagaacgtgttcccacctgaggtggccgtgttcgagcctagcgaggccgagatcagccacacccagaaagccaccctcgtgtgcctggctaccggcttctaccccgaccatgtggaactgtcttggtgggtcaacggcaaagaggtgcacagcggcgtgtgtaccgacccccagccactgaaagaacagcccgccctgaacgacagccggtactgcctgagcagcagactgagagtgtccgccaccttctggcagaacccccggaaccacttcagatgccaggtgcagttctacggcctgagcgagaacgacgagtggacccaggacagagccaagcccgtgacccagatcgtgtctgccgaagcctggggcagagccgatgatgtgattaagatccactggcaggaaaagaagtccaacaccatcctgggcagccaggaaggcaacaccatgaagaccaacgacacctacatgaagttcagctggctgaccgtgcccgagaagtccctggacaaagaacacagatgcatcgtgcggcacgaaaacaacaagaacggcgtggaccaggaaatcatcttcccacccatcaagaccgatgtgattacaatggaccccaaggacaactgctccaaggacgccaacgataccctgctgctccagctgaccaacaccagcgcctactacatgtacttgttgctgctgctgaagtccgtggtgtacttcgccatcatcacatgctgcctgctgatggctatggtcaagcggaaggacagccggggaagggccaagcgatctggatctggagcaacaaacttctcactactcaaacaagcaggtgacgtggaggagaatcccgggcctactagtatggactggatttggcgcatccttttccttgtcggcgctgctaccggcgcgcattccttcgaagaagtgcaactggttgaatctggcggcggactggttaagcctggcggatctctgaagctgagctgtgccgccagcggctacacctttaccagctacgtgatgcactgggtccgacaggcccctggcaaaggacttgagtggatcggctacatcaacccctacaacgatggcaccaagtacaacgagaagttccagggcagagtgaccatcagctccgacaagagcatcagcaccgcctacatggaactgagcagcctgagaagcgaggataccgccatgtactattgcgccagaggcacctactactacggcaccagagtgttcgactactggggccagggaaccctggtcacagtctcttctacgcgtatccagaaccctgatcctgccgtgtaccagctgcgggatagcaagagcagcgacaagagcgtgtgtctgttcaccgacttcgacagccagaccaacgtgtcccagagcaaggactccgacgtgtacatcaccgataagtgcgtgctggacatgcggagcatggacttcaagagcaactccgccgtggcctggtccaacaagtccgatttcgcctgcgccaacgccttcaacaacagcattatccccgaggacacattcttcccaagccccgagagcagcgactccaccgaccacgtgaagcccaaagagacagagaacaccaagcagcccagcaagagctgccacaagcccaaggccatcgtgcacaccgagaaagtgaacatgatgagcctgaccgtgctgggcctgcggatgctgttcgccaaaaccgtggccgtgaacttcctgctgaccgccaagctgttcttcctcctcaccgcc

SEQ ID NO: 6123 - DNA, 2178 bp, synthetic construct
  source 1..2178: mol_type = other DNA
atggccttaccagtgaccgccttgctcctgccgctggccttgctgctccacgccgccaggccggacatccagatgacacagagccctagcagcctgtctgccagcgtgggagacagagtgaccatcacatgcaaggccagcgaccacatcaacaactggctggcctggtatcagcagaagcctggacaggcccctaagctgctgatctacggcgctaccacactggaaacaggcgtgcccagcagattttctggcagcggctctggcaccgactacaccctgacaatatccagcctccagcctgaggacttcgccacctactactgtcagcagagctggaacaccccttggacattcggccagggcaccaagctggaaatcaagagactcgaggacctgaagaacgtgttcccacctgaggtggccgtgttcgagcctagcgaggccgagatcagccacacccagaaagccaccctcgtgtgcctggctaccggcttctaccccgaccatgtggaactgtcttggtgggtcaacggcaaagaggtgcacagcggcgtgtgtaccgacccccagccactgaaagaacagcccgccctgaacgacagccggtactgcctgagcagcagactgagagtgtccgccaccttctggcagaacccccggaaccacttcagatgccaggtgcagttctacggcctgagcgagaacgacgagtggacccaggacagagccaagcccgtgacccagatcgtgtctgccgaagcctggggcagagccgatgatgtgattaagatccactggcaggaaaagaagtccaacaccatcctgggcagccaggaaggcaacaccatgaagaccaacgacacctacatgaagttcagctggctgaccgtgcccgagaagtccctggacaaagaacacagatgcatcgtgcggcacgaaaacaacaagaacggcgtggaccaggaaatcatcttcccacccatcaagaccgatgtgattacaatggaccccaaggacaactgctccaaggacgccaacgataccctgctgctccagctgaccaacaccagcgcctactacatgtacttgttgctgctgctgaagtccgtggtgtacttcgccatcatcacatgctgcctgctgatggctatggtcaagcggaaggacagccggggaagggccaagcgatctggatctggagcaacaaacttctcactactcaaacaagcaggtgacgtggaggagaatcccgggcctactagtatggactggatttggcgcatccttttccttgtcggcgctgctaccggcgcgcattccttcgaacaagttcagcttcaacagcctggcgctgagctggtcaaacctggcgcttctgtgaagatgagctgcaaagccagcggctacgccttcagcagctactggatcaactggatgaagcagaaacccggccagggactcgaatggatcggccaaatctatcccggcgacggcgacaccaactacaacggcaagttcaagggcagagccacactgaccgccgatacctctagcagcacagcctacatgcagctgagcagcctgaccagcgaagatagcgccgtgtacttctgtgcccggtccatcacaacagtcgtgggctgcgctatggactattggggccagggaacaagcgtgaccgtgtctagtacgcgtatccagaaccctgatcctgccgtgtaccagctgcgggatagcaagagcagcgacaagagcgtgtgtctgttcaccgacttcgacagccagaccaacgtgtcccagagcaaggactccgacgtgtacatcaccgataagtgcgtgctggacatgcggagcatggacttcaagagcaactccgccgtggcctggtccaacaagtccgatttcgcctgcgccaacgccttcaacaacagcattatccccgaggacacattcttcccaagccccgagagcagcgactccaccgaccacgtgaagcccaaagagacagagaacaccaagcagcccagcaagagctgccacaagcccaaggccatcgtgcacaccgagaaagtgaacatgatgagcctgaccgtgctgggcctgcggatgctgttcgccaaaaccgtggccgtgaacttcctgctgaccgccaagctgttcttcctcctcaccgcc

SEQ ID NO: 6124 - DNA, 2184 bp, synthetic construct
  source 1..2184: mol_type = other DNA
atggccttaccagtgaccgccttgctcctgccgctggccttgctgctccacgccgccaggccgcagatcgtgctgtctcagtctcctgccatcctgagcgcttccccaggcgagaaagtgaccatgacctgtagagccagcagcagcgtgtcctacatgcactggtatcagcagaagcccggcagcagccctaagccttggatctacgccaccagcaatctggcctctggcgtgccagccagattttctggctctggcagcggcaccagctacagcttcacaatcagcagagtggaagccgaggacgccgccacctactattgtcagcagtggaccttcaatcctcctaccttcggcggaggcacccggctggaaatcaaaagaacagtggctgctctcgaggacctgaagaacgtgttcccacctgaggtggccgtgttcgagcctagcgaggccgagatcagccacacccagaaagccaccctcgtgtgcctggctaccggcttctaccccgaccatgtggaactgtcttggtgggtcaacggcaaagaggtgcacagcggcgtgtgtaccgacccccagccactgaaagaacagcccgccctgaacgacagccggtactgcctgagcagcagactgagagtgtccgccaccttctggcagaacccccggaaccacttcagatgccaggtgcagttctacggcctgagcgagaacgacgagtggacccaggacagagccaagcccgtgacccagatcgtgtctgccgaagcctggggcagagccgatgatgtgattaagatccactggcaggaaaagaagtccaacaccatcctgggcagccaggaaggcaacaccatgaagaccaacgacacctacatgaagttcagctggctgaccgtgcccgagaagtccctggacaaagaacacagatgcatcgtgcggcacgaaaacaacaagaacggcgtggaccaggaaatcatcttcccacccatcaagaccgatgtgattacaatggaccccaaggacaactgctccaaggacgccaacgataccctgctgctccagctgaccaacaccagcgcctactacatgtacttgttgctgctgctgaagtccgtggtgtacttcgccatcatcacatgctgcctgctgatggctatggtcaagcggaaggacagccggggaagggccaagcgatctggatctggagcaacaaacttctcactactcaaacaagcaggtgacgtggaggagaatcccgggcctactagtatggactggatttggcgcatccttttccttgtcggcgctgctaccggcgcgcattccttcgaacaggcttatctgcaacagagcggagccgaactcgtcagacctggcgcttctgtgaagatgagctgcaaggccagcggctacaccttcaccagctataatatgcactgggtcaagcagacccctcggcagggactcgaatggatcggcggaatctatcccggcaacggcgacacctcctacaaccagaagttcaagggcaaagccacactgaccgtgggcaagagcagcagcaccgcctatatgcagctcagcagcctgaccagcgaggacagcgccgtgtacttctgcgccagatacgactacaactacgctatggactactggggccagggcaccagcgtgacagttagctctgccagcacgcgtatccagaaccctgatcctgccgtgtaccagctgcgggatagcaagagcagcgacaagagcgtgtgtctgttcaccgacttcgacagccagaccaacgtgtcccagagcaaggactccgacgtgtacatcaccgataagtgcgtgctggacatgcggagcatggacttcaagagcaactccgccgtggcctggtccaacaagtccgatttcgcctgcgccaacgccttcaacaacagcattatccccgaggacacattcttcccaagccccgagagcagcgactccaccgaccacgtgaagcccaaagagacagagaacaccaagcagcccagcaagagctgccacaagcccaaggccatcgtgcacaccgagaaagtgaacatgatgagcctgaccgtgctgggcctgcggatgctgttcgccaaaaccgtggccgtgaacttcctgctgaccgccaagctgttcttcctcctcaccgcc

SEQ ID NO: 6125 - DNA, 2178 bp, synthetic construct
  source 1..2178: mol_type = other DNA
atggccttaccagtgaccgccttgctcctgccgctggccttgctgctccacgccgccaggccggagatcgtgctgacacagagccctgccaccctgtctctgagccctggcgaaagagccaccctgagctgtagagccagccagagcgtgtccagctacctggcctggtatcagcagaagcccggccaggctccccggctgctgatctacgatgccagcaatagagccaccggcatccccgccagattttccggctctggcagcggcaccgacttcaccctgaccatcagctccctggaacccgaggacttcgccgtgtactactgccagcagcggagcaactggcccatcacattcggccagggcacccggctggaaatcaaactcgaggacctgaagaacgtgttcccacctgaggtggccgtgttcgagcctagcgaggccgagatcagccacacccagaaagccaccctcgtgtgcctggctaccggcttctaccccgaccatgtggaactgtcttggtgggtcaacggcaaagaggtgcacagcggcgtgtgtaccgacccccagccactgaaagaacagcccgccctgaacgacagccggtactgcctgagcagcagactgagagtgtccgccaccttctggcagaacccccggaaccacttcagatgccaggtgcagttctacggcctgagcgagaacgacgagtggacccaggacagagccaagcccgtgacccagatcgtgtctgccgaagcctggggcagagccgatgatgtgattaagatccactggcaggaaaagaagtccaacaccatcctgggcagccaggaaggcaacaccatgaagaccaacgacacctacatgaagttcagctggctgaccgtgcccgagaagtccctggacaaagaacacagatgcatcgtgcggcacgaaaacaacaagaacggcgtggaccaggaaatcatcttcccacccatcaagaccgatgtgattacaatggaccccaaggacaactgctccaaggacgccaacgataccctgctgctccagctgaccaacaccagcgcctactacatgtacttgttgctgctgctgaagtccgtggtgtacttcgccatcatcacatgctgcctgctgatggctatggtcaagcggaaggacagccggggaagggccaagcgatctggatctggagcaacaaacttctcactactcaaacaagcaggtgacgtggaggagaatcccgggcctactagtatggactggatttggcgcatccttttccttgtcggcgctgctaccggcgcgcattccttcgaagaggtgcagcttgttgagtctggcggaggactggtgcagcccgatagaagcctgagactgtcttgtgccgccagcggcttcaccttccacgattatgccatgcactgggtccgacaggcccctggcaaaggacttgaatgggtgtccaccatctcttggaacagcggcacaatcggctacgccgactctgtgaagggcagattcaccatcagccgggacaacgccaagaacagcctgtacctccagatgaactccctgagagccgaggacacagccctgtactactgcgccaaggacatccagtacggcaactactactacggcatggacgtgtggggccagggcacaacagtgacagtctcttctacgcgtatccagaaccctgatcctgccgtgtaccagctgcgggatagcaagagcagcgacaagagcgtgtgtctgttcaccgacttcgacagccagaccaacgtgtcccagagcaaggactccgacgtgtacatcaccgataagtgcgtgctggacatgcggagcatggacttcaagagcaactccgccgtggcctggtccaacaagtccgatttcgcctgcgccaacgccttcaacaacagcattatccccgaggacacattcttcccaagccccgagagcagcgactccaccgaccacgtgaagcccaaagagacagagaacaccaagcagcccagcaagagctgccacaagcccaaggccatcgtgcacaccgagaaagtgaacatgatgagcctgaccgtgctgggcctgcggatgctgttcgccaaaaccgtggccgtgaacttcctgctgaccgccaagctgttcttcctcctcaccgcc

SEQ ID NO: 6126 - DNA, 2163 bp, synthetic construct
  source 1..2163: mol_type = other DNA
atggccttaccagtgaccgccttgctcctgccgctggccttgctgctccacgccgccaggccggacatccagatgacacagagccctagcagcctgtctgccagcgtgggagatagagtgaccatcaactgcaaggccagccaggacatcaacagctacctgagctggttccagcagaagcctggcaaggcccctaagacactgatctaccgggccaacagactggtggatggcgtgccaagcagattttctggcagcggcagcggccaggattacaccctgacaatatccagcctccagcctgaggacttcgccacctactactgcctccagtacgacgagttccctctgacctttggcggaggcaccaaggtggaaatcaaactcgaggacctgaagaacgtgttcccacctgaggtggccgtgttcgagcctagcgaggccgagatcagccacacccagaaagccaccctcgtgtgcctggctaccggcttctaccccgaccatgtggaactgtcttggtgggtcaacggcaaagaggtgcacagcggcgtgtgtaccgacccccagccactgaaagaacagcccgccctgaacgacagccggtactgcctgagcagcagactgagagtgtccgccaccttctggcagaacccccggaaccacttcagatgccaggtgcagttctacggcctgagcgagaacgacgagtggacccaggacagagccaagcccgtgacccagatcgtgtctgccgaagcctggggcagagccgatgatgtgattaagatccactggcaggaaaagaagtccaacaccatcctgggcagccaggaaggcaacaccatgaagaccaacgacacctacatgaagttcagctggctgaccgtgcccgagaagtccctggacaaagaacacagatgcatcgtgcggcacgaaaacaacaagaacggcgtggaccaggaaatcatcttcccacccatcaagaccgatgtgattacaatggaccccaaggacaactgctccaaggacgccaacgataccctgctgctccagctgaccaacaccagcgcctactacatgtacttgttgctgctgctgaagtccgtggtgtacttcgccatcatcacatgctgcctgctgatggctatggtcaagcggaaggacagccggggaagggccaagcgatctggatctggagcaacaaacttctcactactcaaacaagcaggtgacgtggaggagaatcccgggcctactagtatggactggatttggcgcatccttttccttgtcggcgctgctaccggcgcgcattccttcgaacaggtgcaactggtgcagtctggggccgaagtgaagaaacctggggcctctgtgaaggtgtcctgcaaagccagcggctacacctttaccaactacgacatcaactgggtccgacaggctccaggccaaggactggaatggatcggctggatctatcctggcgacggcagcaccaagtacaacgagaagttcaaggccaaggccacactgaccgccgataccagcacaagcaccgcctacatggaactgcggagcctgagaagcgacgacaccgccgtgtactattgtgcctccggctacgaggacgctatggactattggggccagggcaccaccgtgacagtgtctagtacgcgtatccagaaccctgatcctgccgtgtaccagctgcgggatagcaagagcagcgacaagagcgtgtgtctgttcaccgacttcgacagccagaccaacgtgtcccagagcaaggactccgacgtgtacatcaccgataagtgcgtgctggacatgcggagcatggacttcaagagcaactccgccgtggcctggtccaacaagtccgatttcgcctgcgccaacgccttcaacaacagcattatccccgaggacacattcttcccaagccccgagagcagcgactccaccgaccacgtgaagcccaaagagacagagaacaccaagcagcccagcaagagctgccacaagcccaaggccatcgtgcacaccgagaaagtgaacatgatgagcctgaccgtgctgggcctgcggatgctgttcgccaaaaccgtggccgtgaacttcctgctgaccgccaagctgttcttcctcctcaccgcc

SEQ ID NO: 6127 - DNA, 2169 bp, synthetic construct
  source 1..2169: mol_type = other DNA
atggccttaccagtgaccgccttgctcctgccgctggccttgctgctccacgccgccaggccggacatcgtgatgacccagacacctctgagcctgagcgtgacacctggacagcctgccagcattagctgcaagagcagccagtctctgctggacggcgacggcaagacctacctgaattggctgctccagaagcctggacagagccctcagcggctgatctacctggtgtccaagctggatagcggcgtgcccgatagattttctggcagcggctctggcaccgacttcaccctgaagatcagcagagtggaagccgaggacgtgggcgtgtactactgttggcagggcacacacttccccagaacattcggccagggcacaaagctggaaatcaaactcgaggacctgaagaacgtgttcccacctgaggtggccgtgttcgagcctagcgaggccgagatcagccacacccagaaagccaccctcgtgtgcctggctaccggcttctaccccgaccatgtggaactgtcttggtgggtcaacggcaaagaggtgcacagcggcgtgtgtaccgacccccagccactgaaagaacagcccgccctgaacgacagccggtactgcctgagcagcagactgagagtgtccgccaccttctggcagaacccccggaaccacttcagatgccaggtgcagttctacggcctgagcgagaacgacgagtggacccaggacagagccaagcccgtgacccagatcgtgtctgccgaagcctggggcagagccgatgatgtgattaagatccactggcaggaaaagaagtccaacaccatcctgggcagccaggaaggcaacaccatgaagaccaacgacacctacatgaagttcagctggctgaccgtgcccgagaagtccctggacaaagaacacagatgcatcgtgcggcacgaaaacaacaagaacggcgtggaccaggaaatcatcttcccacccatcaagaccgatgtgattacaatggaccccaaggacaactgctccaaggacgccaacgataccctgctgctccagctgaccaacaccagcgcctactacatgtacttgttgctgctgctgaagtccgtggtgtacttcgccatcatcacatgctgcctgctgatggctatggtcaagcggaaggacagccggggaagggccaagcgatctggatctggagcaacaaacttctcactactcaaacaagcaggtgacgtggaggagaatcccgggcctactagtatggactggatttggcgcatccttttccttgtcggcgctgctaccggcgcgcattccttcgaacaagtgcaactggttcagagcggagccgaagtgaagaaacctggggcctctgtgaaggtgtcctgcaaggccagcggctacaccttcaaggacacctacatccactgggtccgacaggcccctggacaaggacttgagtggatgggcagaatcgaccccgccaacggcaacaccaaatacgaccccaagttccagggcagagtgaccatgaccagagacaccagcatcagcaccgcctacatggaactgagccggctgagatccgatgacaccgccgtgtactattgcgctagaagaggcggagtggattggggccagggaacactggttaccgtgtctagtacgcgtatccagaaccctgatcctgccgtgtaccagctgcgggatagcaagagcagcgacaagagcgtgtgtctgttcaccgacttcgacagccagaccaacgtgtcccagagcaaggactccgacgtgtacatcaccgataagtgcgtgctggacatgcggagcatggacttcaagagcaactccgccgtggcctggtccaacaagtccgatttcgcctgcgccaacgccttcaacaacagcattatccccgaggacacattcttcccaagccccgagagcagcgactccaccgaccacgtgaagcccaaagagacagagaacaccaagcagcccagcaagagctgccacaagcccaaggccatcgtgcacaccgagaaagtgaacatgatgagcctgaccgtgctgggcctgcggatgctgttcgccaaaaccgtggccgtgaacttcctgctgaccgccaagctgttcttcctcctcaccgcc

SEQ ID NO: 6128 - DNA, 2172 bp, synthetic construct
  source 1..2172: mol_type = other DNA
atggccttaccagtgaccgccttgctcctgccgctggccttgctgctccacgccgccaggccggacatccagatgacacagagccctagcagcctgtctgccagcgtgggagacagagtgaccatcacatgcaaggccagccaggatgtgtctacagccgtggcctggttccagcagaagcctggaaaagcccctaagctgctgatctacagccccagctacagatacaccggcgtgcccagcagattttctggcagcggctctggcaccgacttcaccctgacaatatccagcctccagcctgaggacttcacctactactgccagcagctctacagcaccccttacacattcggccagggcaccaaggtggaaatcaaactcgaggacctgaagaacgtgttcccacctgaggtggccgtgttcgagcctagcgaggccgagatcagccacacccagaaagccaccctcgtgtgcctggctaccggcttctaccccgaccatgtggaactgtcttggtgggtcaacggcaaagaggtgcacagcggcgtgtgtaccgacccccagccactgaaagaacagcccgccctgaacgacagccggtactgcctgagcagcagactgagagtgtccgccaccttctggcagaacccccggaaccacttcagatgccaggtgcagttctacggcctgagcgagaacgacgagtggacccaggacagagccaagcccgtgacccagatcgtgtctgccgaagcctggggcagagccgatgatgtgattaagatccactggcaggaaaagaagtccaacaccatcctgggcagccaggaaggcaacaccatgaagaccaacgacacctacatgaagttcagctggctgaccgtgcccgagaagtccctggacaaagaacacagatgcatcgtgcggcacgaaaacaacaagaacggcgtggaccaggaaatcatcttcccacccatcaagaccgatgtgattacaatggaccccaaggacaactgctccaaggacgccaacgataccctgctgctccagctgaccaacaccagcgcctactacatgtacttgttgctgctgctgaagtccgtggtgtacttcgccatcatcacatgctgcctgctgatggctatggtcaagcggaaggacagccggggaagggccaagcgatctggatctggagcaacaaacttctcactactcaaacaagcaggtgacgtggaggagaatcccgggcctactagtatggactggatttggcgcatccttttccttgtcggcgctgctaccggcgcgcattccttcgaagaagtgcaactggttcagagcggagccgaagtgaagaaacctggggcctctgtgaaggtgtcctgcaaagccagcggctacacctttaccgactactacctggacgtggtcgtgcggcaagctcctggacaaggactggaatggatcggcagagtgaacccctacaacggcggcaccatctacaaccagaaattcaagggaagagtgaccctgaccagagacaccagcacctccacagcctacctggaactgagcagcctgagaagcgaagataccgccgtgtactactgcgccagggaccactacagatatgaccctctgctggactactggggccagggaaccctggttacagtgtctagtacgcgtatccagaaccctgatcctgccgtgtaccagctgcgggatagcaagagcagcgacaagagcgtgtgtctgttcaccgacttcgacagccagaccaacgtgtcccagagcaaggactccgacgtgtacatcaccgataagtgcgtgctggacatgcggagcatggacttcaagagcaactccgccgtggcctggtccaacaagtccgatttcgcctgcgccaacgccttcaacaacagcattatccccgaggacacattcttcccaagccccgagagcagcgactccaccgaccacgtgaagcccaaagagacagagaacaccaagcagcccagcaagagctgccacaagcccaaggccatcgtgcacaccgagaaagtgaacatgatgagcctgaccgtgctgggcctgcggatgctgttcgccaaaaccgtggccgtgaacttcctgctgaccgccaagctgttcttcctcctcaccgcc

SEQ ID NO: 6129 - DNA, 2190 bp, synthetic construct
  source 1..2190: mol_type = other DNA
atggccttaccagtgaccgccttgctcctgccgctggccttgctgctccacgccgccaggccggacatccagatgacacagagccctagcagcctgtctgccagcgtgggagacagagtgaccatcacctgtagagccagccagagcgtgtccaccagcagctacaactacatgcactggtatcagcagaagcccggcaagcctcctaagctgctgattaagtacgccagcaacctggaaagcggcgtgcccagcagattttctggcagcggctctggcaccgacttcaccctgacaatatccagcctccagcctgaggacttcgccacctactactgtcagcactcctgggagatccctctgacattcggccagggcaccaaggtggaaatcaaactcgaggacctgaagaacgtgttcccacctgaggtggccgtgttcgagcctagcgaggccgagatcagccacacccagaaagccaccctcgtgtgcctggctaccggcttctaccccgaccatgtggaactgtcttggtgggtcaacggcaaagaggtgcacagcggcgtgtgtaccgacccccagccactgaaagaacagcccgccctgaacgacagccggtactgcctgagcagcagactgagagtgtccgccaccttctggcagaacccccggaaccacttcagatgccaggtgcagttctacggcctgagcgagaacgacgagtggacccaggacagagccaagcccgtgacccagatcgtgtctgccgaagcctggggcagagccgatgatgtgattaagatccactggcaggaaaagaagtccaacaccatcctgggcagccaggaaggcaacaccatgaagaccaacgacacctacatgaagttcagctggctgaccgtgcccgagaagtccctggacaaagaacacagatgcatcgtgcggcacgaaaacaacaagaacggcgtggaccaggaaatcatcttcccacccatcaagaccgatgtgattacaatggaccccaaggacaactgctccaaggacgccaacgataccctgctgctccagctgaccaacaccagcgcctactacatgtacttgttgctgctgctgaagtccgtggtgtacttcgccatcatcacatgctgcctgctgatggctatggtcaagcggaaggacagccggggaagggccaagcgatctggatctggagcaacaaacttctcactactcaaacaagcaggtgacgtggaggagaatcccgggcctactagtatggactggatttggcgcatccttttccttgtcggcgctgctaccggcgcgcattccttcgaagaagtgcaactggttcagagcggagccgaagtgaagaaacctggggcctctgtgaaggtgtcctgcaaggccagcggctacagcttcaccgactattatatgcactgggtccgacaggctccaggccagggacttgagtggatcggcagaatcaacccctacaacggcgctgccttctacagccagaacttcaaggatagagtgaccctgaccgtggacaccagcaccagcacagcctacctggaactgagcagcctgagaagcgaggacaccgccgtgtactactgcgccattgagagaggcgctgacctggaaggctacgctatggattattggggccagggaaccctggtcaccgtgtcatctacgcgtatccagaaccctgatcctgccgtgtaccagctgcgggatagcaagagcagcgacaagagcgtgtgtctgttcaccgacttcgacagccagaccaacgtgtcccagagcaaggactccgacgtgtacatcaccgataagtgcgtgctggacatgcggagcatggacttcaagagcaactccgccgtggcctggtccaacaagtccgatttcgcctgcgccaacgccttcaacaacagcattatccccgaggacacattcttcccaagccccgagagcagcgactccaccgaccacgtgaagcccaaagagacagagaacaccaagcagcccagcaagagctgccacaagcccaaggccatcgtgcacaccgagaaagtgaacatgatgagcctgaccgtgctgggcctgcggatgctgttcgccaaaaccgtggccgtgaacttcctgctgaccgccaagctgttcttcctcctcaccgcc

SEQ ID NO: 6130 - DNA, 2184 bp, synthetic construct
  source 1..2184: mol_type = other DNA
atggccttaccagtgaccgccttgctcctgccgctggccttgctgctccacgccgccaggccggagatcgtgctgacacagtctccagccacactgagcgcttctccaggcgagagagtgaccctgacctgtagagccagcagcaacgtgatctccagctacgtgcactggtatcagcagaagcctggcagcagccccagactgtttctgtacagcaccagcaatctggcctccggcgtgccaagcagattttctggctctggcagcggcaccgacttcacctttaccatctctagcctggaagccgaggacgccgccacctactactgtcagcagtacagcggctaccctctgaccttcggccagggcacaagactggaaatcaaactcgaggacctgaagaacgtgttcccacctgaggtggccgtgttcgagcctagcgaggccgagatcagccacacccagaaagccaccctcgtgtgcctggctaccggcttctaccccgaccatgtggaactgtcttggtgggtcaacggcaaagaggtgcacagcggcgtgtgtaccgacccccagccactgaaagaacagcccgccctgaacgacagccggtactgcctgagcagcagactgagagtgtccgccaccttctggcagaacccccggaaccacttcagatgccaggtgcagttctacggcctgagcgagaacgacgagtggacccaggacagagccaagcccgtgacccagatcgtgtctgccgaagcctggggcagagccgatgatgtgattaagatccactggcaggaaaagaagtccaacaccatcctgggcagccaggaaggcaacaccatgaagaccaacgacacctacatgaagttcagctggctgaccgtgcccgagaagtccctggacaaagaacacagatgcatcgtgcggcacgaaaacaacaagaacggcgtggaccaggaaatcatcttcccacccatcaagaccgatgtgattacaatggaccccaaggacaactgctccaaggacgccaacgataccctgctgctccagctgaccaacaccagcgcctactacatgtacttgttgctgctgctgaagtccgtggtgtacttcgccatcatcacatgctgcctgctgatggctatggtcaagcggaaggacagccggggaagggccaagcgatctggatctggagcaacaaacttctcactactcaaacaagcaggtgacgtggaggagaatcccgggcctactagtatggactggatttggcgcatccttttccttgtcggcgctgctaccggcgcgcattccttcgaacaagttcagctgcaagagtctggccctggcctggtcaagcctagcgaaacactgagcctgacctgcgccgtgtctggctactctatcaccagcgcctactattggaactggatcagacagcctcctggcaaaggactggaatggatcggctacatcagctacgacggcagaaacaactacaaccccagcctgaagaaccggatcaccatcaatcccgacaccagcaagaaccagttcagcctccagctgaacagcgtgacccctgaggataccgccgtgtactactgtgccagagaaggcgactacgacgtgggcaactactacgctatggactactggggccagggaaccctggtcacagtctcttctacgcgtatccagaaccctgatcctgccgtgtaccagctgcgggatagcaagagcagcgacaagagcgtgtgtctgttcaccgacttcgacagccagaccaacgtgtcccagagcaaggactccgacgtgtacatcaccgataagtgcgtgctggacatgcggagcatggacttcaagagcaactccgccgtggcctggtccaacaagtccgatttcgcctgcgccaacgccttcaacaacagcattatccccgaggacacattcttcccaagccccgagagcagcgactccaccgaccacgtgaagcccaaagagacagagaacaccaagcagcccagcaagagctgccacaagcccaaggccatcgtgcacaccgagaaagtgaacatgatgagcctgaccgtgctgggcctgcggatgctgttcgccaaaaccgtggccgtgaacttcctgctgaccgccaagctgttcttcctcctcaccgcc

SEQ ID NO: 6131 - DNA, 2184 bp, synthetic construct
  source 1..2184: mol_type = other DNA
atggccttaccagtgaccgccttgctcctgccgctggccttgctgctccacgccgccaggccggagatcgtgctgacacagtctcccgccacactgtcactgtctccaggcgaaagagccacactgagctgtagagccagcagcaacgtgatctccagctacgtgcactggtatcagcagaagcctggacaggcccctcggctgctgatctacagcacaagcaatctggcctctggcatccccgccagattttctggctctggaagcggcaccgacttcaccctgaccataagcagcctggaacctgaggacttcgccgtgtactactgccagcagtatagcggctaccctctgaccttcggccagggcacaagactggaaatcaaactcgaggacctgaagaacgtgttcccacctgaggtggccgtgttcgagcctagcgaggccgagatcagccacacccagaaagccaccctcgtgtgcctggctaccggcttctaccccgaccatgtggaactgtcttggtgggtcaacggcaaagaggtgcacagcggcgtgtgtaccgacccccagccactgaaagaacagcccgccctgaacgacagccggtactgcctgagcagcagactgagagtgtccgccaccttctggcagaacccccggaaccacttcagatgccaggtgcagttctacggcctgagcgagaacgacgagtggacccaggacagagccaagcccgtgacccagatcgtgtctgccgaagcctggggcagagccgatgatgtgattaagatccactggcaggaaaagaagtccaacaccatcctgggcagccaggaaggcaacaccatgaagaccaacgacacctacatgaagttcagctggctgaccgtgcccgagaagtccctggacaaagaacacagatgcatcgtgcggcacgaaaacaacaagaacggcgtggaccaggaaatcatcttcccacccatcaagaccgatgtgattacaatggaccccaaggacaactgctccaaggacgccaacgataccctgctgctccagctgaccaacaccagcgcctactacatgtacttgttgctgctgctgaagtccgtggtgtacttcgccatcatcacatgctgcctgctgatggctatggtcaagcggaaggacagccggggaagggccaagcgatctggatctggagcaacaaacttctcactactcaaacaagcaggtgacgtggaggagaatcccgggcctactagtatggactggatttggcgcatccttttccttgtcggcgctgctaccggcgcgcattccttcgaagaagtgcaactggtggaaagtggcggcggactggtgcaacctggaagaagcctgagactgtcctgtgccgccagcggctactctatcacaagcgcctactactggaactgggtccgacaggctcctggcaaaggactggaatgggtgtcctacatcagctacgacggcagaaacaactacaaccccagcctgaagaaccgcttcaccatcagccgggacaacgccaagaagtccctgtacctccagatgaacagcctgagagccgaggacacagccctgtactattgcgccaaagagggcgactacgacgtcggcaactactacgctatggactactggggccagggaaccaccgtgactgtctcttctacgcgtatccagaaccctgatcctgccgtgtaccagctgcgggatagcaagagcagcgacaagagcgtgtgtctgttcaccgacttcgacagccagaccaacgtgtcccagagcaaggactccgacgtgtacatcaccgataagtgcgtgctggacatgcggagcatggacttcaagagcaactccgccgtggcctggtccaacaagtccgatttcgcctgcgccaacgccttcaacaacagcattatccccgaggacacattcttcccaagccccgagagcagcgactccaccgaccacgtgaagcccaaagagacagagaacaccaagcagcccagcaagagctgccacaagcccaaggccatcgtgcacaccgagaaagtgaacatgatgagcctgaccgtgctgggcctgcggatgctgttcgccaaaaccgtggccgtgaacttcctgctgaccgccaagctgttcttcctcctcaccgcc

SEQ ID NO: 6132 - DNA, 2181 bp, synthetic construct
  source 1..2181: mol_type = other DNA
atggccttaccagtgaccgccttgctcctgccgctggccttgctgctccacgccgccaggccggacgtggtcatgacacagaccccactgagcctgcctgtgtctctgggagatcaggccagcatctcctgtagaagcagccagagcctggtgcacagcaacggcaacacctacctgcggtggtatctccagaagcctggacagagccccaaggtgctgatctacaaggtgtccaacagagtgtccggcgtgcccgatagattttctggcagcggctctggcaccgacttcaccctgaagatcaatagagtggaagccgaggacctgggcgtgtacttctgtagccagagcacccatgtgccttggacctttggcggaggcaccaagctggaaatcaagctcgaggacctgaagaacgtgttcccacctgaggtggccgtgttcgagcctagcgaggccgagatcagccacacccagaaagccaccctcgtgtgcctggctaccggcttctaccccgaccatgtggaactgtcttggtgggtcaacggcaaagaggtgcacagcggcgtgtgtaccgacccccagccactgaaagaacagcccgccctgaacgacagccggtactgcctgagcagcagactgagagtgtccgccaccttctggcagaacccccggaaccacttcagatgccaggtgcagttctacggcctgagcgagaacgacgagtggacccaggacagagccaagcccgtgacccagatcgtgtctgccgaagcctggggcagagccgatgatgtgattaagatccactggcaggaaaagaagtccaacaccatcctgggcagccaggaaggcaacaccatgaagaccaacgacacctacatgaagttcagctggctgaccgtgcccgagaagtccctggacaaagaacacagatgcatcgtgcggcacgaaaacaacaagaacggcgtggaccaggaaatcatcttcccacccatcaagaccgatgtgattacaatggaccccaaggacaactgctccaaggacgccaacgataccctgctgctccagctgaccaacaccagcgcctactacatgtacttgttgctgctgctgaagtccgtggtgtacttcgccatcatcacatgctgcctgctgatggctatggtcaagcggaaggacagccggggaagggccaagcgatctggatctggagcaacaaacttctcactactcaaacaagcaggtgacgtggaggagaatcccgggcctactagtatggactggatttggcgcatccttttccttgtcggcgctgctaccggcgcgcattccttcgaaggcgtgaagctggacgagacaggcggaggacttgttcaacctggcggagccatgaagctgagctgtgtgaccagcggctttaccttcggccactactggatgaactgggtccgacagtcccctgagaaaggactggaatgggtcgcccagttcagaaacaagccctacaactacgaaacctactacagcgacagcgtgaagggcagattcaccatcagccgggacgacagcaagtccagcgtgtacctccagatgaacaacctgcgcgtggaagataccggcatctactactgtaccggggccagctacggcatggaatatctcggccagggcaccagcgtgaccgtgtctacaacgcgtatccagaaccctgatcctgccgtgtaccagctgcgggatagcaagagcagcgacaagagcgtgtgtctgttcaccgacttcgacagccagaccaacgtgtcccagagcaaggactccgacgtgtacatcaccgataagtgcgtgctggacatgcggagcatggacttcaagagcaactccgccgtggcctggtccaacaagtccgatttcgcctgcgccaacgccttcaacaacagcattatccccgaggacacattcttcccaagccccgagagcagcgactccaccgaccacgtgaagcccaaagagacagagaacaccaagcagcccagcaagagctgccacaagcccaaggccatcgtgcacaccgagaaagtgaacatgatgagcctgaccgtgctgggcctgcggatgctgttcgccaaaaccgtggccgtgaacttcctgctgaccgccaagctgttcttcctcctcaccgcc

SEQ ID NO: 6133 - DNA, 2199 bp, synthetic construct
  source 1..2199: mol_type = other DNA
atggccttaccagtgaccgccttgctcctgccgctggccttgctgctccacgccgccaggccgcaggtgcaactggtggaatctggcggcaatctggttcagcctggcggctctctgagactgtcttgtgccgccagcggcttcaccttcggcagcttttctatgagctgggtccgacaagctcctggcggaggacttgaatgggtggcaggactgtctgccagaagcagcctgacacactacgccgactctgtgaagggcagattcaccatcagccgggacaacgccaagaacagcgtgtacctccagatgaacagcctgagagtggaagataccgccgtgtactactgcgccagaagaagctacgacagcagcggctactggggccacttctacagctacatggatgtgtggggccagggcaccctggttacagtttctctcgaggacctgaagaacgtgttcccacctgaggtggccgtgttcgagcctagcgaggccgagatcagccacacccagaaagccaccctcgtgtgcctggctaccggcttctaccccgaccatgtggaactgtcttggtgggtcaacggcaaagaggtgcacagcggcgtgtgtaccgacccccagccactgaaagaacagcccgccctgaacgacagccggtactgcctgagcagcagactgagagtgtccgccaccttctggcagaacccccggaaccacttcagatgccaggtgcagttctacggcctgagcgagaacgacgagtggacccaggacagagccaagcccgtgacccagatcgtgtctgccgaagcctggggcagagccgatgatgtgattaagatccactggcaggaaaagaagtccaacaccatcctgggcagccaggaaggcaacaccatgaagaccaacgacacctacatgaagttcagctggctgaccgtgcccgagaagtccctggacaaagaacacagatgcatcgtgcggcacgaaaacaacaagaacggcgtggaccaggaaatcatcttcccacccatcaagaccgatgtgattacaatggaccccaaggacaactgctccaaggacgccaacgataccctgctgctccagctgaccaacaccagcgcctactacatgtacttgttgctgctgctgaagtccgtggtgtacttcgccatcatcacatgctgcctgctgatggctatggtcaagcggaaggacagccggggaagggccaagcgatctggatctggagcaacaaacttctcactactcaaacaagcaggtgacgtggaggagaatcccgggcctactagtatggactggatttggcgcatccttttccttgtcggcgctgctaccggcgcgcattccttcgaatctgtgctgacccagcctagctccgtgtctgctgctcctggacagaaagtgaccatctcctgtagcggcagcaccagcaacatcggcaacaactacgtgtcctggtatcagcagcaccccggcaaggcccctaagctgatgatctacgacgtgtccaagaggcccagcggcgtgccagatagattttccggcagcaagagcggcaacagcgccagcctggatattagcggactccagtctgaggacgaggccgactactattgcgccgcctgggatgatagcctgagcgagtttctgtttggcaccggcaccaagctgacagtgcttggaacgcgtatccagaaccctgatcctgccgtgtaccagctgcgggatagcaagagcagcgacaagagcgtgtgtctgttcaccgacttcgacagccagaccaacgtgtcccagagcaaggactccgacgtgtacatcaccgataagtgcgtgctggacatgcggagcatggacttcaagagcaactccgccgtggcctggtccaacaagtccgatttcgcctgcgccaacgccttcaacaacagcattatccccgaggacacattcttcccaagccccgagagcagcgactccaccgaccacgtgaagcccaaagagacagagaacaccaagcagcccagcaagagctgccacaagcccaaggccatcgtgcacaccgagaaagtgaacatgatgagcctgaccgtgctgggcctgcggatgctgttcgccaaaaccgtggccgtgaacttcctgctgaccgccaagctgttcttcctcctcaccgcc

SEQ ID NO: 6134 - DNA, 2184 bp, synthetic construct
  source 1..2184: mol_type = other DNA
atggccttaccagtgaccgccttgctcctgccgctggccttgctgctccacgccgccaggccggacgtggtcatgacacagagcccttctagcctgtctgccagcgtgggcgacagagtgacaatcacctgtcagagcagcctggacatcagccactacctgaactggtatcagcagaagcccggcaaggcccctaagctgctgatctacgacgccagcaatctggaaaccggcgtgcccagcagattttctggcagcggaagcggcacccacttcaccttcacaatatccagcctccagcctgaggacttcgccacctactactgccagcagtacgacaacctgcctctgacctttggcggaggcaccaagctggaaatcaagagactcgaggacctgaagaacgtgttcccacctgaggtggccgtgttcgagcctagcgaggccgagatcagccacacccagaaagccaccctcgtgtgcctggctaccggcttctaccccgaccatgtggaactgtcttggtgggtcaacggcaaagaggtgcacagcggcgtgtgtaccgacccccagccactgaaagaacagcccgccctgaacgacagccggtactgcctgagcagcagactgagagtgtccgccaccttctggcagaacccccggaaccacttcagatgccaggtgcagttctacggcctgagcgagaacgacgagtggacccaggacagagccaagcccgtgacccagatcgtgtctgccgaagcctggggcagagccgatgatgtgattaagatccactggcaggaaaagaagtccaacaccatcctgggcagccaggaaggcaacaccatgaagaccaacgacacctacatgaagttcagctggctgaccgtgcccgagaagtccctggacaaagaacacagatgcatcgtgcggcacgaaaacaacaagaacggcgtggaccaggaaatcatcttcccacccatcaagaccgatgtgattacaatggaccccaaggacaactgctccaaggacgccaacgataccctgctgctccagctgaccaacaccagcgcctactacatgtacttgttgctgctgctgaagtccgtggtgtacttcgccatcatcacatgctgcctgctgatggctatggtcaagcggaaggacagccggggaagggccaagcgatctggatctggagcaacaaacttctcactactcaaacaagcaggtgacgtggaggagaatcccgggcctactagtatggactggatttggcgcatccttttccttgtcggcgctgctaccggcgcgcattccttcgaacaagttcaactggttcaatcaggcggaggcgtggtgcaacctggtggctctctgagagtgtcttgtgctgcctctggcgtgaccctgagcgactatggaatgcactgggtccgacaggcccctggcaaaggacttgagtgggtcgccttcatcagaaacgacggcagcgacaagtattacgccgacagcgtgaagggcagattcaccatcagccgggacaacagcgagaaaaccgtgtctctccagatgtctagcctgagagccgaggacaccgccgtgtactactgtgccaagaatggcgagagcggccctctggactactggtatctggatctgtggggcagaggcaccctggtcacagtctcttctacgcgtatccagaaccctgatcctgccgtgtaccagctgcgggatagcaagagcagcgacaagagcgtgtgtctgttcaccgacttcgacagccagaccaacgtgtcccagagcaaggactccgacgtgtacatcaccgataagtgcgtgctggacatgcggagcatggacttcaagagcaactccgccgtggcctggtccaacaagtccgatttcgcctgcgccaacgccttcaacaacagcattatccccgaggacacattcttcccaagccccgagagcagcgactccaccgaccacgtgaagcccaaagagacagagaacaccaagcagcccagcaagagctgccacaagcccaaggccatcgtgcacaccgagaaagtgaacatgatgagcctgaccgtgctgggcctgcggatgctgttcgccaaaaccgtggccgtgaacttcctgctgaccgccaagctgttcttcctcctcaccgcc

SEQ ID NO: 6135 - DNA, 2196 bp, synthetic construct
  source 1..2196: mol_type = other DNA
atggccttaccagtgaccgccttgctcctgccgctggccttgctgctccacgccgccaggccgagctacgagctgacacagcctccatccgtgtctggcacacctggacagagagtggctatctcctgtagcggcagcagcagcaacatcggcaccagaatggtcacctggtatcagcacgtgccaggcacagcccctaagctgctgatcttcaacaacaaccagcggcctagcggcgtgcccgatagattttctgccagcaagagcggcacaagcgccagcctggctatcatcggactccagtctgacgacgaggccgactactactgtgccacctgggacgacaacgtgaagtcctacgtgttcggcaccggcaccaaagtgacagtgcttggaagtagactcgaggacctgaagaacgtgttcccacctgaggtggccgtgttcgagcctagcgaggccgagatcagccacacccagaaagccaccctcgtgtgcctggctaccggcttctaccccgaccatgtggaactgtcttggtgggtcaacggcaaagaggtgcacagcggcgtgtgtaccgacccccagccactgaaagaacagcccgccctgaacgacagccggtactgcctgagcagcagactgagagtgtccgccaccttctggcagaacccccggaaccacttcagatgccaggtgcagttctacggcctgagcgagaacgacgagtggacccaggacagagccaagcccgtgacccagatcgtgtctgccgaagcctggggcagagccgatgatgtgattaagatccactggcaggaaaagaagtccaacaccatcctgggcagccaggaaggcaacaccatgaagaccaacgacacctacatgaagttcagctggctgaccgtgcccgagaagtccctggacaaagaacacagatgcatcgtgcggcacgaaaacaacaagaacggcgtggaccaggaaatcatcttcccacccatcaagaccgatgtgattacaatggaccccaaggacaactgctccaaggacgccaacgataccctgctgctccagctgaccaacaccagcgcctactacatgtacttgttgctgctgctgaagtccgtggtgtacttcgccatcatcacatgctgcctgctgatggctatggtcaagcggaaggacagccggggaagggccaagcgatctggatctggagcaacaaacttctcactactcaaacaagcaggtgacgtggaggagaatcccgggcctactagtatggactggatttggcgcatccttttccttgtcggcgctgctaccggcgcgcattccttcgaacttgaaatggcccaggttcagctccagcagtggggagctggactgctgaagcctagcgagacactgagcctgacctgtgctgtgtacggcggcagcttcagcggctactactggtcctggatcagacagcctcctggcaaaggactggaatggatcggcgagatcaaccacagcggctccaccaactacaaccccagcctgaagtccagagtgaccatcagcgtggacaccagcaagaaccagttctccctgaagctgagcagcgtgacagccgctgataccgccgtgtactattgcgctagagcccctcagtcttggtacgtgggagatgtgtggggccagggcacactggttacagtgtcatctacgcgtatccagaaccctgatcctgccgtgtaccagctgcgggatagcaagagcagcgacaagagcgtgtgtctgttcaccgacttcgacagccagaccaacgtgtcccagagcaaggactccgacgtgtacatcaccgataagtgcgtgctggacatgcggagcatggacttcaagagcaactccgccgtggcctggtccaacaagtccgatttcgcctgcgccaacgccttcaacaacagcattatccccgaggacacattcttcccaagccccgagagcagcgactccaccgaccacgtgaagcccaaagagacagagaacaccaagcagcccagcaagagctgccacaagcccaaggccatcgtgcacaccgagaaagtgaacatgatgagcctgaccgtgctgggcctgcggatgctgttcgccaaaaccgtggccgtgaacttcctgctgaccgccaagctgttcttcctcctcaccgcc

SEQ ID NO: 6136 - DNA, 2187 bp, synthetic construct
  source 1..2187: mol_type = other DNA
atggccttaccagtgaccgccttgctcctgccgctggccttgctgctccacgccgccaggccgcagtctgtgctgacacagcctcctagcctgtctgtggcccctggaaagacagccagcatcacatgcggcggcaacaacatcggcatgaagtccgtgcactggtatcagcagaggccaggacaggctcctgtgctggtcatctactacgacagcgacagaccctctggcatccccggcagattttccggcagcaactctggcaataccgccacactgaccatctccagagtggaagctggcgacgaggccgactactactgccaagtgtgggataccaccggcgatcaccctggctatgtgtttggcaccggcaccaaagtgacagtgcttctcgaggacctgaagaacgtgttcccacctgaggtggccgtgttcgagcctagcgaggccgagatcagccacacccagaaagccaccctcgtgtgcctggctaccggcttctaccccgaccatgtggaactgtcttggtgggtcaacggcaaagaggtgcacagcggcgtgtgtaccgacccccagccactgaaagaacagcccgccctgaacgacagccggtactgcctgagcagcagactgagagtgtccgccaccttctggcagaacccccggaaccacttcagatgccaggtgcagttctacggcctgagcgagaacgacgagtggacccaggacagagccaagcccgtgacccagatcgtgtctgccgaagcctggggcagagccgatgatgtgattaagatccactggcaggaaaagaagtccaacaccatcctgggcagccaggaaggcaacaccatgaagaccaacgacacctacatgaagttcagctggctgaccgtgcccgagaagtccctggacaaagaacacagatgcatcgtgcggcacgaaaacaacaagaacggcgtggaccaggaaatcatcttcccacccatcaagaccgatgtgattacaatggaccccaaggacaactgctccaaggacgccaacgataccctgctgctccagctgaccaacaccagcgcctactacatgtacttgttgctgctgctgaagtccgtggtgtacttcgccatcatcacatgctgcctgctgatggctatggtcaagcggaaggacagccggggaagggccaagcgatctggatctggagcaacaaacttctcactactcaaacaagcaggtgacgtggaggagaatcccgggcctactagtatggactggatttggcgcatccttttccttgtcggcgctgctaccggcgcgcattccttcgaacaagttcaactggttcagagcggagccgaagtgaagaaacctggcagcagcgtgaaggtgtcctgcaaagcaagcggcggcacctttagcagctacgccatctcttgggtccgacaggcacctggacaaggactggaatggatgggcggcatcatccccatcttcggcacagccaattacgcccagaaattccagggcagagtgaccatcaccgccgacgagtctacaagcaccgcctacatggaactgagcagcctgagaagcgaggacaccgccgtgtactattgtgccagaggcgtgtacggctacagcggctctgccccttatgatgagtggggccagggaaccctggtcaccgtttcttctacgcgtatccagaaccctgatcctgccgtgtaccagctgcgggatagcaagagcagcgacaagagcgtgtgtctgttcaccgacttcgacagccagaccaacgtgtcccagagcaaggactccgacgtgtacatcaccgataagtgcgtgctggacatgcggagcatggacttcaagagcaactccgccgtggcctggtccaacaagtccgatttcgcctgcgccaacgccttcaacaacagcattatccccgaggacacattcttcccaagccccgagagcagcgactccaccgaccacgtgaagcccaaagagacagagaacaccaagcagcccagcaagagctgccacaagcccaaggccatcgtgcacaccgagaaagtgaacatgatgagcctgaccgtgctgggcctgcggatgctgttcgccaaaaccgtggccgtgaacttcctgctgaccgccaagctgttcttcctcctcaccgcc

SEQ ID NO: 6137 - DNA, 2181 bp, synthetic construct
  source 1..2181: mol_type = other DNA
atggccttaccagtgaccgccttgctcctgccgctggccttgctgctccacgccgccaggccggaggtgcaactggttgagtctggcggaggactggtgcagcctggaagaagcctgagactgtcttgtgccgccagcggcttcaccttcgacgattatgccatgcactgggtccgacaggcccctggcaaaggacttgaatgggtgtccggcatctcctggaacagcggctctatcggctacgccgattccgtgaagggcagattcaccatcagccgggacaacgccaagaacagcctgtacctccagatgaactccctgagagccgaggacacagccctgtactactgcgccaaagacaaaggcggaggctactacgacttttggagcggcagcgattattggggccagggcacactggtcacagtgtctagcctcgaggacctgaagaacgtgttcccacctgaggtggccgtgttcgagcctagcgaggccgagatcagccacacccagaaagccaccctcgtgtgcctggctaccggcttctaccccgaccatgtggaactgtcttggtgggtcaacggcaaagaggtgcacagcggcgtgtgtaccgacccccagccactgaaagaacagcccgccctgaacgacagccggtactgcctgagcagcagactgagagtgtccgccaccttctggcagaacccccggaaccacttcagatgccaggtgcagttctacggcctgagcgagaacgacgagtggacccaggacagagccaagcccgtgacccagatcgtgtctgccgaagcctggggcagagccgatgatgtgattaagatccactggcaggaaaagaagtccaacaccatcctgggcagccaggaaggcaacaccatgaagaccaacgacacctacatgaagttcagctggctgaccgtgcccgagaagtccctggacaaagaacacagatgcatcgtgcggcacgaaaacaacaagaacggcgtggaccaggaaatcatcttcccacccatcaagaccgatgtgattacaatggaccccaaggacaactgctccaaggacgccaacgataccctgctgctccagctgaccaacaccagcgcctactacatgtacttgttgctgctgctgaagtccgtggtgtacttcgccatcatcacatgctgcctgctgatggctatggtcaagcggaaggacagccggggaagggccaagcgatctggatctggagcaacaaacttctcactactcaaacaagcaggtgacgtggaggagaatcccgggcctactagtatggactggatttggcgcatccttttccttgtcggcgctgctaccggcgcgcattccttcgaatcttctgagctgacacaggaccctgccgtgtctgttgctctgggccagacagtgcggattacctgtcagggcgatagcctgagaagctactacgcctcctggtatcagcagaagccaggccaggctcctgtgctggtcatctacggcaagaacaacagacccagcggcatccccgatagattcagcggaagcagctctggcaataccgccagcctgacaattactggcgctcaggccgaggacgaggccgactactactgcaacagcagagatagcagcggctgggttttcggcggaggcacaaaactgacagtgctgacgcgtatccagaaccctgatcctgccgtgtaccagctgcgggatagcaagagcagcgacaagagcgtgtgtctgttcaccgacttcgacagccagaccaacgtgtcccagagcaaggactccgacgtgtacatcaccgataagtgcgtgctggacatgcggagcatggacttcaagagcaactccgccgtggcctggtccaacaagtccgatttcgcctgcgccaacgccttcaacaacagcattatccccgaggacacattcttcccaagccccgagagcagcgactccaccgaccacgtgaagcccaaagagacagagaacaccaagcagcccagcaagagctgccacaagcccaaggccatcgtgcacaccgagaaagtgaacatgatgagcctgaccgtgctgggcctgcggatgctgttcgccaaaaccgtggccgtgaacttcctgctgaccgccaagctgttcttcctcctcaccgcc

SEQ ID NO: 6138 - DNA, 2208 bp, synthetic construct
  source 1..2208: mol_type = other DNA
atggccttaccagtgaccgccttgctcctgccgctggccttgctgctccacgccgccaggccggaagtgcagctccagcagtctggacctggcctggttaagcctagccagacactgagcctgacctgtgccatcagcggcgatagcgtgctgagcaacagcgacacctggaactggatcagacagagccctagcagaggactggaatggctgggcagaacctaccacagaagcacttggtacgacgactacgccagctctgtgcggggcagagtgtccatcaatgtggacaccagcaagaaccagtacagcctgcaactgaacgccgtgacacctgaggataccggcgtgtactactgcgccagagacagactccaggacggcaactcttggagcgacgcctttgatgtgtggggccagggcacaatggtcaccgtttctagcctcgaggacctgaagaacgtgttcccacctgaggtggccgtgttcgagcctagcgaggccgagatcagccacacccagaaagccaccctcgtgtgcctggctaccggcttctaccccgaccatgtggaactgtcttggtgggtcaacggcaaagaggtgcacagcggcgtgtgtaccgacccccagccactgaaagaacagcccgccctgaacgacagccggtactgcctgagcagcagactgagagtgtccgccaccttctggcagaacccccggaaccacttcagatgccaggtgcagttctacggcctgagcgagaacgacgagtggacccaggacagagccaagcccgtgacccagatcgtgtctgccgaagcctggggcagagccgatgatgtgattaagatccactggcaggaaaagaagtccaacaccatcctgggcagccaggaaggcaacaccatgaagaccaacgacacctacatgaagttcagctggctgaccgtgcccgagaagtccctggacaaagaacacagatgcatcgtgcggcacgaaaacaacaagaacggcgtggaccaggaaatcatcttcccacccatcaagaccgatgtgattacaatggaccccaaggacaactgctccaaggacgccaacgataccctgctgctccagctgaccaacaccagcgcctactacatgtacttgttgctgctgctgaagtccgtggtgtacttcgccatcatcacatgctgcctgctgatggctatggtcaagcggaaggacagccggggaagggccaagcgatctggatctggagcaacaaacttctcactactcaaacaagcaggtgacgtggaggagaatcccgggcctactagtatggactggatttggcgcatccttttccttgtcggcgctgctaccggcgcgcattccttcgaacaatctgctctgacacagcctgccagcgtgtcaggatctcctggacagagcatcaccatctcttgcaccggcaccagctctgatgtcggcggctacaattacgtgtcctggtatcagcagcaccccggcaaggcccctaagctgatgatctacgacgtgtccaacagacccagcggcgtgtccaatagattctccggcagcaagagcggcaacaccgccagcctgacaatttctggactgcaagccgaggacgaggccgactactactgtagcagctacaccagcagcagcacactggtgtacgtgttcggcacaggcaccaaagtgaccgtgcttacgcgtatccagaaccctgatcctgccgtgtaccagctgcgggatagcaagagcagcgacaagagcgtgtgtctgttcaccgacttcgacagccagaccaacgtgtcccagagcaaggactccgacgtgtacatcaccgataagtgcgtgctggacatgcggagcatggacttcaagagcaactccgccgtggcctggtccaacaagtccgatttcgcctgcgccaacgccttcaacaacagcattatccccgaggacacattcttcccaagccccgagagcagcgactccaccgaccacgtgaagcccaaagagacagagaacaccaagcagcccagcaagagctgccacaagcccaaggccatcgtgcacaccgagaaagtgaacatgatgagcctgaccgtgctgggcctgcggatgctgttcgccaaaaccgtggccgtgaacttcctgctgaccgccaagctgttcttcctcctcaccgcc

SEQ ID NO: 6139 - DNA, 2142 bp, synthetic construct
  source 1..2142: mol_type = other DNA
atggccttaccagtgaccgccttgctcctgccgctggccttgctgctccacgccgccaggccgcaggtgcaactggttcagtctggggccgaagtgaagaaacctggggcctctgtgaaggtgtcctgcaaggcttccggctacacctttaccagctacgacatcaactgggtccgacaggccacaggccaaggactggaatggatgggctggatgaaccccaacagcggcaataccggctacgcccagaaattccagggcagagtgaccatgaccagaaacaccagcatcagcaccgcctacatggaactgagcagcctgagaagcgaggacaccgccgtgtactattgcgccagaggcgacagcaccaaggtggaaatcaaactcgaggacctgaagaacgtgttcccacctgaggtggccgtgttcgagcctagcgaggccgagatcagccacacccagaaagccaccctcgtgtgcctggctaccggcttctaccccgaccatgtggaactgtcttggtgggtcaacggcaaagaggtgcacagcggcgtgtgtaccgacccccagccactgaaagaacagcccgccctgaacgacagccggtactgcctgagcagcagactgagagtgtccgccaccttctggcagaacccccggaaccacttcagatgccaggtgcagttctacggcctgagcgagaacgacgagtggacccaggacagagccaagcccgtgacccagatcgtgtctgccgaagcctggggcagagccgatgatgtgattaagatccactggcaggaaaagaagtccaacaccatcctgggcagccaggaaggcaacaccatgaagaccaacgacacctacatgaagttcagctggctgaccgtgcccgagaagtccctggacaaagaacacagatgcatcgtgcggcacgaaaacaacaagaacggcgtggaccaggaaatcatcttcccacccatcaagaccgatgtgattacaatggaccccaaggacaactgctccaaggacgccaacgataccctgctgctccagctgaccaacaccagcgcctactacatgtacttgttgctgctgctgaagtccgtggtgtacttcgccatcatcacatgctgcctgctgatggctatggtcaagcggaaggacagccggggaagggccaagcgatctggatctggagcaacaaacttctcactactcaaacaagcaggtgacgtggaggagaatcccgggcctactagtatggactggatttggcgcatccttttccttgtcggcgctgctaccggcgcgcattccttcgaacaatctgtgctgacccagcctagatccgtgtctggctctcctggacagagcgtgaccatctcttgtaccggcaccagctctgatgtcggcggctacaattacgtgtcctggtatcagcagcaccccggcgaagcccctaagctgattatctacgacgccgacaagcggcccagcggcatcagcaatagattcagctctggcaagagcggcaacaccgccagcctgacaatcagcggactccaggtggaagatgaggccgactactactgctgctcctatgccggcggaagcacctgggttttcggaggcggtacaaaagtgaccgtgctgacgcgtatccagaaccctgatcctgccgtgtaccagctgcgggatagcaagagcagcgacaagagcgtgtgtctgttcaccgacttcgacagccagaccaacgtgtcccagagcaaggactccgacgtgtacatcaccgataagtgcgtgctggacatgcggagcatggacttcaagagcaactccgccgtggcctggtccaacaagtccgatttcgcctgcgccaacgccttcaacaacagcattatccccgaggacacattcttcccaagccccgagagcagcgactccaccgaccacgtgaagcccaaagagacagagaacaccaagcagcccagcaagagctgccacaagcccaaggccatcgtgcacaccgagaaagtgaacatgatgagcctgaccgtgctgggcctgcggatgctgttcgccaaaaccgtggccgtgaacttcctgctgaccgccaagctgttcttcctcctcaccgcc

SEQ ID NO: 6140 - DNA, 2208 bp, synthetic construct
  source 1..2208: mol_type = other DNA
atggccttaccagtgaccgccttgctcctgccgctggccttgctgctccacgccgccaggccggaagtgcagctccagcagtctggacctggcctggttaagcctagccagacactgagcctgacctgtgccatcagcggcgatagcgtgtcctctaatagcgccgcctggaactggatcagacagagccctagcagaggactggaatggctgggcagaacctactaccgcagcaagtggtacagcgactacgccgtgtccgtgaagtcccggatcaccatcaatcccgacaccagcaagaaccagttcagcctgcaactgaacagcgtgacccctgaggataccgccgtgtactactgcgccagagatccctacgacttttggagcggctaccccgacgcctttgacatctggggacagggcacaatggtcaccgtttctagcctcgaggacctgaagaacgtgttcccacctgaggtggccgtgttcgagcctagcgaggccgagatcagccacacccagaaagccaccctcgtgtgcctggctaccggcttctaccccgaccatgtggaactgtcttggtgggtcaacggcaaagaggtgcacagcggcgtgtgtaccgacccccagccactgaaagaacagcccgccctgaacgacagccggtactgcctgagcagcagactgagagtgtccgccaccttctggcagaacccccggaaccacttcagatgccaggtgcagttctacggcctgagcgagaacgacgagtggacccaggacagagccaagcccgtgacccagatcgtgtctgccgaagcctggggcagagccgatgatgtgattaagatccactggcaggaaaagaagtccaacaccatcctgggcagccaggaaggcaacaccatgaagaccaacgacacctacatgaagttcagctggctgaccgtgcccgagaagtccctggacaaagaacacagatgcatcgtgcggcacgaaaacaacaagaacggcgtggaccaggaaatcatcttcccacccatcaagaccgatgtgattacaatggaccccaaggacaactgctccaaggacgccaacgataccctgctgctccagctgaccaacaccagcgcctactacatgtacttgttgctgctgctgaagtccgtggtgtacttcgccatcatcacatgctgcctgctgatggctatggtcaagcggaaggacagccggggaagggccaagcgatctggatctggagcaacaaacttctcactactcaaacaagcaggtgacgtggaggagaatcccgggcctactagtatggactggatttggcgcatccttttccttgtcggcgctgctaccggcgcgcattccttcgaacaatctgctctgacacagcctgccagcgtgtcaggatctcctggacagagcatcaccatctcttgcaccggcaccagctctgatgtcggcggctacaattacgtgtcctggtatcagcagcaccccggcaaggcccctaaagtgattatcagcgaagtgaacaacagacccagcggcgtgtcccacagattcagcggctctaagtctggcaacaccgccagcctgacaatctctggactgcaagccgaggacgaggccgactacttctgtagcagctacaccagcggcagaaccctgtacgtgttcggcacaggcagcaaagtgacagtgctgggaacgcgtatccagaaccctgatcctgccgtgtaccagctgcgggatagcaagagcagcgacaagagcgtgtgtctgttcaccgacttcgacagccagaccaacgtgtcccagagcaaggactccgacgtgtacatcaccgataagtgcgtgctggacatgcggagcatggacttcaagagcaactccgccgtggcctggtccaacaagtccgatttcgcctgcgccaacgccttcaacaacagcattatccccgaggacacattcttcccaagccccgagagcagcgactccaccgaccacgtgaagcccaaagagacagagaacaccaagcagcccagcaagagctgccacaagcccaaggccatcgtgcacaccgagaaagtgaacatgatgagcctgaccgtgctgggcctgcggatgctgttcgccaaaaccgtggccgtgaacttcctgctgaccgccaagctgttcttcctcctcaccgcc

SEQ ID NO: 6141 - DNA, 2205 bp, synthetic construct
  source 1..2205: mol_type = other DNA
atggccttaccagtgaccgccttgctcctgccgctggccttgctgctccacgccgccaggccgcaatctgctctgacacagcctgccagcgcctctggatctcctggacagagcgtgaccatctcctgtaccggcacctcttctgatgtcggcggctacaactacgtgtcctggtatcagcagcaccccggcaaggcccctaagctgatgatctacgacgtgtccaacagacccagcggcgtgtccaatagattctccggcagcaagagcggcaacaccgccagcctgacaatttctggactgcaagccgaggacgaggccgactactactgtagcagctacaccagcagcagcacactgtacgtgttcggcacaggcacccagctcacagttcttctcgaggacctgaagaacgtgttcccacctgaggtggccgtgttcgagcctagcgaggccgagatcagccacacccagaaagccaccctcgtgtgcctggctaccggcttctaccccgaccatgtggaactgtcttggtgggtcaacggcaaagaggtgcacagcggcgtgtgtaccgacccccagccactgaaagaacagcccgccctgaacgacagccggtactgcctgagcagcagactgagagtgtccgccaccttctggcagaacccccggaaccacttcagatgccaggtgcagttctacggcctgagcgagaacgacgagtggacccaggacagagccaagcccgtgacccagatcgtgtctgccgaagcctggggcagagccgatgatgtgattaagatccactggcaggaaaagaagtccaacaccatcctgggcagccaggaaggcaacaccatgaagaccaacgacacctacatgaagttcagctggctgaccgtgcccgagaagtccctggacaaagaacacagatgcatcgtgcggcacgaaaacaacaagaacggcgtggaccaggaaatcatcttcccacccatcaagaccgatgtgattacaatggaccccaaggacaactgctccaaggacgccaacgataccctgctgctccagctgaccaacaccagcgcctactacatgtacttgttgctgctgctgaagtccgtggtgtacttcgccatcatcacatgctgcctgctgatggctatggtcaagcggaaggacagccggggaagggccaagcgatctggatctggagcaacaaacttctcactactcaaacaagcaggtgacgtggaggagaatcccgggcctactagtatggactggatttggcgcatccttttccttgtcggcgctgctaccggcgcgcattccttcgaagaagtgcagctccagcagtctggacctggcctggttaagcctagccagacactgagcctgacctgtgccatcagcggcgattccatgctgagcaacagcgacacctggaactggatcagacagagccccagcagaggcctggaatggctgggcagaacataccacagaagcacttggtacgacgactacgccagctctgtgcggggcagagtgtccatcaatgtggacaccagcaagaaccagtacagcctgcaactgaacgccgtgacacctgaggataccggcgtgtactactgtgccagagtgcggctccaggacggcaattcttggagcgacgcctttgatgtgtggggccagggcacaatggtcaccgtttctagcacgcgtatccagaaccctgatcctgccgtgtaccagctgcgggatagcaagagcagcgacaagagcgtgtgtctgttcaccgacttcgacagccagaccaacgtgtcccagagcaaggactccgacgtgtacatcaccgataagtgcgtgctggacatgcggagcatggacttcaagagcaactccgccgtggcctggtccaacaagtccgatttcgcctgcgccaacgccttcaacaacagcattatccccgaggacacattcttcccaagccccgagagcagcgactccaccgaccacgtgaagcccaaagagacagagaacaccaagcagcccagcaagagctgccacaagcccaaggccatcgtgcacaccgagaaagtgaacatgatgagcctgaccgtgctgggcctgcggatgctgttcgccaaaaccgtggccgtgaacttcctgctgaccgccaagctgttcttcctcctcaccgcc

SEQ ID NO: 6142 - DNA, 2205 bp, synthetic construct
  source 1..2205: mol_type = other DNA
atggccttaccagtgaccgccttgctcctgccgctggccttgctgctccacgccgccaggccggacgtgatgctgacccagacaccactgagcctgcctgtgtctctgggcgatcaggccagcatctcctgtagaagcagccagagcatcctgcacagcaccggcgatacctacctggaatggtatctccagaagcctggacagagccccaagctgctgattaacaaggtgtccaaccggctgagcggcgtgcccgatagattttctggcagcggctctggcaccgacttcaccctgaagatcagcagagtggaagccgaggacctgggcgtgtactactgcttccaaggcagccatgttccttggacctttggcggaggcaccaagctggaaatcaagagagctgacgccgctcctaccgtgtccatctttcctctcgaggacctgaagaacgtgttcccacctgaggtggccgtgttcgagcctagcgaggccgagatcagccacacccagaaagccaccctcgtgtgcctggctaccggcttctaccccgaccatgtggaactgtcttggtgggtcaacggcaaagaggtgcacagcggcgtgtgtaccgacccccagccactgaaagaacagcccgccctgaacgacagccggtactgcctgagcagcagactgagagtgtccgccaccttctggcagaacccccggaaccacttcagatgccaggtgcagttctacggcctgagcgagaacgacgagtggacccaggacagagccaagcccgtgacccagatcgtgtctgccgaagcctggggcagagccgatgatgtgattaagatccactggcaggaaaagaagtccaacaccatcctgggcagccaggaaggcaacaccatgaagaccaacgacacctacatgaagttcagctggctgaccgtgcccgagaagtccctggacaaagaacacagatgcatcgtgcggcacgaaaacaacaagaacggcgtggaccaggaaatcatcttcccacccatcaagaccgatgtgattacaatggaccccaaggacaactgctccaaggacgccaacgataccctgctgctccagctgaccaacaccagcgcctactacatgtacttgttgctgctgctgaagtccgtggtgtacttcgccatcatcacatgctgcctgctgatggctatggtcaagcggaaggacagccggggaagggccaagcgatctggatctggagcaacaaacttctcactactcaaacaagcaggtgacgtggaggagaatcccgggcctactagtatggactggatttggcgcatccttttccttgtcggcgctgctaccggcgcgcattccttcgaacaagtgaagctccagcagagcggccctagccttgtgaaacctggcgcttccgtgaagatgagctgcaaggccagcggctacaccttcaccgatttctacatgaaatgggtcaagcagagccacggcaagtctctggaatggatcggcgacatcaaccccaacatcggagacaccttctacaaccagaagttcaagggcaaagccacactgaccgtggacaagagcagcagcaccgcctacatgcagctcaacagcctgaccagcgaggacagcgccgtgtacttttgttccgtgggctacttcgacgtgtggggagccggaacaaccgtgacagtctcttctacgcgtatccagaaccctgatcctgccgtgtaccagctgcgggatagcaagagcagcgacaagagcgtgtgtctgttcaccgacttcgacagccagaccaacgtgtcccagagcaaggactccgacgtgtacatcaccgataagtgcgtgctggacatgcggagcatggacttcaagagcaactccgccgtggcctggtccaacaagtccgatttcgcctgcgccaacgccttcaacaacagcattatccccgaggacacattcttcccaagccccgagagcagcgactccaccgaccacgtgaagcccaaagagacagagaacaccaagcagcccagcaagagctgccacaagcccaaggccatcgtgcacaccgagaaagtgaacatgatgagcctgaccgtgctgggcctgcggatgctgttcgccaaaaccgtggccgtgaacttcctgctgaccgccaagctgttcttcctcctcaccgcc

SEQ ID NO: 6143 - DNA, 2193 bp, synthetic construct
  source 1..2193: mol_type = other DNA
atggccttaccagtgaccgccttgctcctgccgctggccttgctgctccacgccgccaggccggagatcgtgctgacacagtctcccgccacactgtcactgtctccaggcgaaagagccacactgagctgtagagccagccagagcgtgtccatctacctggcctggtatcagcagaagcctggacaggctccccggctgctgatctacgatgccagcaatagagccacaggcatccccgccagattttctggctctggcagcggcaccgatttcaccctgaccataagcagcctggaacctgaggacttcgccgtgtactactgccagcagagaagcaactggcctcctttcacattcggccctggcaccaaggtggacatcaaactcgaggacctgaagaacgtgttcccacctgaggtggccgtgttcgagcctagcgaggccgagatcagccacacccagaaagccaccctcgtgtgcctggctaccggcttctaccccgaccatgtggaactgtcttggtgggtcaacggcaaagaggtgcacagcggcgtgtgtaccgacccccagccactgaaagaacagcccgccctgaacgacagccggtactgcctgagcagcagactgagagtgtccgccaccttctggcagaacccccggaaccacttcagatgccaggtgcagttctacggcctgagcgagaacgacgagtggacccaggacagagccaagcccgtgacccagatcgtgtctgccgaagcctggggcagagccgatgatgtgattaagatccactggcaggaaaagaagtccaacaccatcctgggcagccaggaaggcaacaccatgaagaccaacgacacctacatgaagttcagctggctgaccgtgcccgagaagtccctggacaaagaacacagatgcatcgtgcggcacgaaaacaacaagaacggcgtggaccaggaaatcatcttcccacccatcaagaccgatgtgattacaatggaccccaaggacaactgctccaaggacgccaacgataccctgctgctccagctgaccaacaccagcgcctactacatgtacttgttgctgctgctgaagtccgtggtgtacttcgccatcatcacatgctgcctgctgatggctatggtcaagcggaaggacagccggggaagggccaagcgatctggatctggagcaacaaacttctcactactcaaacaagcaggtgacgtggaggagaatcccgggcctactagtatggactggatttggcgcatccttttccttgtcggcgctgctaccggcgcgcattccttcgaacaggtgcagcttgttgaaagcggaggcggagttgtgcagcctggcagaagtctgagactgtcttgtgccgccagcggcttcaccttcagcagctatggaatgcactgggtccgacaggcccctggcaaaggacttgaatgggttgccgtgatctgggacgacggcagcaacaagtattacgtggacagcgtgaagggcagattcaccatcagccgggacaacagcaagaacaccctgtacctccagatgaacagcctgagagccgaggacacagccgtgtattattgcgccagagatgactactacggcagcggctccttcaacagctactatggcacagacgtgtggggccagggcacaacagttaccgttagctctacgcgtatccagaaccctgatcctgccgtgtaccagctgcgggatagcaagagcagcgacaagagcgtgtgtctgttcaccgacttcgacagccagaccaacgtgtcccagagcaaggactccgacgtgtacatcaccgataagtgcgtgctggacatgcggagcatggacttcaagagcaactccgccgtggcctggtccaacaagtccgatttcgcctgcgccaacgccttcaacaacagcattatccccgaggacacattcttcccaagccccgagagcagcgactccaccgaccacgtgaagcccaaagagacagagaacaccaagcagcccagcaagagctgccacaagcccaaggccatcgtgcacaccgagaaagtgaacatgatgagcctgaccgtgctgggcctgcggatgctgttcgccaaaaccgtggccgtgaacttcctgctgaccgccaagctgttcttcctcctcaccgcc

SEQ ID NO: 6144 - DNA, 2148 bp, synthetic construct
  source 1..2148: mol_type = other DNA
atggccttaccagtgaccgccttgctcctgccgctggccttgctgctccacgccgccaggccggacatccagatgacacagagccctagcagcctgtctgccagcgtgggagacagagtgaccatcacctgtagagccagccagggcatctcttcttggctggcctggtatcagcagaagcccgagaaggcccctaagagcctgatctatgccgccagctctctccagagcggagtgcctagcagattttctggcagcggctccggcaccgatttcaccctgacaatatccagcctccagcctgaggacttcgccacctactactgccagcagtacaacagctacccctacaccttcggccagggcaccaagctggaaatcaaactcgaggacctgaagaacgtgttcccacctgaggtggccgtgttcgagcctagcgaggccgagatcagccacacccagaaagccaccctcgtgtgcctggctaccggcttctaccccgaccatgtggaactgtcttggtgggtcaacggcaaagaggtgcacagcggcgtgtgtaccgacccccagccactgaaagaacagcccgccctgaacgacagccggtactgcctgagcagcagactgagagtgtccgccaccttctggcagaacccccggaaccacttcagatgccaggtgcagttctacggcctgagcgagaacgacgagtggacccaggacagagccaagcccgtgacccagatcgtgtctgccgaagcctggggcagagccgatgatgtgattaagatccactggcaggaaaagaagtccaacaccatcctgggcagccaggaaggcaacaccatgaagaccaacgacacctacatgaagttcagctggctgaccgtgcccgagaagtccctggacaaagaacacagatgcatcgtgcggcacgaaaacaacaagaacggcgtggaccaggaaatcatcttcccacccatcaagaccgatgtgattacaatggaccccaaggacaactgctccaaggacgccaacgataccctgctgctccagctgaccaacaccagcgcctactacatgtacttgttgctgctgctgaagtccgtggtgtacttcgccatcatcacatgctgcctgctgatggctatggtcaagcggaaggacagccggggaagggccaagcgatctggatctggagcaacaaacttctcactactcaaacaagcaggtgacgtggaggagaatcccgggcctactagtatggactggatttggcgcatccttttccttgtcggcgctgctaccggcgcgcattccttcgaagaagtgcaactggttcaatctggcggcggactggttcatccaggcggttctctgagactgagctgtgccggctctggcttcaccttcagcacctacctgatgtactgggtccgacaggcccctggcaagacactggaatgggtgtccgctattggcagcggaggcgatacctactacgccgactctgtgaagggcagattcaccatcagccgggacaacgccaagaacagcctgtacctccagatgaactccctgagagccgaggacatggccgtgtactactgtgccagaggactcggctattggggccagggaacactggtcacagtgtcctctacgcgtatccagaaccctgatcctgccgtgtaccagctgcgggatagcaagagcagcgacaagagcgtgtgtctgttcaccgacttcgacagccagaccaacgtgtcccagagcaaggactccgacgtgtacatcaccgataagtgcgtgctggacatgcggagcatggacttcaagagcaactccgccgtggcctggtccaacaagtccgatttcgcctgcgccaacgccttcaacaacagcattatccccgaggacacattcttcccaagccccgagagcagcgactccaccgaccacgtgaagcccaaagagacagagaacaccaagcagcccagcaagagctgccacaagcccaaggccatcgtgcacaccgagaaagtgaacatgatgagcctgaccgtgctgggcctgcggatgctgttcgccaaaaccgtggccgtgaacttcctgctgaccgccaagctgttcttcctcctcaccgcc

SEQ ID NO: 6145 - DNA, 2205 bp, synthetic construct
  source 1..2205: mol_type = other DNA
atggccttaccagtgaccgccttgctcctgccgctggccttgctgctccacgccgccaggccgctgcctgttctgacacagcctccatccgtgtctgtggcccctggaaagaccgccagaatcacatgcggcggcaacaacatcggcagcaagagcgtgcactggtatcagcagaagcctggacaggctcctgtgctggtggtgtacgacgacagcgatagacctagcggcatccccgagagattcagcggcagcaattccggcaataccgccacactgaccatcagcagagtggaagctggcgacgaggccgactactactgccaagtgtgggacagcagcagcgactacgtggtgtttggcggcggaacaaagctgacagtgcttctcgaggacctgaagaacgtgttcccacctgaggtggccgtgttcgagcctagcgaggccgagatcagccacacccagaaagccaccctcgtgtgcctggctaccggcttctaccccgaccatgtggaactgtcttggtgggtcaacggcaaagaggtgcacagcggcgtgtgtaccgacccccagccactgaaagaacagcccgccctgaacgacagccggtactgcctgagcagcagactgagagtgtccgccaccttctggcagaacccccggaaccacttcagatgccaggtgcagttctacggcctgagcgagaacgacgagtggacccaggacagagccaagcccgtgacccagatcgtgtctgccgaagcctggggcagagccgatgatgtgattaagatccactggcaggaaaagaagtccaacaccatcctgggcagccaggaaggcaacaccatgaagaccaacgacacctacatgaagttcagctggctgaccgtgcccgagaagtccctggacaaagaacacagatgcatcgtgcggcacgaaaacaacaagaacggcgtggaccaggaaatcatcttcccacccatcaagaccgatgtgattacaatggaccccaaggacaactgctccaaggacgccaacgataccctgctgctccagctgaccaacaccagcgcctactacatgtacttgttgctgctgctgaagtccgtggtgtacttcgccatcatcacatgctgcctgctgatggctatggtcaagcggaaggacagccggggaagggccaagcgatctggatctggagcaacaaacttctcactactcaaacaagcaggtgacgtggaggagaatcccgggcctactagtatggactggatttggcgcatccttttccttgtcggcgctgctaccggcgcgcattccttcgaagaagttcaactggtgcagagcggagccgaagtgaagaagccaggcgagagcctgaagattagctgcaaaggcagcggctacagcttcaccagctactggatcggctgggtccgacagatgcctggcaaaggactggaatggatgggcatcatctaccccggcgacagcgacaccagatacagccctagctttcagggccaagtgaccatctccgccgacaagagcatcagcacagcctacctccagtggtcctctctgaaggccagcgataccgccatgtactactgcgccagacaagtctggggatggcaaggcggcatgtaccccaggtctaactggtggtacaacctggactcttggggccagggcacactggtcacagtctcttctacgcgtatccagaaccctgatcctgccgtgtaccagctgcgggatagcaagagcagcgacaagagcgtgtgtctgttcaccgacttcgacagccagaccaacgtgtcccagagcaaggactccgacgtgtacatcaccgataagtgcgtgctggacatgcggagcatggacttcaagagcaactccgccgtggcctggtccaacaagtccgatttcgcctgcgccaacgccttcaacaacagcattatccccgaggacacattcttcccaagccccgagagcagcgactccaccgaccacgtgaagcccaaagagacagagaacaccaagcagcccagcaagagctgccacaagcccaaggccatcgtgcacaccgagaaagtgaacatgatgagcctgaccgtgctgggcctgcggatgctgttcgccaaaaccgtggccgtgaacttcctgctgaccgccaagctgttcttcctcctcaccgcc

SEQ ID NO: 6146 - DNA, 2184 bp, synthetic construct
  source 1..2184: mol_type = other DNA
atggccttaccagtgaccgccttgctcctgccgctggccttgctgctccacgccgccaggccggagctggtcatgacacagagccctgcttctctggccgtgtcactgggacagagagccaccatctcttgcagagccagcgagagcgtggacagctacggcaagagcttcatgcactggtatcagctcaagcccggccagcctcctaagctgctgatctacagagcctccaacctggaaagcggcgtgccagccagattttctggcagcggcagcagaaccgacttcaccctgaccattgatcccgtggaagccgatgatgccgccacctactactgccagcagaacaacgaggacccctggacatttggcggaggcaccaagctggaaatcaaactcgaggacctgaagaacgtgttcccacctgaggtggccgtgttcgagcctagcgaggccgagatcagccacacccagaaagccaccctcgtgtgcctggctaccggcttctaccccgaccatgtggaactgtcttggtgggtcaacggcaaagaggtgcacagcggcgtgtgtaccgacccccagccactgaaagaacagcccgccctgaacgacagccggtactgcctgagcagcagactgagagtgtccgccaccttctggcagaacccccggaaccacttcagatgccaggtgcagttctacggcctgagcgagaacgacgagtggacccaggacagagccaagcccgtgacccagatcgtgtctgccgaagcctggggcagagccgatgatgtgattaagatccactggcaggaaaagaagtccaacaccatcctgggcagccaggaaggcaacaccatgaagaccaacgacacctacatgaagttcagctggctgaccgtgcccgagaagtccctggacaaagaacacagatgcatcgtgcggcacgaaaacaacaagaacggcgtggaccaggaaatcatcttcccacccatcaagaccgatgtgattacaatggaccccaaggacaactgctccaaggacgccaacgataccctgctgctccagctgaccaacaccagcgcctactacatgtacttgttgctgctgctgaagtccgtggtgtacttcgccatcatcacatgctgcctgctgatggctatggtcaagcggaaggacagccggggaagggccaagcgatctggatctggagcaacaaacttctcactactcaaacaagcaggtgacgtggaggagaatcccgggcctactagtatggactggatttggcgcatccttttccttgtcggcgctgctaccggcgcgcattccttcgaagaagtgcagctcgaacagtctggccccgagcttgtgaaacctggcgcttccgtgaagatgagctgcaaggccagcggctacaccttcaccaactactacatgaaatgggtcaagcagagccacggcaagtccctggaatggatcggcgatctgaaccccaacaacggcgacaccttctacaaccagaagttcaagggcaaagccacactgaccgtggacaagagcagcaacaccgcctacatgcagctcaactccctgaccagcgaggacagcgccgtgtactactgtgccagaaccggcagatacgaagagaacgctatggactactggggccagggcacaagcgtgacagtctcttctacgcgtatccagaaccctgatcctgccgtgtaccagctgcgggatagcaagagcagcgacaagagcgtgtgtctgttcaccgacttcgacagccagaccaacgtgtcccagagcaaggactccgacgtgtacatcaccgataagtgcgtgctggacatgcggagcatggacttcaagagcaactccgccgtggcctggtccaacaagtccgatttcgcctgcgccaacgccttcaacaacagcattatccccgaggacacattcttcccaagccccgagagcagcgactccaccgaccacgtgaagcccaaagagacagagaacaccaagcagcccagcaagagctgccacaagcccaaggccatcgtgcacaccgagaaagtgaacatgatgagcctgaccgtgctgggcctgcggatgctgttcgccaaaaccgtggccgtgaacttcctgctgaccgccaagctgttcttcctcctcaccgcc

SEQ ID NO: 6147 - DNA, 2166 bp, synthetic construct
  source 1..2166: mol_type = other DNA
atggccttaccagtgaccgccttgctcctgccgctggccttgctgctccacgccgccaggccggacgtggtcatgacacagagcccttctagcctgtctgccagcgtgggcgacagagtgaccatcacctgtatggcctccgaggacatctacatccggctggcctggtatcagcagaagcctggaaacgcccctaagctgctgatctacgccgccacctctctggaaacaggcgtgccaagcagattttccggcagcggctctggcaccgatttcaccctgacaatatccagcctccagcctgaggacttcgccacctactactgccagcagtattggagcagcccctggacatttggcggaggcaccaaggtggaaatcaaactcgaggacctgaagaacgtgttcccacctgaggtggccgtgttcgagcctagcgaggccgagatcagccacacccagaaagccaccctcgtgtgcctggctaccggcttctaccccgaccatgtggaactgtcttggtgggtcaacggcaaagaggtgcacagcggcgtgtgtaccgacccccagccactgaaagaacagcccgccctgaacgacagccggtactgcctgagcagcagactgagagtgtccgccaccttctggcagaacccccggaaccacttcagatgccaggtgcagttctacggcctgagcgagaacgacgagtggacccaggacagagccaagcccgtgacccagatcgtgtctgccgaagcctggggcagagccgatgatgtgattaagatccactggcaggaaaagaagtccaacaccatcctgggcagccaggaaggcaacaccatgaagaccaacgacacctacatgaagttcagctggctgaccgtgcccgagaagtccctggacaaagaacacagatgcatcgtgcggcacgaaaacaacaagaacggcgtggaccaggaaatcatcttcccacccatcaagaccgatgtgattacaatggaccccaaggacaactgctccaaggacgccaacgataccctgctgctccagctgaccaacaccagcgcctactacatgtacttgttgctgctgctgaagtccgtggtgtacttcgccatcatcacatgctgcctgctgatggctatggtcaagcggaaggacagccggggaagggccaagcgatctggatctggagcaacaaacttctcactactcaaacaagcaggtgacgtggaggagaatcccgggcctactagtatggactggatttggcgcatccttttccttgtcggcgctgctaccggcgcgcattccttcgaacaggttcagctgcaagagtctggccccggactggtcaagcctagccaaacactgagcctgacctgtaccgtgtccggctacagcatcaccagcgactacacctggaactggatcagacagcctcctggcaacggactggaatggatcggctacatcacctacagcggcagcaccagctacaaccccagcctgaaaagccgggtgctgatctccgtggacaccagcaagaatcaggtgtccctgaagctgagcagcgtgacagccgctgataccgccgtgtactactgtgccagactggggagaagatacacaatggactactggggccagggcaccaccgtgacagtttcttctacgcgtatccagaaccctgatcctgccgtgtaccagctgcgggatagcaagagcagcgacaagagcgtgtgtctgttcaccgacttcgacagccagaccaacgtgtcccagagcaaggactccgacgtgtacatcaccgataagtgcgtgctggacatgcggagcatggacttcaagagcaactccgccgtggcctggtccaacaagtccgatttcgcctgcgccaacgccttcaacaacagcattatccccgaggacacattcttcccaagccccgagagcagcgactccaccgaccacgtgaagcccaaagagacagagaacaccaagcagcccagcaagagctgccacaagcccaaggccatcgtgcacaccgagaaagtgaacatgatgagcctgaccgtgctgggcctgcggatgctgttcgccaaaaccgtggccgtgaacttcctgctgaccgccaagctgttcttcctcctcaccgcc

SEQ ID NO: 6148 - DNA, 2178 bp, synthetic construct
  source 1..2178: mol_type = other DNA
atggccttaccagtgaccgccttgctcctgccgctggccttgctgctccacgccgccaggccggatattgtgctgactcagagccctgccactctgagccttagtccaggcgacagagctaccatctcctgtagggcctctgaatccgtgaccattctgggctctcatctcatatattggtatcaacaaaagccgggccagcctccacggctgctcattcaactggcctctaacgtgcagaccggcgtgccagctagattttctggctctggctcccggaccgactttacactgacaatcagctccgtggaacccgaagattttgccgtctattattgcctccagtccaggaccattcctcggacattcggccagggaacaaaactcgaaatcaagcggctcgaggacctgaagaacgtgttcccacctgaggtggccgtgttcgagcctagcgaggccgagatcagccacacccagaaagccaccctcgtgtgcctggctaccggcttctaccccgaccatgtggaactgtcttggtgggtcaacggcaaagaggtgcacagcggcgtgtgtaccgacccccagccactgaaagaacagcccgccctgaacgacagccggtactgcctgagcagcagactgagagtgtccgccaccttctggcagaacccccggaaccacttcagatgccaggtgcagttctacggcctgagcgagaacgacgagtggacccaggacagagccaagcccgtgacccagatcgtgtctgccgaagcctggggcagagccgatgatgtgattaagatccactggcaggaaaagaagtccaacaccatcctgggcagccaggaaggcaacaccatgaagaccaacgacacctacatgaagttcagctggctgaccgtgcccgagaagtccctggacaaagaacacagatgcatcgtgcggcacgaaaacaacaagaacggcgtggaccaggaaatcatcttcccacccatcaagaccgatgtgattacaatggaccccaaggacaactgctccaaggacgccaacgataccctgctgctccagctgaccaacaccagcgcctactacatgtacttgttgctgctgctgaagtccgtggtgtacttcgccatcatcacatgctgcctgctgatggctatggtcaagcggaaggacagccggggaagggccaagcgatctggatctggagcaacaaacttctcactactcaaacaagcaggtgacgtggaggagaatcccgggcctactagtatggactggatttggcgcatccttttccttgtcggcgctgctaccggcgcgcattccttcgaacaggtgcagctcgttcagagtggccccgaagtgaaaaagccaggcgagtccgtgaagatttcctgcaaagcctccggctacacattccggcactactctatgaattgggtcaagcaggccccaggccagggccttaagtggatgggacgcatcaataccgagtccggcgtgccaatctacgccgatgacttcaaaggccggttcagcttcaccgtggatacctctgcctccaccgcctacctggaaatcagcagcctgaccagcgaggatacagctgtgtacttctgtagcaacgattacctctacagcctggatttctggggacagggaaccacactgaccgtgtctagcacgcgtatccagaaccctgatcctgccgtgtaccagctgcgggatagcaagagcagcgacaagagcgtgtgtctgttcaccgacttcgacagccagaccaacgtgtcccagagcaaggactccgacgtgtacatcaccgataagtgcgtgctggacatgcggagcatggacttcaagagcaactccgccgtggcctggtccaacaagtccgatttcgcctgcgccaacgccttcaacaacagcattatccccgaggacacattcttcccaagccccgagagcagcgactccaccgaccacgtgaagcccaaagagacagagaacaccaagcagcccagcaagagctgccacaagcccaaggccatcgtgcacaccgagaaagtgaacatgatgagcctgaccgtgctgggcctgcggatgctgttcgccaaaaccgtggccgtgaacttcctgctgaccgccaagctgttcttcctcctcaccgcc

SEQ ID NO: 6149 - DNA, 2178 bp, synthetic construct
  source 1..2178: mol_type = other DNA
atggccttaccagtgaccgccttgctcctgccgctggccttgctgctccacgccgccaggccggacatcgtgctgacacagtctcccgccacactgtcactgagccctggcgatagagccacactgagctgtagagccagcgagagcgtgacaatcctgggcagccacctgatctactggtatcagcagaagcccggacaggcccctagactgctgattcagctcgccagcaatgtgcagacaggcatccctgccagattttccggcagcggcagcagaaccgatttcaccctgaccataagcagcctggaacctgaggacttcgccgtgtactactgcctccagagccggacaatccccagaacctttggacagggcaccaagctggaaatcaagagactcgaggacctgaagaacgtgttcccacctgaggtggccgtgttcgagcctagcgaggccgagatcagccacacccagaaagccaccctcgtgtgcctggctaccggcttctaccccgaccatgtggaactgtcttggtgggtcaacggcaaagaggtgcacagcggcgtgtgtaccgacccccagccactgaaagaacagcccgccctgaacgacagccggtactgcctgagcagcagactgagagtgtccgccaccttctggcagaacccccggaaccacttcagatgccaggtgcagttctacggcctgagcgagaacgacgagtggacccaggacagagccaagcccgtgacccagatcgtgtctgccgaagcctggggcagagccgatgatgtgattaagatccactggcaggaaaagaagtccaacaccatcctgggcagccaggaaggcaacaccatgaagaccaacgacacctacatgaagttcagctggctgaccgtgcccgagaagtccctggacaaagaacacagatgcatcgtgcggcacgaaaacaacaagaacggcgtggaccaggaaatcatcttcccacccatcaagaccgatgtgattacaatggaccccaaggacaactgctccaaggacgccaacgataccctgctgctccagctgaccaacaccagcgcctactacatgtacttgttgctgctgctgaagtccgtggtgtacttcgccatcatcacatgctgcctgctgatggctatggtcaagcggaaggacagccggggaagggccaagcgatctggatctggagcaacaaacttctcactactcaaacaagcaggtgacgtggaggagaatcccgggcctactagtatggactggatttggcgcatccttttccttgtcggcgctgctaccggcgcgcattccttcgaacaggttcagctggtgcagtctggcagcgagctgaagaaacctggcgagagcgtgaagatcagctgcaaggccagcggctacaccttcacacactacagcatgaactgggtccgacaggcccctggacaaggactggaatggatgggcagaatcaacaccgagacaggcgagcccctgtacgccgacgatttcaagggcagattcgtgttcagcctggacaccagcgccagcacagcctatctccagatcagctctctgaaggccgaggacaccgccgtgtactactgctccaacgactacctgtactccctggactattggggccagggcacactggtcacagtgtctagtacgcgtatccagaaccctgatcctgccgtgtaccagctgcgggatagcaagagcagcgacaagagcgtgtgtctgttcaccgacttcgacagccagaccaacgtgtcccagagcaaggactccgacgtgtacatcaccgataagtgcgtgctggacatgcggagcatggacttcaagagcaactccgccgtggcctggtccaacaagtccgatttcgcctgcgccaacgccttcaacaacagcattatccccgaggacacattcttcccaagccccgagagcagcgactccaccgaccacgtgaagcccaaagagacagagaacaccaagcagcccagcaagagctgccacaagcccaaggccatcgtgcacaccgagaaagtgaacatgatgagcctgaccgtgctgggcctgcggatgctgttcgccaaaaccgtggccgtgaacttcctgctgaccgccaagctgttcttcctcctcaccgcc

SEQ ID NO: 6150 - DNA, 2181 bp, synthetic construct
  source 1..2181: mol_type = other DNA
atggccttaccagtgaccgccttgctcctgccgctggccttgctgctccacgccgccaggccggacatccagctgactcagagccctagctttctgagcgccagcgtgggcgacagagtgaccattacatgtagagccagccagggcatcagcaccgacctgaactggtatcagcagaagcctggcaaggcccctaagctgctgatctacgccgccagcaatctggaaagcggcgtgccaagcagattttccggctctggcagcggcaccgagttcaccctgacaatatctagcctccagcctgaggacttcgccacctactactgccagcagagctacaactggccctacacctttggcggaggcaccaaggtggaaatcaagagactcgaggacctgaagaacgtgttcccacctgaggtggccgtgttcgagcctagcgaggccgagatcagccacacccagaaagccaccctcgtgtgcctggctaccggcttctaccccgaccatgtggaactgtcttggtgggtcaacggcaaagaggtgcacagcggcgtgtgtaccgacccccagccactgaaagaacagcccgccctgaacgacagccggtactgcctgagcagcagactgagagtgtccgccaccttctggcagaacccccggaaccacttcagatgccaggtgcagttctacggcctgagcgagaacgacgagtggacccaggacagagccaagcccgtgacccagatcgtgtctgccgaagcctggggcagagccgatgatgtgattaagatccactggcaggaaaagaagtccaacaccatcctgggcagccaggaaggcaacaccatgaagaccaacgacacctacatgaagttcagctggctgaccgtgcccgagaagtccctggacaaagaacacagatgcatcgtgcggcacgaaaacaacaagaacggcgtggaccaggaaatcatcttcccacccatcaagaccgatgtgattacaatggaccccaaggacaactgctccaaggacgccaacgataccctgctgctccagctgaccaacaccagcgcctactacatgtacttgttgctgctgctgaagtccgtggtgtacttcgccatcatcacatgctgcctgctgatggctatggtcaagcggaaggacagccggggaagggccaagcgatctggatctggagcaacaaacttctcactactcaaacaagcaggtgacgtggaggagaatcccgggcctactagtatggactggatttggcgcatccttttccttgtcggcgctgctaccggcgcgcattccttcgaagaagttcagctggttgaatcaggcggaggactcgtgaaacctggcggctctctgagactgtcttgtgccgccagcggcttcaccttcagcaacttcgagatgaactgggtccgacaggccccaggcaaaggactggaatgggtgtccggcatcagctccaatggccggtacatcaactacgccgacagcgtgaagggcagattcaccatcagccgggacaacgccaagaacagcctgtacctccagatgaactccctgagagccgaggacaccgccgtgtactattgtgccagagtggtggacttcgaccaggactacaacggcttcgactattggggccagggcaccctggttaccgttagctctacgcgtatccagaaccctgatcctgccgtgtaccagctgcgggatagcaagagcagcgacaagagcgtgtgtctgttcaccgacttcgacagccagaccaacgtgtcccagagcaaggactccgacgtgtacatcaccgataagtgcgtgctggacatgcggagcatggacttcaagagcaactccgccgtggcctggtccaacaagtccgatttcgcctgcgccaacgccttcaacaacagcattatccccgaggacacattcttcccaagccccgagagcagcgactccaccgaccacgtgaagcccaaagagacagagaacaccaagcagcccagcaagagctgccacaagcccaaggccatcgtgcacaccgagaaagtgaacatgatgagcctgaccgtgctgggcctgcggatgctgttcgccaaaaccgtggccgtgaacttcctgctgaccgccaagctgttcttcctcctcaccgcc

SEQ ID NO: 6151 - DNA, 2175 bp, synthetic construct
  source 1..2175: mol_type = other DNA
atggccttaccagtgaccgccttgctcctgccgctggccttgctgctccacgccgccaggccggacatccaactgactcagagccccagctttctgagcgcctctgtgggcgacagagtgaccatcacatgtagtctcagcctgggcatcagcacatggcgggattggtttccgccgaggcttggcaggggccttgagccgctgacctacgccgccagcacactgcaaagcggagtgcctagcagattttccggcagcggctctggcaccgagttcaccctgacaatatccagcctccagcctgaggacttcgccacctactactgccagcagctcaacagctaccctctgacctttggcggaggcaccaaggtggaaatcaagagactcgaggacctgaagaacgtgttcccacctgaggtggccgtgttcgagcctagcgaggccgagatcagccacacccagaaagccaccctcgtgtgcctggctaccggcttctaccccgaccatgtggaactgtcttggtgggtcaacggcaaagaggtgcacagcggcgtgtgtaccgacccccagccactgaaagaacagcccgccctgaacgacagccggtactgcctgagcagcagactgagagtgtccgccaccttctggcagaacccccggaaccacttcagatgccaggtgcagttctacggcctgagcgagaacgacgagtggacccaggacagagccaagcccgtgacccagatcgtgtctgccgaagcctggggcagagccgatgatgtgattaagatccactggcaggaaaagaagtccaacaccatcctgggcagccaggaaggcaacaccatgaagaccaacgacacctacatgaagttcagctggctgaccgtgcccgagaagtccctggacaaagaacacagatgcatcgtgcggcacgaaaacaacaagaacggcgtggaccaggaaatcatcttcccacccatcaagaccgatgtgattacaatggaccccaaggacaactgctccaaggacgccaacgataccctgctgctccagctgaccaacaccagcgcctactacatgtacttgttgctgctgctgaagtccgtggtgtacttcgccatcatcacatgctgcctgctgatggctatggtcaagcggaaggacagccggggaagggccaagcgatctggatctggagcaacaaacttctcactactcaaacaagcaggtgacgtggaggagaatcccgggcctactagtatggactggatttggcgcatccttttccttgtcggcgctgctaccggcgcgcattccttcgaagaagttcaactggttgagtctggtggcggcctggttaagcctggcggatctctgagactgagctgtgccgccagcggcttcacctttagcacatacggcatgagctgggtccgacaggcccctggaaaaggacttgagtgggtcgcctacatcaacaacggctccggctacatctactacgccgacagcgtgaagggcagattcaccatcagccgggacaacgccaagaacagcctgtacctccagatgaactccctgagagccgaggacaccgccgtgtactattgtgccagaggacagtggtggagcggcggagactttgattattggggccagggcaccctggtcaccgtttcttctacgcgtatccagaaccctgatcctgccgtgtaccagctgcgggatagcaagagcagcgacaagagcgtgtgtctgttcaccgacttcgacagccagaccaacgtgtcccagagcaaggactccgacgtgtacatcaccgataagtgcgtgctggacatgcggagcatggacttcaagagcaactccgccgtggcctggtccaacaagtccgatttcgcctgcgccaacgccttcaacaacagcattatccccgaggacacattcttcccaagccccgagagcagcgactccaccgaccacgtgaagcccaaagagacagagaacaccaagcagcccagcaagagctgccacaagcccaaggccatcgtgcacaccgagaaagtgaacatgatgagcctgaccgtgctgggcctgcggatgctgttcgccaaaaccgtggccgtgaacttcctgctgaccgccaagctgttcttcctcctcaccgcc

SEQ ID NO: 6152 - DNA, 2178 bp, synthetic construct
  source 1..2178: mol_type = other DNA
atggccttaccagtgaccgccttgctcctgccgctggccttgctgctccacgccgccaggccggagatcgtgctgacacagtctcccgccacactgtcactgtctccaggcgaaagagccacactgagctgtagcgccagcagcagcgtgtcctacatgtactggtatcagcagaagcccggacaggcccctagactgctgatctacagaaccagcaacctggcctctggcatccccgccagattttctggctctggcagcggcaccgatttcaccctgaccataagcagcctggaacctgaggacttcgccgtgtactactgccagcagtaccacagctaccccaccacctttggacagggcaccaaggtggaaatcaagcggacagttctcgaggacctgaagaacgtgttcccacctgaggtggccgtgttcgagcctagcgaggccgagatcagccacacccagaaagccaccctcgtgtgcctggctaccggcttctaccccgaccatgtggaactgtcttggtgggtcaacggcaaagaggtgcacagcggcgtgtgtaccgacccccagccactgaaagaacagcccgccctgaacgacagccggtactgcctgagcagcagactgagagtgtccgccaccttctggcagaacccccggaaccacttcagatgccaggtgcagttctacggcctgagcgagaacgacgagtggacccaggacagagccaagcccgtgacccagatcgtgtctgccgaagcctggggcagagccgatgatgtgattaagatccactggcaggaaaagaagtccaacaccatcctgggcagccaggaaggcaacaccatgaagaccaacgacacctacatgaagttcagctggctgaccgtgcccgagaagtccctggacaaagaacacagatgcatcgtgcggcacgaaaacaacaagaacggcgtggaccaggaaatcatcttcccacccatcaagaccgatgtgattacaatggaccccaaggacaactgctccaaggacgccaacgataccctgctgctccagctgaccaacaccagcgcctactacatgtacttgttgctgctgctgaagtccgtggtgtacttcgccatcatcacatgctgcctgctgatggctatggtcaagcggaaggacagccggggaagggccaagcgatctggatctggagcaacaaacttctcactactcaaacaagcaggtgacgtggaggagaatcccgggcctactagtatggactggatttggcgcatccttttccttgtcggcgctgctaccggcgcgcattccttcgaagaagtgcagctggttgaatcaggtggcggcctggttcaacctggcggatctctgagactgtcttgtgccgccagcggcttcagcttcaacacctacgccatgaactgggtccgacaggctcctggcaaaggactggaatgggtgtcccacatcagaagcaagagcaacaacttcgccacctactacgccgacagcgtgaaggacagattcaccatcagccgggacaacgccaagaacagcctgtacctccagatgaactccctgagagccgaggacaccgccgtgtattattgcgccagacaaggcggcgacttccctatggattattggggccagggcaccctggtcaccgtttcttctacgcgtatccagaaccctgatcctgccgtgtaccagctgcgggatagcaagagcagcgacaagagcgtgtgtctgttcaccgacttcgacagccagaccaacgtgtcccagagcaaggactccgacgtgtacatcaccgataagtgcgtgctggacatgcggagcatggacttcaagagcaactccgccgtggcctggtccaacaagtccgatttcgcctgcgccaacgccttcaacaacagcattatccccgaggacacattcttcccaagccccgagagcagcgactccaccgaccacgtgaagcccaaagagacagagaacaccaagcagcccagcaagagctgccacaagcccaaggccatcgtgcacaccgagaaagtgaacatgatgagcctgaccgtgctgggcctgcggatgctgttcgccaaaaccgtggccgtgaacttcctgctgaccgccaagctgttcttcctcctcaccgcc

SEQ ID NO: 6153 - DNA, 2166 bp, synthetic construct
  source 1..2166: mol_type = other DNA
atggccttaccagtgaccgccttgctcctgccgctggccttgctgctccacgccgccaggccggacgtggtcatgacacagagcccttctagcctgtctgccagcgtgggcgacagagtgaccatcacctgtaaagccagcgaggacatctacatccggctggcctggtatcagcagaagcctggaaaggcccctaagctgctgatctacgccgccacctctctggaaacaggcgtgccaagcagattttccggcagcggctctggcaccgatttcaccctgacaatatccagcctccagcctgaggacttcgccacctactactgccagcagtattggaccacaccttggacctttggcggaggcaccaaggtggaaatcaaactcgaggacctgaagaacgtgttcccacctgaggtggccgtgttcgagcctagcgaggccgagatcagccacacccagaaagccaccctcgtgtgcctggctaccggcttctaccccgaccatgtggaactgtcttggtgggtcaacggcaaagaggtgcacagcggcgtgtgtaccgacccccagccactgaaagaacagcccgccctgaacgacagccggtactgcctgagcagcagactgagagtgtccgccaccttctggcagaacccccggaaccacttcagatgccaggtgcagttctacggcctgagcgagaacgacgagtggacccaggacagagccaagcccgtgacccagatcgtgtctgccgaagcctggggcagagccgatgatgtgattaagatccactggcaggaaaagaagtccaacaccatcctgggcagccaggaaggcaacaccatgaagaccaacgacacctacatgaagttcagctggctgaccgtgcccgagaagtccctggacaaagaacacagatgcatcgtgcggcacgaaaacaacaagaacggcgtggaccaggaaatcatcttcccacccatcaagaccgatgtgattacaatggaccccaaggacaactgctccaaggacgccaacgataccctgctgctccagctgaccaacaccagcgcctactacatgtacttgttgctgctgctgaagtccgtggtgtacttcgccatcatcacatgctgcctgctgatggctatggtcaagcggaaggacagccggggaagggccaagcgatctggatctggagcaacaaacttctcactactcaaacaagcaggtgacgtggaggagaatcccgggcctactagtatggactggatttggcgcatccttttccttgtcggcgctgctaccggcgcgcattccttcgaacaggtgcagctccaagagtctggccctggactggtcaagcctagccagacactgagcctgacctgtaccgtgtccggctacagcatcaccatcgactacacctggaactggatcagacagcctcctggcaaaggactggaatggatcggctacatcacctacagcggcagcaccgactacaaccccagcctgaaaagccgggtgctgatctccgtggacaccagcaagaatcaggtgtccctgaagctgagcagcgtgacagccgctgataccgccgtgtactactgtgccagactgggcagaagatacgccctggattattggggccagggcaccaccgtgacagtgtcatctacgcgtatccagaaccctgatcctgccgtgtaccagctgcgggatagcaagagcagcgacaagagcgtgtgtctgttcaccgacttcgacagccagaccaacgtgtcccagagcaaggactccgacgtgtacatcaccgataagtgcgtgctggacatgcggagcatggacttcaagagcaactccgccgtggcctggtccaacaagtccgatttcgcctgcgccaacgccttcaacaacagcattatccccgaggacacattcttcccaagccccgagagcagcgactccaccgaccacgtgaagcccaaagagacagagaacaccaagcagcccagcaagagctgccacaagcccaaggccatcgtgcacaccgagaaagtgaacatgatgagcctgaccgtgctgggcctgcggatgctgttcgccaaaaccgtggccgtgaacttcctgctgaccgccaagctgttcttcctcctcaccgcc

SEQ ID NO: 6154 - DNA, 2181 bp, synthetic construct
  source 1..2181: mol_type = other DNA
atggccttaccagtgaccgccttgctcctgccgctggccttgctgctccacgccgccaggccggacatccagatgacccagaccacaagcagcctgtctgccagcctgggcgacagagtgaccatctcttgtagagccagccaggacatcagcaactacctgaactggtatcagcagaaacccgacggcaccgtgaagctgctgatctactacaccagcatcctgcacagcggcgtgcccagcagattttctggctctggcagcggcaccgactacagcctgaccatcagcaatctggaacaagaggacttcgctacctacttctgccagcaaggcaacaccctgccttggacatttggcggaggcaccaagctggaaatcaaagctctcgaggacctgaagaacgtgttcccacctgaggtggccgtgttcgagcctagcgaggccgagatcagccacacccagaaagccaccctcgtgtgcctggctaccggcttctaccccgaccatgtggaactgtcttggtgggtcaacggcaaagaggtgcacagcggcgtgtgtaccgacccccagccactgaaagaacagcccgccctgaacgacagccggtactgcctgagcagcagactgagagtgtccgccaccttctggcagaacccccggaaccacttcagatgccaggtgcagttctacggcctgagcgagaacgacgagtggacccaggacagagccaagcccgtgacccagatcgtgtctgccgaagcctggggcagagccgatgatgtgattaagatccactggcaggaaaagaagtccaacaccatcctgggcagccaggaaggcaacaccatgaagaccaacgacacctacatgaagttcagctggctgaccgtgcccgagaagtccctggacaaagaacacagatgcatcgtgcggcacgaaaacaacaagaacggcgtggaccaggaaatcatcttcccacccatcaagaccgatgtgattacaatggaccccaaggacaactgctccaaggacgccaacgataccctgctgctccagctgaccaacaccagcgcctactacatgtacttgttgctgctgctgaagtccgtggtgtacttcgccatcatcacatgctgcctgctgatggctatggtcaagcggaaggacagccggggaagggccaagcgatctggatctggagcaacaaacttctcactactcaaacaagcaggtgacgtggaggagaatcccgggcctactagtatggactggatttggcgcatccttttccttgtcggcgctgctaccggcgcgcattccttcgaagaagtgcaactggttgaatctggcggcggactggttaagcctggcggatctctgaagctgagctgtgccgcctctggcttcgccttcagcatctacgatatgagctgggtccgacagacccctgagaagagactggaatgggtcgcctacatctctagcggcggagggacctactatcccgacacagtgaagggcagattcaccatctccagagacaacgccaagaacaccctgtacctccagatgagcagcctgaagtccgaggacaccgccatgtactactgcgccagacacagcggctatggcacacattggggagtgctgtttgcctactggggccagggaacactggtcacagtttctgctacgcgtatccagaaccctgatcctgccgtgtaccagctgcgggatagcaagagcagcgacaagagcgtgtgtctgttcaccgacttcgacagccagaccaacgtgtcccagagcaaggactccgacgtgtacatcaccgataagtgcgtgctggacatgcggagcatggacttcaagagcaactccgccgtggcctggtccaacaagtccgatttcgcctgcgccaacgccttcaacaacagcattatccccgaggacacattcttcccaagccccgagagcagcgactccaccgaccacgtgaagcccaaagagacagagaacaccaagcagcccagcaagagctgccacaagcccaaggccatcgtgcacaccgagaaagtgaacatgatgagcctgaccgtgctgggcctgcggatgctgttcgccaaaaccgtggccgtgaacttcctgctgaccgccaagctgttcttcctcctcaccgcc

SEQ ID NO: 6155 - DNA, 2211 bp, synthetic construct
  source 1..2211: mol_type = other DNA
atggccttaccagtgaccgccttgctcctgccgctggccttgctgctccacgccgccaggccggacatcgtgatgacacagagccctgatagcctggccgtgtctctgggagagagagccaccatcaactgcaagagcagccagagcctgctgtacagaagcaaccagaagaactacctggcctggtatcagcagaagcccggccagcctcctaagctgctgatctactgggccagcaccagagaaagcggcgtgcccgatagattttctggctctggcagcggcaccgacttcaccctgacaatttctagcctgcaagccgaggacgtggccgtgtactactgccagcagtattacaactaccccagaaccttcggccagggcaccaaggtggaaatcaagagaacagttctcgaggacctgaagaacgtgttcccacctgaggtggccgtgttcgagcctagcgaggccgagatcagccacacccagaaagccaccctcgtgtgcctggctaccggcttctaccccgaccatgtggaactgtcttggtgggtcaacggcaaagaggtgcacagcggcgtgtgtaccgacccccagccactgaaagaacagcccgccctgaacgacagccggtactgcctgagcagcagactgagagtgtccgccaccttctggcagaacccccggaaccacttcagatgccaggtgcagttctacggcctgagcgagaacgacgagtggacccaggacagagccaagcccgtgacccagatcgtgtctgccgaagcctggggcagagccgatgatgtgattaagatccactggcaggaaaagaagtccaacaccatcctgggcagccaggaaggcaacaccatgaagaccaacgacacctacatgaagttcagctggctgaccgtgcccgagaagtccctggacaaagaacacagatgcatcgtgcggcacgaaaacaacaagaacggcgtggaccaggaaatcatcttcccacccatcaagaccgatgtgattacaatggaccccaaggacaactgctccaaggacgccaacgataccctgctgctccagctgaccaacaccagcgcctactacatgtacttgttgctgctgctgaagtccgtggtgtacttcgccatcatcacatgctgcctgctgatggctatggtcaagcggaaggacagccggggaagggccaagcgatctggatctggagcaacaaacttctcactactcaaacaagcaggtgacgtggaggagaatcccgggcctactagtatggactggatttggcgcatccttttccttgtcggcgctgctaccggcgcgcattccttcgaagaagttcagctgcttgaatcaggcggcggactggttcaacctggcggatctctgagactgagctgtgccgccagcggctacagcatcacaagcgactatgcctggaactgggtccgacaggcccctggcaaaggactggaatgggtgtcctacatcagcaacagcggcagcaccagctacaaccccagcctgaagtcccggttcaccatcagcagagacaacagcaagaacaccctgtacctccagatgaacagcctgagagctgaggacaccgccgtgtattattgcgccaaagagcggaactacgactacgacgattactactacgctatggactactggggccagggaaccctggtcacagtctcttctacgcgtatccagaaccctgatcctgccgtgtaccagctgcgggatagcaagagcagcgacaagagcgtgtgtctgttcaccgacttcgacagccagaccaacgtgtcccagagcaaggactccgacgtgtacatcaccgataagtgcgtgctggacatgcggagcatggacttcaagagcaactccgccgtggcctggtccaacaagtccgatttcgcctgcgccaacgccttcaacaacagcattatccccgaggacacattcttcccaagccccgagagcagcgactccaccgaccacgtgaagcccaaagagacagagaacaccaagcagcccagcaagagctgccacaagcccaaggccatcgtgcacaccgagaaagtgaacatgatgagcctgaccgtgctgggcctgcggatgctgttcgccaaaaccgtggccgtgaacttcctgctgaccgccaagctgttcttcctcctcaccgcc

SEQ ID NO: 6156 - DNA, 2190 bp, synthetic construct
  source 1..2190: mol_type = other DNA
atggccttaccagtgaccgccttgctcctgccgctggccttgctgctccacgccgccaggccggacgtggtcatgacacagagccctctgagcctgcctgtgacacttggacagcctgccagcatcagctgtagaagcagccagagcctgctgcacagcagcggcaatacctacctggaatggtatcagcagaggcccggacagagccccagacctctgatctacaagatcagcacccggttcagcggcgtgcccgatagattttctggctctggcagcggcaccgacttcaccctgaagattagcagagtggaagccgaggacgtgggcgtgtactactgcttccaaggcagccacgtgccatacacctttggcggcggaacaaaggtggaaatcaagagactcgaggacctgaagaacgtgttcccacctgaggtggccgtgttcgagcctagcgaggccgagatcagccacacccagaaagccaccctcgtgtgcctggctaccggcttctaccccgaccatgtggaactgtcttggtgggtcaacggcaaagaggtgcacagcggcgtgtgtaccgacccccagccactgaaagaacagcccgccctgaacgacagccggtactgcctgagcagcagactgagagtgtccgccaccttctggcagaacccccggaaccacttcagatgccaggtgcagttctacggcctgagcgagaacgacgagtggacccaggacagagccaagcccgtgacccagatcgtgtctgccgaagcctggggcagagccgatgatgtgattaagatccactggcaggaaaagaagtccaacaccatcctgggcagccaggaaggcaacaccatgaagaccaacgacacctacatgaagttcagctggctgaccgtgcccgagaagtccctggacaaagaacacagatgcatcgtgcggcacgaaaacaacaagaacggcgtggaccaggaaatcatcttcccacccatcaagaccgatgtgattacaatggaccccaaggacaactgctccaaggacgccaacgataccctgctgctccagctgaccaacaccagcgcctactacatgtacttgttgctgctgctgaagtccgtggtgtacttcgccatcatcacatgctgcctgctgatggctatggtcaagcggaaggacagccggggaagggccaagcgatctggatctggagcaacaaacttctcactactcaaacaagcaggtgacgtggaggagaatcccgggcctactagtatggactggatttggcgcatccttttccttgtcggcgctgctaccggcgcgcattccttcgaacaagttcagctggttcagagcggagccgaagtgaagaaacctggggcctctgtgaaggtgtcctgcaaagcctctggcctgaccatcgaggactactacatgcactgggtccgacaggcccctggacaaggacttgaatggatgggctggatcgaccccgagaacggcgatacagagtacggccctaagttccagggcagagtgaccatgaccagagacaccagcatcaacaccgcctacatggaactgagccggctgagatccgatgacaccgccgtgtactattgcgccgtgcacaatgcccactacggcacttggtttgcctattggggccagggcacactggtcaccgttagctctacgcgtatccagaaccctgatcctgccgtgtaccagctgcgggatagcaagagcagcgacaagagcgtgtgtctgttcaccgacttcgacagccagaccaacgtgtcccagagcaaggactccgacgtgtacatcaccgataagtgcgtgctggacatgcggagcatggacttcaagagcaactccgccgtggcctggtccaacaagtccgatttcgcctgcgccaacgccttcaacaacagcattatccccgaggacacattcttcccaagccccgagagcagcgactccaccgaccacgtgaagcccaaagagacagagaacaccaagcagcccagcaagagctgccacaagcccaaggccatcgtgcacaccgagaaagtgaacatgatgagcctgaccgtgctgggcctgcggatgctgttcgccaaaaccgtggccgtgaacttcctgctgaccgccaagctgttcttcctcctcaccgcc

SEQ ID NO: 6157 - DNA, 2166 bp, synthetic construct
  source 1..2166: mol_type = other DNA
atggccttaccagtgaccgccttgctcctgccgctggccttgctgctccacgccgccaggccggacatccagatgacacagagccctagcagcctgtctgccagcgtgggagacagagtgaccatcacctgtagagccagcgagaacatctacagcaacctggcctggtatcagcagaagcctggcaaggcccctaagctgctgatctacgccgccaccaatctggctgatggcgtgccaagcagattttccggctctggcagcggcaccgatttcaccctgacaatatccagcctccagcctgaggacttcgccacctactactgccagcacttttggggcacccctacattcggccagggcaccaaggtggaaatcaagagaacagttctcgaggacctgaagaacgtgttcccacctgaggtggccgtgttcgagcctagcgaggccgagatcagccacacccagaaagccaccctcgtgtgcctggctaccggcttctaccccgaccatgtggaactgtcttggtgggtcaacggcaaagaggtgcacagcggcgtgtgtaccgacccccagccactgaaagaacagcccgccctgaacgacagccggtactgcctgagcagcagactgagagtgtccgccaccttctggcagaacccccggaaccacttcagatgccaggtgcagttctacggcctgagcgagaacgacgagtggacccaggacagagccaagcccgtgacccagatcgtgtctgccgaagcctggggcagagccgatgatgtgattaagatccactggcaggaaaagaagtccaacaccatcctgggcagccaggaaggcaacaccatgaagaccaacgacacctacatgaagttcagctggctgaccgtgcccgagaagtccctggacaaagaacacagatgcatcgtgcggcacgaaaacaacaagaacggcgtggaccaggaaatcatcttcccacccatcaagaccgatgtgattacaatggaccccaaggacaactgctccaaggacgccaacgataccctgctgctccagctgaccaacaccagcgcctactacatgtacttgttgctgctgctgaagtccgtggtgtacttcgccatcatcacatgctgcctgctgatggctatggtcaagcggaaggacagccggggaagggccaagcgatctggatctggagcaacaaacttctcactactcaaacaagcaggtgacgtggaggagaatcccgggcctactagtatggactggatttggcgcatccttttccttgtcggcgctgctaccggcgcgcattccttcgaagaagtgcagctggttgaatcaggtggcggcctggttcaacctggcggatctctgagactgagctgtgccgcctctggcttcagcctgacaaattacggcgtgcactgggtccgacaggcccctggaaaaggactggaatgggtgtccgtgatttggagcggcggcagcaccgattacaacgccgccttcatcagccggttcaccatcagcgccgacaccagcaagaataccgcctacctccagatgaactccctgagagccgaggacaccgccgtgtactattgcgccagagaactgatccacgctatggacaactggggccagggaaccctggtcacagtctcttctacgcgtatccagaaccctgatcctgccgtgtaccagctgcgggatagcaagagcagcgacaagagcgtgtgtctgttcaccgacttcgacagccagaccaacgtgtcccagagcaaggactccgacgtgtacatcaccgataagtgcgtgctggacatgcggagcatggacttcaagagcaactccgccgtggcctggtccaacaagtccgatttcgcctgcgccaacgccttcaacaacagcattatccccgaggacacattcttcccaagccccgagagcagcgactccaccgaccacgtgaagcccaaagagacagagaacaccaagcagcccagcaagagctgccacaagcccaaggccatcgtgcacaccgagaaagtgaacatgatgagcctgaccgtgctgggcctgcggatgctgttcgccaaaaccgtggccgtgaacttcctgctgaccgccaagctgttcttcctcctcaccgcc

SEQ ID NO: 6158 - DNA, 2187 bp, synthetic construct
  source 1..2187: mol_type = other DNA
atggccttaccagtgaccgccttgctcctgccgctggccttgctgctccacgccgccaggccggacttcgtgatgacacagagccctctgagcctgcctgtgacacctggcgaacctgccagcatcagctgtagaagcagccagagcatcgtgcacagcaacggcaacacctacctggaatggtatctccagaagcctggacagagcccacagctgctgatctacaaggtgtccaacagattcagcggcgtgcccgacagattttctggcagcggctctggcaccgacttcaccctgaagattagcagagtggaagccgaggacgtgggcgtgtactactgcttccaaggctctcacgtgcccctgacctttggacagggcaccaagctggaaatcaagagactcgaggacctgaagaacgtgttcccacctgaggtggccgtgttcgagcctagcgaggccgagatcagccacacccagaaagccaccctcgtgtgcctggctaccggcttctaccccgaccatgtggaactgtcttggtgggtcaacggcaaagaggtgcacagcggcgtgtgtaccgacccccagccactgaaagaacagcccgccctgaacgacagccggtactgcctgagcagcagactgagagtgtccgccaccttctggcagaacccccggaaccacttcagatgccaggtgcagttctacggcctgagcgagaacgacgagtggacccaggacagagccaagcccgtgacccagatcgtgtctgccgaagcctggggcagagccgatgatgtgattaagatccactggcaggaaaagaagtccaacaccatcctgggcagccaggaaggcaacaccatgaagaccaacgacacctacatgaagttcagctggctgaccgtgcccgagaagtccctggacaaagaacacagatgcatcgtgcggcacgaaaacaacaagaacggcgtggaccaggaaatcatcttcccacccatcaagaccgatgtgattacaatggaccccaaggacaactgctccaaggacgccaacgataccctgctgctccagctgaccaacaccagcgcctactacatgtacttgttgctgctgctgaagtccgtggtgtacttcgccatcatcacatgctgcctgctgatggctatggtcaagcggaaggacagccggggaagggccaagcgatctggatctggagcaacaaacttctcactactcaaacaagcaggtgacgtggaggagaatcccgggcctactagtatggactggatttggcgcatccttttccttgtcggcgctgctaccggcgcgcattccttcgaagaagtgcagctggttgaaagcggagccgaagtgaagaaacctggggcctctgtgaaggtgtcctgcaaggccagcggctacacctttaccagctactggattcactgggtccgacaggcccctggacaaggacttgagtggatgggcgagaacgacccctccaacggcaggaccaactacaacgagaagttcaagaaccgcgtgaccctgaccgtggacaccagcatctctaccgcctacatggaactgagccggctgagatccgatgacaccgccgtgtactattgcgccagaggacccaactacttttacagcatggactactggggccagggcacaatggtcaccgttagctctacgcgtatccagaaccctgatcctgccgtgtaccagctgcgggatagcaagagcagcgacaagagcgtgtgtctgttcaccgacttcgacagccagaccaacgtgtcccagagcaaggactccgacgtgtacatcaccgataagtgcgtgctggacatgcggagcatggacttcaagagcaactccgccgtggcctggtccaacaagtccgatttcgcctgcgccaacgccttcaacaacagcattatccccgaggacacattcttcccaagccccgagagcagcgactccaccgaccacgtgaagcccaaagagacagagaacaccaagcagcccagcaagagctgccacaagcccaaggccatcgtgcacaccgagaaagtgaacatgatgagcctgaccgtgctgggcctgcggatgctgttcgccaaaaccgtggccgtgaacttcctgctgaccgccaagctgttcttcctcctcaccgcc

SEQ ID NO: 6159 - DNA, 2166 bp, synthetic construct
  source 1..2166: mol_type = other DNA
atggccttaccagtgaccgccttgctcctgccgctggccttgctgctccacgccgccaggccggacatccagctgactcagagccctagctttctgagcgccagcgtgggcgacagagtgaccatcacatgtagcgccagatccagcatcagcttcatgtactggtatcagcagaagcccggcaaggcccctaagctgctgatctacgacaccagcaatctggcctctggcgtgcccagcagattttctggaagcggcagcggcaccgagttcaccctgacaatctctagcctggaagccgaggatgccgccacctactattgccagcagtggtccagctatcccctgacatttggacagggcaccaagctggaaatcaaactcgaggacctgaagaacgtgttcccacctgaggtggccgtgttcgagcctagcgaggccgagatcagccacacccagaaagccaccctcgtgtgcctggctaccggcttctaccccgaccatgtggaactgtcttggtgggtcaacggcaaagaggtgcacagcggcgtgtgtaccgacccccagccactgaaagaacagcccgccctgaacgacagccggtactgcctgagcagcagactgagagtgtccgccaccttctggcagaacccccggaaccacttcagatgccaggtgcagttctacggcctgagcgagaacgacgagtggacccaggacagagccaagcccgtgacccagatcgtgtctgccgaagcctggggcagagccgatgatgtgattaagatccactggcaggaaaagaagtccaacaccatcctgggcagccaggaaggcaacaccatgaagaccaacgacacctacatgaagttcagctggctgaccgtgcccgagaagtccctggacaaagaacacagatgcatcgtgcggcacgaaaacaacaagaacggcgtggaccaggaaatcatcttcccacccatcaagaccgatgtgattacaatggaccccaaggacaactgctccaaggacgccaacgataccctgctgctccagctgaccaacaccagcgcctactacatgtacttgttgctgctgctgaagtccgtggtgtacttcgccatcatcacatgctgcctgctgatggctatggtcaagcggaaggacagccggggaagggccaagcgatctggatctggagcaacaaacttctcactactcaaacaagcaggtgacgtggaggagaatcccgggcctactagtatggactggatttggcgcatccttttccttgtcggcgctgctaccggcgcgcattccttcgaacaggttcagctggttcagtctggggccgaagtgaagaaacctggggcctctgtgaaggtgtcctgcaaggcttccggctacacctttaccggctcttggatgaactgggtccgacaggctcctggacagggactcgaatggatcggcagaatctatcctggcgacggcgagacaaactacaacggcaagttcaaggaccgcgtgacaatcaccgccgacaagagcacaagcaccgcctacatggaactgagcagcctgcggagcgaagataccgccgtgtactactgcgcccggatctacggcaacaacgtgtacttcgatgtgtggggccagggcacaaccgtgacagtctcttctacgcgtatccagaaccctgatcctgccgtgtaccagctgcgggatagcaagagcagcgacaagagcgtgtgtctgttcaccgacttcgacagccagaccaacgtgtcccagagcaaggactccgacgtgtacatcaccgataagtgcgtgctggacatgcggagcatggacttcaagagcaactccgccgtggcctggtccaacaagtccgatttcgcctgcgccaacgccttcaacaacagcattatccccgaggacacattcttcccaagccccgagagcagcgactccaccgaccacgtgaagcccaaagagacagagaacaccaagcagcccagcaagagctgccacaagcccaaggccatcgtgcacaccgagaaagtgaacatgatgagcctgaccgtgctgggcctgcggatgctgttcgccaaaaccgtggccgtgaacttcctgctgaccgccaagctgttcttcctcctcaccgcc

SEQ ID NO: 6160 - DNA, 2190 bp, synthetic construct
  source 1..2190: mol_type = other DNA
atggccttaccagtgaccgccttgctcctgccgctggccttgctgctccacgccgccaggccgcagctggtgctgacacagtctccaagcgcctctgccagcctgggatctagcgtgaagctgacctgtacactgagcagcggccacaagaccgacaccatcgactggtatcagcagcagcctggcaaggcccctagatacctgatgaagctggaaggcagcggcagctacaacaaaggctctggcgtgcccgatagattcagcggcagttcttctggcgctgattggtatctgaccatcagcagcctccagagcgaggacgaggccgattactactgcggcacagactaccccggcaactacctgtttggcggcggaacacagctgacagtgcttggcctcgaggacctgaagaacgtgttcccacctgaggtggccgtgttcgagcctagcgaggccgagatcagccacacccagaaagccaccctcgtgtgcctggctaccggcttctaccccgaccatgtggaactgtcttggtgggtcaacggcaaagaggtgcacagcggcgtgtgtaccgacccccagccactgaaagaacagcccgccctgaacgacagccggtactgcctgagcagcagactgagagtgtccgccaccttctggcagaacccccggaaccacttcagatgccaggtgcagttctacggcctgagcgagaacgacgagtggacccaggacagagccaagcccgtgacccagatcgtgtctgccgaagcctggggcagagccgatgatgtgattaagatccactggcaggaaaagaagtccaacaccatcctgggcagccaggaaggcaacaccatgaagaccaacgacacctacatgaagttcagctggctgaccgtgcccgagaagtccctggacaaagaacacagatgcatcgtgcggcacgaaaacaacaagaacggcgtggaccaggaaatcatcttcccacccatcaagaccgatgtgattacaatggaccccaaggacaactgctccaaggacgccaacgataccctgctgctccagctgaccaacaccagcgcctactacatgtacttgttgctgctgctgaagtccgtggtgtacttcgccatcatcacatgctgcctgctgatggctatggtcaagcggaaggacagccggggaagggccaagcgatctggatctggagcaacaaacttctcactactcaaacaagcaggtgacgtggaggagaatcccgggcctactagtatggactggatttggcgcatccttttccttgtcggcgctgctaccggcgcgcattccttcgaacaagaacagctggttgaaagcggcggaggactggttcaacctggcggttctctgagactgagctgtgccgccagcggcttcaccttcagcgactactacatgagctggatcagacaggccccaggcaaaggactggaatgggtcgccacaatctaccccagcagcggcaagacctactacgccgattctgccaagggcagactgaccatctccagcgacaacgccaaggacagcctgtacctccagatgaacagcctgagagccgaggacaccgccgtgtactactgcaccagagatagctacgccgacgacgccgctctgtttgacatttggggccagggcaccaccgtgaccgtttcttctacgcgtatccagaaccctgatcctgccgtgtaccagctgcgggatagcaagagcagcgacaagagcgtgtgtctgttcaccgacttcgacagccagaccaacgtgtcccagagcaaggactccgacgtgtacatcaccgataagtgcgtgctggacatgcggagcatggacttcaagagcaactccgccgtggcctggtccaacaagtccgatttcgcctgcgccaacgccttcaacaacagcattatccccgaggacacattcttcccaagccccgagagcagcgactccaccgaccacgtgaagcccaaagagacagagaacaccaagcagcccagcaagagctgccacaagcccaaggccatcgtgcacaccgagaaagtgaacatgatgagcctgaccgtgctgggcctgcggatgctgttcgccaaaaccgtggccgtgaacttcctgctgaccgccaagctgttcttcctcctcaccgcc

SEQ ID NO: 6161 - DNA, 2166 bp, synthetic construct; identical to SEQ ID NO: 6157
  source 1..2166: mol_type = other DNA

SEQ ID NO: 6162 - DNA, 2187 bp, synthetic construct; identical to SEQ ID NO: 6158
  source 1..2187: mol_type = other DNA

SEQ ID NO: 6163 - DNA, 2166 bp, synthetic construct; identical to SEQ ID NO: 6159
  source 1..2166: mol_type = other DNA

SEQ ID NO: 6164 - DNA, 2190 bp, synthetic construct; identical to SEQ ID NO: 6160
  source 1..2190: mol_type = other DNA

SEQ ID NO: 6165 - DNA, 2187 bp, synthetic construct
  source 1..2187: mol_type = other DNA
atggccttaccagtgaccgccttgctcctgccgctggccttgctgctccacgccgccaggccggatatccagctcactcaaagcccctctagtctctctgcctcagtgggggatcgggtcagttttacttgtcaagcttcacaggatatcaacaacttccttaattggtatcagcagaagccaggaaaagcacccaagctgctcatctatgatgcctcaaatttggagacgggtgttcccagtcgattctctgggtcagggtccgggaccgactttacgtttacgatctcctctctgcagcccgaagacatcgccacatactattgtcaacagtacggcaacttgcctttcacatttgggggcgggactaaggttgaaatcaagaggctcgaggacctgaagaacgtgttcccacctgaggtggccgtgttcgagcctagcgaggccgagatcagccacacccagaaagccaccctcgtgtgcctggctaccggcttctaccccgaccatgtggaactgtcttggtgggtcaacggcaaagaggtgcacagcggcgtgtgtaccgacccccagccactgaaagaacagcccgccctgaacgacagccggtactgcctgagcagcagactgagagtgtccgccaccttctggcagaacccccggaaccacttcagatgccaggtgcagttctacggcctgagcgagaacgacgagtggacccaggacagagccaagcccgtgacccagatcgtgtctgccgaagcctggggcagagccgatgatgtgattaagatccactggcaggaaaagaagtccaacaccatcctgggcagccaggaaggcaacaccatgaagaccaacgacacctacatgaagttcagctggctgaccgtgcccgagaagtccctggacaaagaacacagatgcatcgtgcggcacgaaaacaacaagaacggcgtggaccaggaaatcatcttcccacccatcaagaccgatgtgattacaatggaccccaaggacaactgctccaaggacgccaacgataccctgctgctccagctgaccaacaccagcgcctactacatgtacttgttgctgctgctgaagtccgtggtgtacttcgccatcatcacatgctgcctgctgatggctatggtcaagcggaaggacagccggggaagggccaagcgatctggatctggagcaacaaacttctcactactcaaacaagcaggtgacgtggaggagaatcccgggcctactagtatggactggatttggcgcatccttttccttgtcggcgctgctaccggcgcgcattccttcgaacaggtacagctgcaggaatctgggcccggacttgtcaagccaagtcagacactttctcttacatgtaccgtgagcggcggaagtataagcagtggaggcttttactggtcttggatacggcagcacccaggcaaaggcttggagtggattggatacattcatcattcaggatctacacactataatccatcccttaagtcccgggtcaccattagcattgatacgtctaagaatctgttcagtctcaggctgtcctccgtcactgctgccgacacagccgtgtactactgcgcctccttggtttactgcggaggcgactgttatagcggctttgattattgggggcaggggaccctcgtaaccgtgagctctacgcgtatccagaaccctgatcctgccgtgtaccagctgcgggatagcaagagcagcgacaagagcgtgtgtctgttcaccgacttcgacagccagaccaacgtgtcccagagcaaggactccgacgtgtacatcaccgataagtgcgtgctggacatgcggagcatggacttcaagagcaactccgccgtggcctggtccaacaagtccgatttcgcctgcgccaacgccttcaacaacagcattatccccgaggacacattcttcccaagccccgagagcagcgactccaccgaccacgtgaagcccaaagagacagagaacaccaagcagcccagcaagagctgccacaagcccaaggccatcgtgcacaccgagaaagtgaacatgatgagcctgaccgtgctgggcctgcggatgctgttcgccaaaaccgtggccgtgaacttcctgctgaccgccaagctgttcttcctcctcaccgcc

SEQ ID NO: 6166 - DNA, 2175 bp, synthetic construct
  source 1..2175: mol_type = other DNA
atggccttaccagtgaccgccttgctcctgccgctggccttgctgctccacgccgccaggccggacattcagatgacacagagccctagcagcctgagcgcctctgtgggagacagagtgaccatcacatgcaagagcagccagagcgtgctgtactccagcaatcagaagaactacctggcctggttccagcagaagcctggcaaggctcctaagctgctgatctactgggccagcaccagagaaagcggcgtgccaagcagattttctggcagcggctctggcaccgacttcaccctgacaatatccagcctccagcctgaggacttcgccacctacttttgccaccagtacctgagcagctacacattcggacagggcaccaaggtggaaatcaagcggctcgaggacctgaagaacgtgttcccacctgaggtggccgtgttcgagcctagcgaggccgagatcagccacacccagaaagccaccctcgtgtgcctggctaccggcttctaccccgaccatgtggaactgtcttggtgggtcaacggcaaagaggtgcacagcggcgtgtgtaccgacccccagccactgaaagaacagcccgccctgaacgacagccggtactgcctgagcagcagactgagagtgtccgccaccttctggcagaacccccggaaccacttcagatgccaggtgcagttctacggcctgagcgagaacgacgagtggacccaggacagagccaagcccgtgacccagatcgtgtctgccgaagcctggggcagagccgatgatgtgattaagatccactggcaggaaaagaagtccaacaccatcctgggcagccaggaaggcaacaccatgaagaccaacgacacctacatgaagttcagctggctgaccgtgcccgagaagtccctggacaaagaacacagatgcatcgtgcggcacgaaaacaacaagaacggcgtggaccaggaaatcatcttcccacccatcaagaccgatgtgattacaatggaccccaaggacaactgctccaaggacgccaacgataccctgctgctccagctgaccaacaccagcgcctactacatgtacttgttgctgctgctgaagtccgtggtgtacttcgccatcatcacatgctgcctgctgatggctatggtcaagcggaaggacagccggggaagggccaagcgatctggatctggagcaacaaacttctcactactcaaacaagcaggtgacgtggaggagaatcccgggcctactagtatggactggatttggcgcatccttttccttgtcggcgctgctaccggcgcgcattccttcgaagaggtgcagctggttgaatctggcggaggactggttcagcctggcggatctctgagactgtcttgtgccgccagcggctacaccttcaccacctattggatgcactgggtccgacaggcccctggcaaaggacttgagtgggtcggatatatcaggcccagcaccggctacacagagtacaaccagaagttcaaggaccgcttcaccatcagcgccgacaccagcaagaataccgcctacctccagatgaacagcctgagagccgaggacaccgccgtgtactactgtgccagatccagatggctgctggactattggggccagggcacactggttacagtttctacgcgtatccagaaccctgatcctgccgtgtaccagctgcgggatagcaagagcagcgacaagagcgtgtgtctgttcaccgacttcgacagccagaccaacgtgtcccagagcaaggactccgacgtgtacatcaccgataagtgcgtgctggacatgcggagcatggacttcaagagcaactccgccgtggcctggtccaacaagtccgatttcgcctgcgccaacgccttcaacaacagcattatccccgaggacacattcttcccaagccccgagagcagcgactccaccgaccacgtgaagcccaaagagacagagaacaccaagcagcccagcaagagctgccacaagcccaaggccatcgtgcacaccgagaaagtgaacatgatgagcctgaccgtgctgggcctgcggatgctgttcgccaaaaccgtggccgtgaacttcctgctgaccgccaagctgttcttcctcctcaccgcc

SEQ ID NO: 6167 - DNA, 2166 bp, synthetic construct
  source 1..2166: mol_type = other DNA
atggccttaccagtgaccgccttgctcctgccgctggccttgctgctccacgccgccaggccggacatccagatgacacagagccctagcagcctgtctgccagcgtgggagacagagtgaccatcacctgtagagccagccaggacatcagcaactacctgaactggtatcagcagaagcccggcaaggcccctaagctgctgatctactacaccagcagactgcacagcggcgtgcccagcagattttctggctctggcagcggcaccgacttcaccctgacaatatctagcctccagcctgaggacttcgccacctactattgccagcagggcaacaccctgccttacacatttggacagggcaccaaggtggaaatcaagagactcgaggacctgaagaacgtgttcccacctgaggtggccgtgttcgagcctagcgaggccgagatcagccacacccagaaagccaccctcgtgtgcctggctaccggcttctaccccgaccatgtggaactgtcttggtgggtcaacggcaaagaggtgcacagcggcgtgtgtaccgacccccagccactgaaagaacagcccgccctgaacgacagccggtactgcctgagcagcagactgagagtgtccgccaccttctggcagaacccccggaaccacttcagatgccaggtgcagttctacggcctgagcgagaacgacgagtggacccaggacagagccaagcccgtgacccagatcgtgtctgccgaagcctggggcagagccgatgatgtgattaagatccactggcaggaaaagaagtccaacaccatcctgggcagccaggaaggcaacaccatgaagaccaacgacacctacatgaagttcagctggctgaccgtgcccgagaagtccctggacaaagaacacagatgcatcgtgcggcacgaaaacaacaagaacggcgtggaccaggaaatcatcttcccacccatcaagaccgatgtgattacaatggaccccaaggacaactgctccaaggacgccaacgataccctgctgctccagctgaccaacaccagcgcctactacatgtacttgttgctgctgctgaagtccgtggtgtacttcgccatcatcacatgctgcctgctgatggctatggtcaagcggaaggacagccggggaagggccaagcgatctggatctggagcaacaaacttctcactactcaaacaagcaggtgacgtggaggagaatcccgggcctactagtatggactggatttggcgcatccttttccttgtcggcgctgctaccggcgcgcattccttcgaagaagtgcagctggttgaatcaggtggcggcctggttcaacctggcggatctctgagactgagctgtgccgccagcggcttcaccttcagcgactactttatgagctgggtccgacaggcccctggcaaaggacttgaatgggtcgccaccatcagcaatggcggcacctacacttactaccccgacagcgtgaagggcagattcaccatctccagagacaacagcaagaacaccctgtacctccagatgaactccctgagagccgaggacaccgccgtgtactactgcgccagattcgacggctacatcttcgactattggggccagggcaccctggtcacagtctcttctacgcgtatccagaaccctgatcctgccgtgtaccagctgcgggatagcaagagcagcgacaagagcgtgtgtctgttcaccgacttcgacagccagaccaacgtgtcccagagcaaggactccgacgtgtacatcaccgataagtgcgtgctggacatgcggagcatggacttcaagagcaactccgccgtggcctggtccaacaagtccgatttcgcctgcgccaacgccttcaacaacagcattatccccgaggacacattcttcccaagccccgagagcagcgactccaccgaccacgtgaagcccaaagagacagagaacaccaagcagcccagcaagagctgccacaagcccaaggccatcgtgcacaccgagaaagtgaacatgatgagcctgaccgtgctgggcctgcggatgctgttcgccaaaaccgtggccgtgaacttcctgctgaccgccaagctgttcttcctcctcaccgcc

SEQ ID NO: 6168 - DNA, 2181 bp, synthetic construct
  source 1..2181: mol_type = other DNA
atggccttaccagtgaccgccttgctcctgccgctggccttgctgctccacgccgccaggccggacatccagatgacacagactacatcctccctgtctgcctctctgggagacagagtcaccatcagttgcagggcaagtcaggacattagtaagtacctgaactggtatcagcagaaaccagatggaactgttaaactcctgatctaccatacatcaagattacactcaggagtcccatcaaggttcagtggcagtgggtctggaacagattattctctcaccattagcaacctggagcaagaagatattgccacttacttttgccaacagggtaatacgcttccgtacacgttcggaggggggaccaagctggagatcacactcgagatccagaaccctgatcctgccgtgtaccagctgcgggatagcaagagcagcgacaagagcgtgtgtctgttcaccgacttcgacagccagaccaacgtgtcccagagcaaggactccgacgtgtacatcaccgataagtgcgtgctggacatgcggagcatggacttcaagagcaactccgccgtggcctggtccaacaagtccgatttcgcctgcgccaacgccttcaacaacagcattatccccgaggacacattcttcccaagccccgagagcagcgactccaccgaccacgtgaagcccaaagagacagagaacaccaagcagcccagcaagagctgccacaagcccaaggccatcgtgcacaccgagaaagtgaacatgatgagcctgaccgtgctgggcctgcggatgctgttcgccaaaaccgtggccgtgaacttcctgctgaccgccaagctgttcttcctcctcaccgcccgcgccaagagaagcggatctggcgtgaagcagaccctgaatttcgacctgctgaagctggctggcgacgtggaatccaacccaggccctactagtatggactggatttggcgcatccttttccttgtcggcgctgctaccggcgcgcattccttcgaagtgaaactgcaggagtcaggacctggcctggtggcgccctcacagagcctgtccgtcacatgcactgtctcaggggtctcattacccgactatggtgtaagctggattcgccagcctccacgaaagggtctggagtggctgggagtaatatggggtagtgaaaccacatactataattcagctctcaaatccagactgaccatcatcaaggacaactccaagagccaagttttcttaaaaatgaacagtctgcaaactgatgacacagccatttactactgtgccaaacattattactacggtggtagctatgctatggactactggggccaaggaacctcagtcaccgtctcctcaacgcgtgaggacctgaagaacgtgttcccacctgaggtggccgtgttcgagcctagcgaggccgagatcagccacacccagaaagccaccctcgtgtgcctggctaccggcttctaccccgaccatgtggaactgtcttggtgggtcaacggcaaagaggtgcacagcggcgtgtgtaccgacccccagccactgaaagaacagcccgccctgaacgacagccggtactgcctgagcagcagactgagagtgtccgccaccttctggcagaacccccggaaccacttcagatgccaggtgcagttctacggcctgagcgagaacgacgagtggacccaggacagagccaagcccgtgacccagatcgtgtctgccgaagcctggggcagagccgatgatgtgattaagatccactggcaggaaaagaagtccaacaccatcctgggcagccaggaaggcaacaccatgaagaccaacgacacctacatgaagttcagctggctgaccgtgcccgagaagtccctggacaaagaacacagatgcatcgtgcggcacgaaaacaacaagaacggcgtggaccaggaaatcatcttcccacccatcaagaccgatgtgattacaatggaccccaaggacaactgctccaaggacgccaacgataccctgctgctccagctgaccaacaccagcgcctactacatgtacttgttgctgctgctgaagtccgtggtgtacttcgccatcatcacatgctgcctgctgatggctatggtcaagcggaaggacagccgggga

SEQ ID NO: 6169 - DNA, 2184 bp, synthetic construct
  source 1..2184: mol_type = other DNA
atggccttaccagtgaccgccttgctcctgccgctggccttgctgctccacgccgccaggccggagatcgtgatgacccagagccctgccaccctgtctctgagccctggcgaaagagccaccctgagctgtagagccagccaggacatcagcaagtacctgaactggtatcagcagaagcccggccaggcccccagactgctgatctaccacaccagcagactgcacagcggcatccccgccagattttctggctctggcagcggcaccgactacaccctgacaatcagcagcctccagcccgaggacttcgccgtgtacttctgtcagcaaggcaacaccctgccctacaccttcggccagggcaccaagctggaaatcaagctcgagatccagaaccctgatcctgccgtgtaccagctgcgggatagcaagagcagcgacaagagcgtgtgtctgttcaccgacttcgacagccagaccaacgtgtcccagagcaaggactccgacgtgtacatcaccgataagtgcgtgctggacatgcggagcatggacttcaagagcaactccgccgtggcctggtccaacaagtccgatttcgcctgcgccaacgccttcaacaacagcattatccccgaggacacattcttcccaagccccgagagcagcgactccaccgaccacgtgaagcccaaagagacagagaacaccaagcagcccagcaagagctgccacaagcccaaggccatcgtgcacaccgagaaagtgaacatgatgagcctgaccgtgctgggcctgcggatgctgttcgccaaaaccgtggccgtgaacttcctgctgaccgccaagctgttcttcctcctcaccgcccgcgccaagagaagcggatctggcgtgaagcagaccctgaatttcgacctgctgaagctggctggcgacgtggaatccaacccaggccctactagtatggactggatttggcgcatccttttccttgtcggcgctgctaccggcgcgcattccttcgaacaggtgcaactccaggaatctggccctggcctcgtgaagcccagcgagacactgagcctgacctgtaccgtgtccggcgtgtccctgcctgactatggcgtgtcctggatcagacagccccctggcaagggcctggaatggatcggagtgatttggggcagcgaaaccacctactacaacagctccctgaagtccagagtgaccatctccaaggacaactccaagaaccaggtgtccctgaagctgagcagcgtgacagccgccgacaccgccgtgtattactgcgccaagcactactactacggcggcagctacgctatggactactggggccagggaaccctcgtgaccgtgtctagtacgcgtgaggacctgaagaacgtgttcccacctgaggtggccgtgttcgagcctagcgaggccgagatcagccacacccagaaagccaccctcgtgtgcctggctaccggcttctaccccgaccatgtggaactgtcttggtgggtcaacggcaaagaggtgcacagcggcgtgtgtaccgacccccagccactgaaagaacagcccgccctgaacgacagccggtactgcctgagcagcagactgagagtgtccgccaccttctggcagaacccccggaaccacttcagatgccaggtgcagttctacggcctgagcgagaacgacgagtggacccaggacagagccaagcccgtgacccagatcgtgtctgccgaagcctggggcagagccgatgatgtgattaagatccactggcaggaaaagaagtccaacaccatcctgggcagccaggaaggcaacaccatgaagaccaacgacacctacatgaagttcagctggctgaccgtgcccgagaagtccctggacaaagaacacagatgcatcgtgcggcacgaaaacaacaagaacggcgtggaccaggaaatcatcttcccacccatcaagaccgatgtgattacaatggaccccaaggacaactgctccaaggacgccaacgataccctgctgctccagctgaccaacaccagcgcctactacatgtacttgttgctgctgctgaagtccgtggtgtacttcgccatcatcacatgctgcctgctgatggctatggtcaagcggaaggacagccgggga

SEQ ID NO: 6170 - DNA, 2187 bp, synthetic construct
  source 1..2187: mol_type = other DNA
atggccttaccagtgaccgccttgctcctgccgctggccttgctgctccacgccgccaggccggacgagatcgtgctgacacagagccccgccaccctgtcactgtctccaggcgaaagagccaccctgagctgtagcgccagcagcagcgtgtcctacatgcactggtatcagcagaagcccggccaggcccccagactgctgatctacgataccagcaagctggcctccggcatccccgccagattttctggcagcggctccggcaccgacttcaccctgacaatcagcagcctggaacccgaggacgtggccgtgtactactgttttcaaggcagcgtgtaccccttcaccttcggccagggcaccaagctggaaatcaagagactcgagatccagaaccctgatcctgccgtgtaccagctgcgggatagcaagagcagcgacaagagcgtgtgtctgttcaccgacttcgacagccagaccaacgtgtcccagagcaaggactccgacgtgtacatcaccgataagtgcgtgctggacatgcggagcatggacttcaagagcaactccgccgtggcctggtccaacaagtccgatttcgcctgcgccaacgccttcaacaacagcattatccccgaggacacattcttcccaagccccgagagcagcgactccaccgaccacgtgaagcccaaagagacagagaacaccaagcagcccagcaagagctgccacaagcccaaggccatcgtgcacaccgagaaagtgaacatgatgagcctgaccgtgctgggcctgcggatgctgttcgccaaaaccgtggccgtgaacttcctgctgaccgccaagctgttcttcctcctcaccgcccgcgccaagagaagcggatctggcgtgaagcagaccctgaatttcgacctgctgaagctggctggcgacgtggaatccaacccaggccctactagtatggactggatttggcgcatccttttccttgtcggcgctgctaccggcgcgcattccttcgaacaggtgcagctccaggaatctggccctggcctcgtgaagcctagccagaccctgagcctgacctgtaccgtgtctggcggcagcatcagcacaagcggcatgggcgtgggctggatcagacagcaccctggcaagggcctggaatggatcggccacatttggtgggacgacgacaagcggtacaaccccgccctgaagtccagagtgaccatcagcgtggacaccagcaagaaccagttcagcctgaagctgagcagcgtgacagccgccgataccgccgtgtattattgcgcccggatggaactgtggtcctactacttcgactactggggccagggaaccctcgtgaccgtgtctagtacgcgtgaggacctgaagaacgtgttcccacctgaggtggccgtgttcgagcctagcgaggccgagatcagccacacccagaaagccaccctcgtgtgcctggctaccggcttctaccccgaccatgtggaactgtcttggtgggtcaacggcaaagaggtgcacagcggcgtgtgtaccgacccccagccactgaaagaacagcccgccctgaacgacagccggtactgcctgagcagcagactgagagtgtccgccaccttctggcagaacccccggaaccacttcagatgccaggtgcagttctacggcctgagcgagaacgacgagtggacccaggacagagccaagcccgtgacccagatcgtgtctgccgaagcctggggcagagccgatgatgtgattaagatccactggcaggaaaagaagtccaacaccatcctgggcagccaggaaggcaacaccatgaagaccaacgacacctacatgaagttcagctggctgaccgtgcccgagaagtccctggacaaagaacacagatgcatcgtgcggcacgaaaacaacaagaacggcgtggaccaggaaatcatcttcccacccatcaagaccgatgtgattacaatggaccccaaggacaactgctccaaggacgccaacgataccctgctgctccagctgaccaacaccagcgcctactacatgtacttgttgctgctgctgaagtccgtggtgtacttcgccatcatcacatgctgcctgctgatggctatggtcaagcggaaggacagccgggga

SEQ ID NO: 6171 - DNA, 2181 bp, synthetic construct
  source 1..2181: mol_type = other DNA
atggccttaccagtgaccgccttgctcctgccgctggccttgctgctccacgccgccaggccggactacatccacgtgacacagagccctagcagcctgtccgtgtccatcggcgatagagtgaccatcaactgccagacctctcaaggcgtgggcagcgacctgcactggtatcagcacaaacctggcagagcccctaagctgctgatccaccatgccagctctgtggaagatggcgtgcccagcagattttccggcaccggatttcacaccagcttcaacctgacaatcaacgacctccaggccgacgacatcggcacctactactgtcaagtgctccagagcttcggcagaggcagcagactggatacaaaactcgagatccagaaccctgatcctgccgtgtaccagctgcgggatagcaagagcagcgacaagagcgtgtgtctgttcaccgacttcgacagccagaccaacgtgtcccagagcaaggactccgacgtgtacatcaccgataagtgcgtgctggacatgcggagcatggacttcaagagcaactccgccgtggcctggtccaacaagtccgatttcgcctgcgccaacgccttcaacaacagcattatccccgaggacacattcttcccaagccccgagagcagcgactccaccgaccacgtgaagcccaaagagacagagaacaccaagcagcccagcaagagctgccacaagcccaaggccatcgtgcacaccgagaaagtgaacatgatgagcctgaccgtgctgggcctgcggatgctgttcgccaaaaccgtggccgtgaacttcctgctgaccgccaagctgttcttcctcctcaccgcccgcgccaagagaagcggatctggcgtgaagcagaccctgaatttcgacctgctgaagctggctggcgacgtggaatccaacccaggccctactagtatggactggatttggcgcatccttttccttgtcggcgctgctaccggcgcgcattccttcgaaagggcacacctggtgcagtctggcaccgccatgaagaaacctggcgcttccgtcagagtgtcctgtcagacaagcggctacaccttcacagcccacatcctgttctggttcagacaggccccaggcagaggactggaatgggtcggatggatcaagccccagtacggggccgtgaatttcggcggaggcttcagagacagagtgaccctgaccagggacgtgtaccgggaaatcgcctacatggacatccggggcctgaagcctgatgacaccgccgtgtactactgcgccagggatagaagctacggcgacagctcttgggctctcgatgcttggggacagggcacaacagtggtggtgtctgctacgcgtgaggacctgaagaacgtgttcccacctgaggtggccgtgttcgagcctagcgaggccgagatcagccacacccagaaagccaccctcgtgtgcctggctaccggcttctaccccgaccatgtggaactgtcttggtgggtcaacggcaaagaggtgcacagcggcgtgtgtaccgacccccagccactgaaagaacagcccgccctgaacgacagccggtactgcctgagcagcagactgagagtgtccgccaccttctggcagaacccccggaaccacttcagatgccaggtgcagttctacggcctgagcgagaacgacgagtggacccaggacagagccaagcccgtgacccagatcgtgtctgccgaagcctggggcagagccgatgatgtgattaagatccactggcaggaaaagaagtccaacaccatcctgggcagccaggaaggcaacaccatgaagaccaacgacacctacatgaagttcagctggctgaccgtgcccgagaagtccctggacaaagaacacagatgcatcgtgcggcacgaaaacaacaagaacggcgtggaccaggaaatcatcttcccacccatcaagaccgatgtgattacaatggaccccaaggacaactgctccaaggacgccaacgataccctgctgctccagctgaccaacaccagcgcctactacatgtacttgttgctgctgctgaagtccgtggtgtacttcgccatcatcacatgctgcctgctgatggctatggtcaagcggaaggacagccgggga

SEQ ID NO: 6172 - DNA, 2211 bp, synthetic construct
  source 1..2211: mol_type = other DNA
atggccttaccagtgaccgccttgctcctgccgctggccttgctgctccacgccgccaggccggacgtgcagatgatccagacccccgatagcctggccgtgtccctgggacagagagccaccatctcttgcagagccagcgagagcgtggacaactacggcatcagcttcatgcactggtatcagcagaagcccggccagagccccaagctgctgatctacagagcctccaacctggaaagcggcatccccgccagattttccggcagcggcagcagaaccgacttcaccctgaccatcaaccccgtggaaaccgacgacgtggcaacctactactgccagcagaacaacaaggacccccccacctttggcggaggcaccaagctggaaatcaagctcgagatccagaaccctgatcctgccgtgtaccagctgcgggatagcaagagcagcgacaagagcgtgtgtctgttcaccgacttcgacagccagaccaacgtgtcccagagcaaggactccgacgtgtacatcaccgataagtgcgtgctggacatgcggagcatggacttcaagagcaactccgccgtggcctggtccaacaagtccgatttcgcctgcgccaacgccttcaacaacagcattatccccgaggacacattcttcccaagccccgagagcagcgactccaccgaccacgtgaagcccaaagagacagagaacaccaagcagcccagcaagagctgccacaagcccaaggccatcgtgcacaccgagaaagtgaacatgatgagcctgaccgtgctgggcctgcggatgctgttcgccaaaaccgtggccgtgaacttcctgctgaccgccaagctgttcttcctcctcaccgcccgcgccaagagaagcggatctggcgtgaagcagaccctgaatttcgacctgctgaagctggctggcgacgtggaatccaacccaggccctactagtatggactggatttggcgcatccttttccttgtcggcgctgctaccggcgcgcattccttcgaagggggaggcggctctcaggtgcaactccagcagtctggcgctgagcttgtgaagcctggggccagcgtgaagattagctgcaaggccagcggctacgccttcagcagctactggatgaactgggtcaagcagcggcctggcaagggcctggaatggatcggccaaatctaccccggcgacggcgacaccacctacaacggcaagttcaagggcaaggccaccctgacagccgacaagagcagcagcaccgtgtacatgcaactgaacagcctgaccagcgaggacagcgccgtgtacttctgcgtgcggtactactacggcagctccggctacttcgactattggggccagggcaccacactgaccgtgtcctctacgcgtgaggacctgaagaacgtgttcccacctgaggtggccgtgttcgagcctagcgaggccgagatcagccacacccagaaagccaccctcgtgtgcctggctaccggcttctaccccgaccatgtggaactgtcttggtgggtcaacggcaaagaggtgcacagcggcgtgtgtaccgacccccagccactgaaagaacagcccgccctgaacgacagccggtactgcctgagcagcagactgagagtgtccgccaccttctggcagaacccccggaaccacttcagatgccaggtgcagttctacggcctgagcgagaacgacgagtggacccaggacagagccaagcccgtgacccagatcgtgtctgccgaagcctggggcagagccgatgatgtgattaagatccactggcaggaaaagaagtccaacaccatcctgggcagccaggaaggcaacaccatgaagaccaacgacacctacatgaagttcagctggctgaccgtgcccgagaagtccctggacaaagaacacagatgcatcgtgcggcacgaaaacaacaagaacggcgtggaccaggaaatcatcttcccacccatcaagaccgatgtgattacaatggaccccaaggacaactgctccaaggacgccaacgataccctgctgctccagctgaccaacaccagcgcctactacatgtacttgttgctgctgctgaagtccgtggtgtacttcgccatcatcacatgctgcctgctgatggctatggtcaagcggaaggacagccgggga

SEQ ID NO: 6173 - DNA, 2184 bp, synthetic construct
  source 1..2184: mol_type = other DNA
atggccttaccagtgaccgccttgctcctgccgctggccttgctgctccacgccgccaggccggacgtgcagatgatccagacccccagcagcctgtctgccagcctgggcgatagagtgaccatcagctgtcgggccagccaggacatcggcaactacctgaactggtatcagcagaaacccgacggcaccgtgaagctgctgatctactacaccagcagactgcacagcggcgtgcccagcagattttctggcagcggctctggcaccgagtacagcctgaccatctccaacctggaacaggaagatattgctacctacttctgtcagcaaggcagcgccctgccccctacatttggcggcggaacaaagctggaaatcaacctcgagatccagaaccctgatcctgccgtgtaccagctgcgggatagcaagagcagcgacaagagcgtgtgtctgttcaccgacttcgacagccagaccaacgtgtcccagagcaaggactccgacgtgtacatcaccgataagtgcgtgctggacatgcggagcatggacttcaagagcaactccgccgtggcctggtccaacaagtccgatttcgcctgcgccaacgccttcaacaacagcattatccccgaggacacattcttcccaagccccgagagcagcgactccaccgaccacgtgaagcccaaagagacagagaacaccaagcagcccagcaagagctgccacaagcccaaggccatcgtgcacaccgagaaagtgaacatgatgagcctgaccgtgctgggcctgcggatgctgttcgccaaaaccgtggccgtgaacttcctgctgaccgccaagctgttcttcctcctcaccgcccgcgccaagagaagcggatctggcgtgaagcagaccctgaatttcgacctgctgaagctggctggcgacgtggaatccaacccaggccctactagtatggactggatttggcgcatccttttccttgtcggcgctgctaccggcgcgcattccttcgaagctctccagctccagcagtctggcgcagaactcgtgcggcctggcgcttctgtgaccctgagctgtaaagccagcggctacaccttcaccgactacgagatgcactgggtcaagcagacccctgtgcacggcctggaatggatcggagccatcgaccctgagacaggcggcaccgcctacaaccagaagttcgagggcaaggccatcctgaccgccgacaagagcagcagcacagcctacatggaactgcggagcctgacctccgaggacagccccgtgtactactgtgccagacggcggtactacggcagcagctccttcgactattggggccagggcaccaccctgaccgtgtctagtacgcgtgaggacctgaagaacgtgttcccacctgaggtggccgtgttcgagcctagcgaggccgagatcagccacacccagaaagccaccctcgtgtgcctggctaccggcttctaccccgaccatgtggaactgtcttggtgggtcaacggcaaagaggtgcacagcggcgtgtgtaccgacccccagccactgaaagaacagcccgccctgaacgacagccggtactgcctgagcagcagactgagagtgtccgccaccttctggcagaacccccggaaccacttcagatgccaggtgcagttctacggcctgagcgagaacgacgagtggacccaggacagagccaagcccgtgacccagatcgtgtctgccgaagcctggggcagagccgatgatgtgattaagatccactggcaggaaaagaagtccaacaccatcctgggcagccaggaaggcaacaccatgaagaccaacgacacctacatgaagttcagctggctgaccgtgcccgagaagtccctggacaaagaacacagatgcatcgtgcggcacgaaaacaacaagaacggcgtggaccaggaaatcatcttcccacccatcaagaccgatgtgattacaatggaccccaaggacaactgctccaaggacgccaacgataccctgctgctccagctgaccaacaccagcgcctactacatgtacttgttgctgctgctgaagtccgtggtgtacttcgccatcatcacatgctgcctgctgatggctatggtcaagcggaaggacagccgggga

SEQ ID NO: 6174 - DNA, 2196 bp, synthetic construct
  source 1..2196: mol_type = other DNA
atggccttaccagtgaccgccttgctcctgccgctggccttgctgctccacgccgccaggccggacatcgtcctgacccagtccccagccagcctggcggtgtccctgggtcaacgagctaccatttcctgcagagcctctaagtccgtatccacttccggctatagttacctgcattggtaccaacagaaaccagggcagccacccaagctgctcatctatctggcctcaaacctggagtccggcgtgcccgccagattctccggaagtgggagcggcaccgactttacattgaacatccacccagtcgaagaggaagatgctgccacttattactgtcagcactccagggagctgccatttacatttggctctggcacaaaactggagatcaaactcgagatccagaaccctgatcctgccgtgtaccagctgcgggatagcaagagcagcgacaagagcgtgtgtctgttcaccgacttcgacagccagaccaacgtgtcccagagcaaggactccgacgtgtacatcaccgataagtgcgtgctggacatgcggagcatggacttcaagagcaactccgccgtggcctggtccaacaagtccgatttcgcctgcgccaacgccttcaacaacagcattatccccgaggacacattcttcccaagccccgagagcagcgactccaccgaccacgtgaagcccaaagagacagagaacaccaagcagcccagcaagagctgccacaagcccaaggccatcgtgcacaccgagaaagtgaacatgatgagcctgaccgtgctgggcctgcggatgctgttcgccaaaaccgtggccgtgaacttcctgctgaccgccaagctgttcttcctcctcaccgcccgcgccaagagaagcggatctggcgtgaagcagaccctgaatttcgacctgctgaagctggctggcgacgtggaatccaacccaggccctactagtatggactggatttggcgcatccttttccttgtcggcgctgctaccggcgcgcattccttcgaacaggttcagctggtcgagtccgggggaggtctggtacagccgggtggcagcctcaagctgtcatgtgccgcatctggttttgactttagcaggtattggatgagctgggtccgccaggccccgggcaagggacttgagtggattggagaaataaaccctacttccagcacaatcaacttcacaccttctttgaaagataaggtttttatctctcgggataacgctaaaaacacactgtacttgcagatgtctaaggtgcgaagcgaagacaccgccctctattattgcgcccggggtaattactaccgctatggggatgcgatggactattgggggcaaggtacctccgtcacggtctcaacgcgtgaggacctgaagaacgtgttcccacctgaggtggccgtgttcgagcctagcgaggccgagatcagccacacccagaaagccaccctcgtgtgcctggctaccggcttctaccccgaccatgtggaactgtcttggtgggtcaacggcaaagaggtgcacagcggcgtgtgtaccgacccccagccactgaaagaacagcccgccctgaacgacagccggtactgcctgagcagcagactgagagtgtccgccaccttctggcagaacccccggaaccacttcagatgccaggtgcagttctacggcctgagcgagaacgacgagtggacccaggacagagccaagcccgtgacccagatcgtgtctgccgaagcctggggcagagccgatgatgtgattaagatccactggcaggaaaagaagtccaacaccatcctgggcagccaggaaggcaacaccatgaagaccaacgacacctacatgaagttcagctggctgaccgtgcccgagaagtccctggacaaagaacacagatgcatcgtgcggcacgaaaacaacaagaacggcgtggaccaggaaatcatcttcccacccatcaagaccgatgtgattacaatggaccccaaggacaactgctccaaggacgccaacgataccctgctgctccagctgaccaacaccagcgcctactacatgtacttgttgctgctgctgaagtccgtggtgtacttcgccatcatcacatgctgcctgctgatggctatggtcaagcggaaggacagccgggga

SEQ ID NO: 6175 - DNA, 2190 bp, synthetic construct
  source 1..2190: mol_type = other DNA
atggccttaccagtgaccgccttgctcctgccgctggccttgctgctccacgccgccaggccggacatccagatgacccagagccctagctcactgagcgccagcgtgggcgacagggtgaccattacctgctccgccagccaggacatcagcaactacctgaactggtaccagcagaagcccggcaaggcccccaagctgctgatctactacacctccaacctgcactccggcgtgcccagcaggttcagcggaagcggcagcggcaccgatttcaccctgaccatctccagcctgcagcccgaggacttcgccacctactactgccagcagtacaggaagctcccctggactttcggccagggcaccaaactggagatcaagcgtctcgagatccagaaccctgatcctgccgtgtaccagctgcgggatagcaagagcagcgacaagagcgtgtgtctgttcaccgacttcgacagccagaccaacgtgtcccagagcaaggactccgacgtgtacatcaccgataagtgcgtgctggacatgcggagcatggacttcaagagcaactccgccgtggcctggtccaacaagtccgatttcgcctgcgccaacgccttcaacaacagcattatccccgaggacacattcttcccaagccccgagagcagcgactccaccgaccacgtgaagcccaaagagacagagaacaccaagcagcccagcaagagctgccacaagcccaaggccatcgtgcacaccgagaaagtgaacatgatgagcctgaccgtgctgggcctgcggatgctgttcgccaaaaccgtggccgtgaacttcctgctgaccgccaagctgttcttcctcctcaccgcccgcgccaagagaagcggatctggcgtgaagcagaccctgaatttcgacctgctgaagctggctggcgacgtggaatccaacccaggccctactagtatggactggatttggcgcatccttttccttgtcggcgctgctaccggcgcgcattccttcgaacaggtgcagctggtccagagcggcgccgaagtgaagaagcccggcagctccgtgaaagtgagctgcaaggccagcggcggcaccttcagcaactactggatgcactgggtgaggcaggcccccggacagggcctggagtggatgggcgccacctacaggggccacagcgacacctactacaaccagaagttcaagggccgggtgaccatcaccgccgacaagagcaccagcaccgcctacatggaactgagcagcctcaggagcgaggacaccgctgtgtattactgcgccaggggcgccatctacgacggctacgacgtgctggacaactggggccagggcacactggtgaccgtgtccagcacgcgtgaggacctgaagaacgtgttcccacctgaggtggccgtgttcgagcctagcgaggccgagatcagccacacccagaaagccaccctcgtgtgcctggctaccggcttctaccccgaccatgtggaactgtcttggtgggtcaacggcaaagaggtgcacagcggcgtgtgtaccgacccccagccactgaaagaacagcccgccctgaacgacagccggtactgcctgagcagcagactgagagtgtccgccaccttctggcagaacccccggaaccacttcagatgccaggtgcagttctacggcctgagcgagaacgacgagtggacccaggacagagccaagcccgtgacccagatcgtgtctgccgaagcctggggcagagccgatgatgtgattaagatccactggcaggaaaagaagtccaacaccatcctgggcagccaggaaggcaacaccatgaagaccaacgacacctacatgaagttcagctggctgaccgtgcccgagaagtccctggacaaagaacacagatgcatcgtgcggcacgaaaacaacaagaacggcgtggaccaggaaatcatcttcccacccatcaagaccgatgtgattacaatggaccccaaggacaactgctccaaggacgccaacgataccctgctgctccagctgaccaacaccagcgcctactacatgtacttgttgctgctgctgaagtccgtggtgtacttcgccatcatcacatgctgcctgctgatggctatggtcaagcggaaggacagccgggga

SEQ ID NO: 6176 - DNA, 2190 bp, synthetic construct
  source 1..2190: mol_type = other DNA
atggccttaccagtgaccgccttgctcctgccgctggccttgctgctccacgccgccaggccggacatcgtgctgacacagagccctgccaccctgtctctgagccctggcgatagagccaccatcagctgtagagccagcgagagcgtgaccatcctgggcagccacctgatctactggtatcagcagaagcccggccagccccccagactgctgattcagctggcctccaatgtgcagaccggcgtgccagccagattttccggcagcggcagcagaaccgacttcaccctgaccatcagcagcgtggaacccgaggacttcgccgtgtactactgcctccagagccggaccatccccagaacattcggccagggcaccaagctggaaatcaagagactcgagatccagaaccctgatcctgccgtgtaccagctgcgggatagcaagagcagcgacaagagcgtgtgtctgttcaccgacttcgacagccagaccaacgtgtcccagagcaaggactccgacgtgtacatcaccgataagtgcgtgctggacatgcggagcatggacttcaagagcaactccgccgtggcctggtccaacaagtccgatttcgcctgcgccaacgccttcaacaacagcattatccccgaggacacattcttcccaagccccgagagcagcgactccaccgaccacgtgaagcccaaagagacagagaacaccaagcagcccagcaagagctgccacaagcccaaggccatcgtgcacaccgagaaagtgaacatgatgagcctgaccgtgctgggcctgcggatgctgttcgccaaaaccgtggccgtgaacttcctgctgaccgccaagctgttcttcctcctcaccgcccgcgccaagagaagcggatctggcgtgaagcagaccctgaatttcgacctgctgaagctggctggcgacgtggaatccaacccaggccctactagtatggactggatttggcgcatccttttccttgtcggcgctgctaccggcgcgcattccttcgaacaggtgcagctggtgcagtctggccccgaagtgaagaaacccggcgagtccgtgaagatcagctgcaaggccagcggctacaccttccggcactacagcatgaactgggtcaagcaggccccaggccagggcctgaagtggatgggcagaatcaacaccgagagcggcgtgcccatctacgccgacgacttcaagggccggttcagcttcaccgtggacaccagcgccagcaccgcctacctggaaatctccagcctgaccagcgaggataccgccgtgtatttctgctccaacgactacctgtacagcctggatttctggggccagggaaccaccctgacagtgtcctctacgcgtgaggacctgaagaacgtgttcccacctgaggtggccgtgttcgagcctagcgaggccgagatcagccacacccagaaagccaccctcgtgtgcctggctaccggcttctaccccgaccatgtggaactgtcttggtgggtcaacggcaaagaggtgcacagcggcgtgtgtaccgacccccagccactgaaagaacagcccgccctgaacgacagccggtactgcctgagcagcagactgagagtgtccgccaccttctggcagaacccccggaaccacttcagatgccaggtgcagttctacggcctgagcgagaacgacgagtggacccaggacagagccaagcccgtgacccagatcgtgtctgccgaagcctggggcagagccgatgatgtgattaagatccactggcaggaaaagaagtccaacaccatcctgggcagccaggaaggcaacaccatgaagaccaacgacacctacatgaagttcagctggctgaccgtgcccgagaagtccctggacaaagaacacagatgcatcgtgcggcacgaaaacaacaagaacggcgtggaccaggaaatcatcttcccacccatcaagaccgatgtgattacaatggaccccaaggacaactgctccaaggacgccaacgataccctgctgctccagctgaccaacaccagcgcctactacatgtacttgttgctgctgctgaagtccgtggtgtacttcgccatcatcacatgctgcctgctgatggctatggtcaagcggaaggacagccgggga

SEQ ID NO: 6177 - DNA, 2193 bp, synthetic construct
  source 1..2193: mol_type = other DNA
atggccttaccagtgaccgccttgctcctgccgctggccttgctgctccacgccgccaggccgcagtctgtgctgacacagcctcctagtgtgtctggcgctcctggacagagagtgaccatcagctgtacaggcagcagcagcaatatcggagccggctttgacgtgcactggtatcagcagctgcctggcacagcccctaaactgctgatctacggcaacagcaacagacccagcggcgtgcccgatagattttccggctctaagagcggcacaagcgccagcctggctattactggactccaggccgaggacgaggccgactactactgtcagagctacgacagcagcctgagcggctacgttttcggcaccggcaccaaagtgacagtgcttggtctcgagatccagaaccctgatcctgccgtgtaccagctgcgggatagcaagagcagcgacaagagcgtgtgtctgttcaccgacttcgacagccagaccaacgtgtcccagagcaaggactccgacgtgtacatcaccgataagtgcgtgctggacatgcggagcatggacttcaagagcaactccgccgtggcctggtccaacaagtccgatttcgcctgcgccaacgccttcaacaacagcattatccccgaggacacattcttcccaagccccgagagcagcgactccaccgaccacgtgaagcccaaagagacagagaacaccaagcagcccagcaagagctgccacaagcccaaggccatcgtgcacaccgagaaagtgaacatgatgagcctgaccgtgctgggcctgcggatgctgttcgccaaaaccgtggccgtgaacttcctgctgaccgccaagctgttcttcctcctcaccgcccgcgccaagagaagcggatctggcgtgaagcagaccctgaatttcgacctgctgaagctggctggcgacgtggaatccaacccaggccctactagtatggactggatttggcgcatccttttccttgtcggcgctgctaccggcgcgcattccttcgaacaagttcagctggttcagagcggagccgaagtgaagaaacctggggcctctgtgaaggtgtcctgcaaggcttccggctacacctttaccgattactacatgcactgggtccgacaggctcccggccaaagacttgaatggatgggctggatcaaccccaacagcggcggcacaaattacgcccagaagttccaggaccggatcaccgtgaccagagacaccagctccaacaccggctacatggaactgacccggctgagatccgatgacaccgccgtgtactactgcgctagaagcccttactccggcgtgctggataagtggggacagggcacactggtcaccgtgtcatctacgcgtgaggacctgaagaacgtgttcccacctgaggtggccgtgttcgagcctagcgaggccgagatcagccacacccagaaagccaccctcgtgtgcctggctaccggcttctaccccgaccatgtggaactgtcttggtgggtcaacggcaaagaggtgcacagcggcgtgtgtaccgacccccagccactgaaagaacagcccgccctgaacgacagccggtactgcctgagcagcagactgagagtgtccgccaccttctggcagaacccccggaaccacttcagatgccaggtgcagttctacggcctgagcgagaacgacgagtggacccaggacagagccaagcccgtgacccagatcgtgtctgccgaagcctggggcagagccgatgatgtgattaagatccactggcaggaaaagaagtccaacaccatcctgggcagccaggaaggcaacaccatgaagaccaacgacacctacatgaagttcagctggctgaccgtgcccgagaagtccctggacaaagaacacagatgcatcgtgcggcacgaaaacaacaagaacggcgtggaccaggaaatcatcttcccacccatcaagaccgatgtgattacaatggaccccaaggacaactgctccaaggacgccaacgataccctgctgctccagctgaccaacaccagcgcctactacatgtacttgttgctgctgctgaagtccgtggtgtacttcgccatcatcacatgctgcctgctgatggctatggtcaagcggaaggacagccgggga

SEQ ID NO: 6178 - DNA, 2184 bp, synthetic construct
  source 1..2184: mol_type = other DNA
atggccttaccagtgaccgccttgctcctgccgctggccttgctgctccacgccgccaggccgcaggctgttctgacacagcctccatctgcctctggcacacctggacagagagtgaccatctcctgtagcggcagcagcagcaacatcggcagctacaccgtgtcctggtatcagcagctccctggaacagcccctaagttcctgatctacagcaacaaccagcggcctagcggcgtgcccgatagattttctggcagcaagagcggcacaagcgccagcctggctatttctggactccagtctgaggacgaggccgactactattgtgccgcctgggacgatagcctgaacggctatgtgtttggcaccggcaccaaagtgacagtgcttggtctcgagatccagaaccctgatcctgccgtgtaccagctgcgggatagcaagagcagcgacaagagcgtgtgtctgttcaccgacttcgacagccagaccaacgtgtcccagagcaaggactccgacgtgtacatcaccgataagtgcgtgctggacatgcggagcatggacttcaagagcaactccgccgtggcctggtccaacaagtccgatttcgcctgcgccaacgccttcaacaacagcattatccccgaggacacattcttcccaagccccgagagcagcgactccaccgaccacgtgaagcccaaagagacagagaacaccaagcagcccagcaagagctgccacaagcccaaggccatcgtgcacaccgagaaagtgaacatgatgagcctgaccgtgctgggcctgcggatgctgttcgccaaaaccgtggccgtgaacttcctgctgaccgccaagctgttcttcctcctcaccgcccgcgccaagagaagcggatctggcgtgaagcagaccctgaatttcgacctgctgaagctggctggcgacgtggaatccaacccaggccctactagtatggactggatttggcgcatccttttccttgtcggcgctgctaccggcgcgcattccttcgaagttcaactggttcagagcggagccgaagtgaagaagcctggcgagagcctgaagattagctgcaaaggcagcggctacgacttcaccacctactggatcggctgggtccgacagatgcctggcaaaggactggaatggatgggcatcatctaccccggcgacagcgacaccagatacagccctagcgttagaggccgcgtgaccatcagcgccgacaagtctatcaacaccgcctacctccagtggtccagcctggaagcctctgacaccgccatgtactactgcgccagaatgtggaccttcagccaggatggatggggccagggaacactggtcacagtgtcatctacgcgtgaggacctgaagaacgtgttcccacctgaggtggccgtgttcgagcctagcgaggccgagatcagccacacccagaaagccaccctcgtgtgcctggctaccggcttctaccccgaccatgtggaactgtcttggtgggtcaacggcaaagaggtgcacagcggcgtgtgtaccgacccccagccactgaaagaacagcccgccctgaacgacagccggtactgcctgagcagcagactgagagtgtccgccaccttctggcagaacccccggaaccacttcagatgccaggtgcagttctacggcctgagcgagaacgacgagtggacccaggacagagccaagcccgtgacccagatcgtgtctgccgaagcctggggcagagccgatgatgtgattaagatccactggcaggaaaagaagtccaacaccatcctgggcagccaggaaggcaacaccatgaagaccaacgacacctacatgaagttcagctggctgaccgtgcccgagaagtccctggacaaagaacacagatgcatcgtgcggcacgaaaacaacaagaacggcgtggaccaggaaatcatcttcccacccatcaagaccgatgtgattacaatggaccccaaggacaactgctccaaggacgccaacgataccctgctgctccagctgaccaacaccagcgcctactacatgtacttgttgctgctgctgaagtccgtggtgtacttcgccatcatcacatgctgcctgctgatggctatggtcaagcggaaggacagccgggga

SEQ ID NO: 6179 - DNA, 2193 bp, synthetic construct
  source 1..2193: mol_type = other DNA
atggccttaccagtgaccgccttgctcctgccgctggccttgctgctccacgccgccaggccggacatcgtgatgacccagagccccgatagcctggccgtgtctctgggagagagagccaccatcaactgcaagagcagccagagcatcctgtacagcagcaaccagaagaactacctggcctggtatcagcagaagcccggccagagccctaagctgctgatctactgggccagcaccagagaaagcggcgtgcccgatagattcagcggcagcggctctggcaccgacttcaccctgaccatcagttctcttcaggccgaggacgtggccgtgtactactgccaccagtacatcagctcctacaccttcggccagggcaccaagctggaaatcaagctcgagatccagaaccctgatcctgccgtgtaccagctgcgggatagcaagagcagcgacaagagcgtgtgtctgttcaccgacttcgacagccagaccaacgtgtcccagagcaaggactccgacgtgtacatcaccgataagtgcgtgctggacatgcggagcatggacttcaagagcaactccgccgtggcctggtccaacaagtccgatttcgcctgcgccaacgccttcaacaacagcattatccccgaggacacattcttcccaagccccgagagcagcgactccaccgaccacgtgaagcccaaagagacagagaacaccaagcagcccagcaagagctgccacaagcccaaggccatcgtgcacaccgagaaagtgaacatgatgagcctgaccgtgctgggcctgcggatgctgttcgccaaaaccgtggccgtgaacttcctgctgaccgccaagctgttcttcctcctcaccgcccgcgccaagagaagcggatctggcgtgaagcagaccctgaatttcgacctgctgaagctggctggcgacgtggaatccaacccaggccctactagtatggactggatttggcgcatccttttccttgtcggcgctgctaccggcgcgcattccttcgaacaggtgcagctggtgcagtctggcgctgaagtgaagaaacctggggccagcgtgaaggtgtcctgcaaggccagcggctacacctttgccagccagtggatgcactggatgagacaggcccctggacagggcctggaatggatcggctggatcaaccccggcaacgtgaacaccaagtacaacgagaagttcaagggcagagccaccctgacagtggacaccagcaccaacaccgcctacatggaactgagcagcctgcggagcgaggacaccgccgtgtattattgcgccagaagcacctggtacagacccctggattattggggccagggaacccttgtgaccgtgtcctctacgcgtgaggacctgaagaacgtgttcccacctgaggtggccgtgttcgagcctagcgaggccgagatcagccacacccagaaagccaccctcgtgtgcctggctaccggcttctaccccgaccatgtggaactgtcttggtgggtcaacggcaaagaggtgcacagcggcgtgtgtaccgacccccagccactgaaagaacagcccgccctgaacgacagccggtactgcctgagcagcagactgagagtgtccgccaccttctggcagaacccccggaaccacttcagatgccaggtgcagttctacggcctgagcgagaacgacgagtggacccaggacagagccaagcccgtgacccagatcgtgtctgccgaagcctggggcagagccgatgatgtgattaagatccactggcaggaaaagaagtccaacaccatcctgggcagccaggaaggcaacaccatgaagaccaacgacacctacatgaagttcagctggctgaccgtgcccgagaagtccctggacaaagaacacagatgcatcgtgcggcacgaaaacaacaagaacggcgtggaccaggaaatcatcttcccacccatcaagaccgatgtgattacaatggaccccaaggacaactgctccaaggacgccaacgataccctgctgctccagctgaccaacaccagcgcctactacatgtacttgttgctgctgctgaagtccgtggtgtacttcgccatcatcacatgctgcctgctgatggctatggtcaagcggaaggacagccgggga

SEQ ID NO: 6180 - DNA, 2193 bp, synthetic construct
  source 1..2193: mol_type = other DNA
atggccttaccagtgaccgccttgctcctgccgctggccttgctgctccacgccgccaggccggaccacatcgtgctgacccagagccctagcagcctgtctgccagcctgggcgacagagtgaccatcagctgtagagccagccaggacatcagcacctacctgaactggtatcagcagaaacccgacggcaccgtgaagctgctgatcttctacaccagcagactgcacgccggggtgcccagcagattttctggcagcggctctggcacccaccacagcctgaccatctccaacctggaacaggaagatattgctacctacttctgtcagcaaggcaacagcctgcccttcaccttcggcagcggcaccaagctggaaatcaagagactcgagatccagaaccctgatcctgccgtgtaccagctgcgggatagcaagagcagcgacaagagcgtgtgtctgttcaccgacttcgacagccagaccaacgtgtcccagagcaaggactccgacgtgtacatcaccgataagtgcgtgctggacatgcggagcatggacttcaagagcaactccgccgtggcctggtccaacaagtccgatttcgcctgcgccaacgccttcaacaacagcattatccccgaggacacattcttcccaagccccgagagcagcgactccaccgaccacgtgaagcccaaagagacagagaacaccaagcagcccagcaagagctgccacaagcccaaggccatcgtgcacaccgagaaagtgaacatgatgagcctgaccgtgctgggcctgcggatgctgttcgccaaaaccgtggccgtgaacttcctgctgaccgccaagctgttcttcctcctcaccgcccgcgccaagagaagcggatctggcgtgaagcagaccctgaatttcgacctgctgaagctggctggcgacgtggaatccaacccaggccctactagtatggactggatttggcgcatccttttccttgtcggcgctgctaccggcgcgcattccttcgaacaggtgcagctgaaagagagcggccctgagctggaaaagcctggggccagcgtgaagattagctgcaaggccagcggctacagcttcaccgcctacagcatgaactgggtcaagcagaacaacggcatgagcctggaatggatcggcagcatcgacccctactacggcgacaccaaatacgcccagaagttcaagggcaaggccaccctgaccgtggataaggccagcagcaccgcctacctccagctgaagtctctgaccagcgaggacagcgccgtgtactactgcgccagacggatgattaccaccggcgactggtacttcgacgtgtggggagccggaaccaccgtgacagtgtctagcacgcgtgaggacctgaagaacgtgttcccacctgaggtggccgtgttcgagcctagcgaggccgagatcagccacacccagaaagccaccctcgtgtgcctggctaccggcttctaccccgaccatgtggaactgtcttggtgggtcaacggcaaagaggtgcacagcggcgtgtgtaccgacccccagccactgaaagaacagcccgccctgaacgacagccggtactgcctgagcagcagactgagagtgtccgccaccttctggcagaacccccggaaccacttcagatgccaggtgcagttctacggcctgagcgagaacgacgagtggacccaggacagagccaagcccgtgacccagatcgtgtctgccgaagcctggggcagagccgatgatgtgattaagatccactggcaggaaaagaagtccaacaccatcctgggcagccaggaaggcaacaccatgaagaccaacgacacctacatgaagttcagctggctgaccgtgcccgagaagtccctggacaaagaacacagatgcatcgtgcggcacgaaaacaacaagaacggcgtggaccaggaaatcatcttcccacccatcaagaccgatgtgattacaatggaccccaaggacaactgctccaaggacgccaacgataccctgctgctccagctgaccaacaccagcgcctactacatgtacttgttgctgctgctgaagtccgtggtgtacttcgccatcatcacatgctgcctgctgatggctatggtcaagcggaaggacagccgggga

SEQ ID NO: 6181 - DNA, 2193 bp, synthetic construct; identical to SEQ ID NO: 6180
  source 1..2193: mol_type = other DNA

SEQ ID NO: 6182 - DNA, 2193 bp, synthetic construct
  source 1..2193: mol_type = other DNA
atggccttaccagtgaccgccttgctcctgccgctggccttgctgctccacgccgccaggccggacgagatcgtgctgacacagagccctgccaccctgtctctgagccctggcgaaagagccaccctgagctgtagagccagccagagcgtgtccagctacctggcctggtatcagcagaagcccggccaggctccccggctgctgatctacgatgccagcaatagagccaccggcatccccgccagattttccggctctggcagcggcaccgacttcaccctgaccatcagctccctggaacccgaggacttcgccgtgtactactgccagcagcggagcaactggcccatcacattcggccagggcacccggctggaaatcaaactcgagatccagaaccctgatcctgccgtgtaccagctgcgggatagcaagagcagcgacaagagcgtgtgtctgttcaccgacttcgacagccagaccaacgtgtcccagagcaaggactccgacgtgtacatcaccgataagtgcgtgctggacatgcggagcatggacttcaagagcaactccgccgtggcctggtccaacaagtccgatttcgcctgcgccaacgccttcaacaacagcattatccccgaggacacattcttcccaagccccgagagcagcgactccaccgaccacgtgaagcccaaagagacagagaacaccaagcagcccagcaagagctgccacaagcccaaggccatcgtgcacaccgagaaagtgaacatgatgagcctgaccgtgctgggcctgcggatgctgttcgccaaaaccgtggccgtgaacttcctgctgaccgccaagctgttcttcctcctcaccgcccgcgccaagagaagcggatctggcgtgaagcagaccctgaatttcgacctgctgaagctggctggcgacgtggaatccaacccaggccctactagtatggactggatttggcgcatccttttccttgtcggcgctgctaccggcgcgcattccttcgaagaagtgcagctggtggaatcaggcggcggactggtgcagcctggcagaagcctgagactgagctgtgccgccagcggcttcaccttcaacgactacgccatgcactgggtgcgccaggcccctggaaaaggactggaatgggtgtccacaatcagctggaacagcggcagcatcggctacgccgatagcgtgaagggccggttcaccatcagccgggacaacgccaagaagtccctgtacctccagatgaacagcctgcgggccgaggacacagccctgtactattgcgccaaggacatccagtacggcaactactactacggcatggacgtgtggggccagggaaccaccgtgaccgtgtcatctacgcgtgaggacctgaagaacgtgttcccacctgaggtggccgtgttcgagcctagcgaggccgagatcagccacacccagaaagccaccctcgtgtgcctggctaccggcttctaccccgaccatgtggaactgtcttggtgggtcaacggcaaagaggtgcacagcggcgtgtgtaccgacccccagccactgaaagaacagcccgccctgaacgacagccggtactgcctgagcagcagactgagagtgtccgccaccttctggcagaacccccggaaccacttcagatgccaggtgcagttctacggcctgagcgagaacgacgagtggacccaggacagagccaagcccgtgacccagatcgtgtctgccgaagcctggggcagagccgatgatgtgattaagatccactggcaggaaaagaagtccaacaccatcctgggcagccaggaaggcaacaccatgaagaccaacgacacctacatgaagttcagctggctgaccgtgcccgagaagtccctggacaaagaacacagatgcatcgtgcggcacgaaaacaacaagaacggcgtggaccaggaaatcatcttcccacccatcaagaccgatgtgattacaatggaccccaaggacaactgctccaaggacgccaacgataccctgctgctccagctgaccaacaccagcgcctactacatgtacttgttgctgctgctgaagtccgtggtgtacttcgccatcatcacatgctgcctgctgatggctatggtcaagcggaaggacagccgggga

SEQ ID NO: 6183 - DNA, 2199 bp, synthetic construct
  source 1..2199: mol_type = other DNA
atggccttaccagtgaccgccttgctcctgccgctggccttgctgctccacgccgccaggccggacatcgtgatgacccagacccccctgagcctgcctgtgacacctggcgagcctgccagcatctcctgcagaagcagcaagagcctgctgcacagcaacggcatcacctacctgtactggtatctgcagaaacccggccagagcccccaactgctgatctaccagatgagcaacctggtgtccggcgtgcccgacagattttctggcagcggctccggcaccgacttcaccctgaagatcagccgggtggaagccgaggacgtgggcgtgtactactgcgcccagaacctggaactgccctacacctttggcggcggaacaaaggtggaaatcaagcggctcgagatccagaaccctgatcctgccgtgtaccagctgcgggatagcaagagcagcgacaagagcgtgtgtctgttcaccgacttcgacagccagaccaacgtgtcccagagcaaggactccgacgtgtacatcaccgataagtgcgtgctggacatgcggagcatggacttcaagagcaactccgccgtggcctggtccaacaagtccgatttcgcctgcgccaacgccttcaacaacagcattatccccgaggacacattcttcccaagccccgagagcagcgactccaccgaccacgtgaagcccaaagagacagagaacaccaagcagcccagcaagagctgccacaagcccaaggccatcgtgcacaccgagaaagtgaacatgatgagcctgaccgtgctgggcctgcggatgctgttcgccaaaaccgtggccgtgaacttcctgctgaccgccaagctgttcttcctcctcaccgcccgcgccaagagaagcggatctggcgtgaagcagaccctgaatttcgacctgctgaagctggctggcgacgtggaatccaacccaggccctactagtatggactggatttggcgcatccttttccttgtcggcgctgctaccggcgcgcattccttcgaacaggtgcaactggtgcagagcggagccgaagtgaaaaagcccggcagcagcgtgaaggtgtcctgcaaggccagcggctacgccttcagctactcctggatcaactgggtgcgccaggcccctggacagggcctggaatggatgggcagaatcttccccggcgacggcgacaccgactacaacggcaagttcaagggcagagtgaccatcaccgccgacaagagcaccagcaccgcctacatggaactgagcagcctgcggagcgaggataccgccgtgtactattgtgccagaaacgtgttcgacggctactggctggtgtactggggccagggaacacttgtgaccgtgtccagcacgcgtgaggacctgaagaacgtgttcccacctgaggtggccgtgttcgagcctagcgaggccgagatcagccacacccagaaagccaccctcgtgtgcctggctaccggcttctaccccgaccatgtggaactgtcttggtgggtcaacggcaaagaggtgcacagcggcgtgtgtaccgacccccagccactgaaagaacagcccgccctgaacgacagccggtactgcctgagcagcagactgagagtgtccgccaccttctggcagaacccccggaaccacttcagatgccaggtgcagttctacggcctgagcgagaacgacgagtggacccaggacagagccaagcccgtgacccagatcgtgtctgccgaagcctggggcagagccgatgatgtgattaagatccactggcaggaaaagaagtccaacaccatcctgggcagccaggaaggcaacaccatgaagaccaacgacacctacatgaagttcagctggctgaccgtgcccgagaagtccctggacaaagaacacagatgcatcgtgcggcacgaaaacaacaagaacggcgtggaccaggaaatcatcttcccacccatcaagaccgatgtgattacaatggaccccaaggacaactgctccaaggacgccaacgataccctgctgctccagctgaccaacaccagcgcctactacatgtacttgttgctgctgctgaagtccgtggtgtacttcgccatcatcacatgctgcctgctgatggctatggtcaagcggaaggacagccgggga

SEQ ID NO: 6184 - DNA, 2202 bp, synthetic construct
  source 1..2202: mol_type = other DNA
atggccttaccagtgaccgccttgctcctgccgctggccttgctgctccacgccgccaggccggacatccagatgacccagagccccagcagcctgtctgccagcgtgggcgacagagtgaccatcacctgtcggagcagccagagcatcgtgcactccgtgggcaacaccttcctggaatggtatcagcagaagcccggcaaggcccccaagctgctgatctacaaggtgtccaacagattcagcggcgtgcccagcaggtttagcggctctggcagcggcaccgacttcaccctgaccatctctagcctccagcccgaggacttcgccacctactactgttttcaaggcagccagttcccctacaccttcggccagggaacaaaggtggaaatcaagcggctcgagatccagaaccctgatcctgccgtgtaccagctgcgggatagcaagagcagcgacaagagcgtgtgtctgttcaccgacttcgacagccagaccaacgtgtcccagagcaaggactccgacgtgtacatcaccgataagtgcgtgctggacatgcggagcatggacttcaagagcaactccgccgtggcctggtccaacaagtccgatttcgcctgcgccaacgccttcaacaacagcattatccccgaggacacattcttcccaagccccgagagcagcgactccaccgaccacgtgaagcccaaagagacagagaacaccaagcagcccagcaagagctgccacaagcccaaggccatcgtgcacaccgagaaagtgaacatgatgagcctgaccgtgctgggcctgcggatgctgttcgccaaaaccgtggccgtgaacttcctgctgaccgccaagctgttcttcctcctcaccgcccgcgccaagagaagcggatctggcgtgaagcagaccctgaatttcgacctgctgaagctggctggcgacgtggaatccaacccaggccctactagtatggactggatttggcgcatccttttccttgtcggcgctgctaccggcgcgcattccttcgaagaagtgcaactggtggaaagcggaggcggcctggtgcagcctggcggatctctgagactgagctgtgccgccagcggctacgagttcagccggtcctggatgaactgggtgcgccaggcccctggcaagggactggaatgggtgggaagaatctaccccggcgacggcgacaccaactacagcggcaagttcaagggccggttcaccatcagcgccgacaccagcaagaacaccgcctacctccagatgaacagcctgcgggccgaggataccgccgtgtactactgtgccagagatggcagctcctgggactggtacttcgacgtgtggggacagggaacccttgtgaccgtgtccagcacgcgtgaggacctgaagaacgtgttcccacctgaggtggccgtgttcgagcctagcgaggccgagatcagccacacccagaaagccaccctcgtgtgcctggctaccggcttctaccccgaccatgtggaactgtcttggtgggtcaacggcaaagaggtgcacagcggcgtgtgtaccgacccccagccactgaaagaacagcccgccctgaacgacagccggtactgcctgagcagcagactgagagtgtccgccaccttctggcagaacccccggaaccacttcagatgccaggtgcagttctacggcctgagcgagaacgacgagtggacccaggacagagccaagcccgtgacccagatcgtgtctgccgaagcctggggcagagccgatgatgtgattaagatccactggcaggaaaagaagtccaacaccatcctgggcagccaggaaggcaacaccatgaagaccaacgacacctacatgaagttcagctggctgaccgtgcccgagaagtccctggacaaagaacacagatgcatcgtgcggcacgaaaacaacaagaacggcgtggaccaggaaatcatcttcccacccatcaagaccgatgtgattacaatggaccccaaggacaactgctccaaggacgccaacgataccctgctgctccagctgaccaacaccagcgcctactacatgtacttgttgctgctgctgaagtccgtggtgtacttcgccatcatcacatgctgcctgctgatggctatggtcaagcggaaggacagccgggga

SEQ ID NO: 6185 - DNA, 2196 bp, synthetic construct
  source 1..2196: mol_type = other DNA
atggccttaccagtgaccgccttgctcctgccgctggccttgctgctccacgccgccaggccggacatccagatgacccagagccccagcagcctgtctgccagcgtgggcgacagagtgaccatcacctgtagagccagccagaccatctggtcctacctgaactggtatcagcagaggcccggcaaggcccccaacctgctgatctatgccgccagctctctccagagcggcgtgcccagcagattttccggcagaggcagcggcaccgacttcaccctgaccatcagttccttgcaggccgaggacttcgccacctactactgccagcagagctacagcatcccccagattttcggccagggcaccaagctggaaatcaagctcgagatccagaaccctgatcctgccgtgtaccagctgcgggatagcaagagcagcgacaagagcgtgtgtctgttcaccgacttcgacagccagaccaacgtgtcccagagcaaggactccgacgtgtacatcaccgataagtgcgtgctggacatgcggagcatggacttcaagagcaactccgccgtggcctggtccaacaagtccgatttcgcctgcgccaacgccttcaacaacagcattatccccgaggacacattcttcccaagccccgagagcagcgactccaccgaccacgtgaagcccaaagagacagagaacaccaagcagcccagcaagagctgccacaagcccaaggccatcgtgcacaccgagaaagtgaacatgatgagcctgaccgtgctgggcctgcggatgctgttcgccaaaaccgtggccgtgaacttcctgctgaccgccaagctgttcttcctcctcaccgcccgcgccaagagaagcggatctggcgtgaagcagaccctgaatttcgacctgctgaagctggctggcgacgtggaatccaacccaggccctactagtatggactggatttggcgcatccttttccttgtcggcgctgctaccggcgcgcattccttcgaacaggtgcagctccagcagtctggacccggcctcgtgaagcctagccagacactgagcctgacctgcgccatcagcggcgatagcgtgtccagcaatagcgccgcctggaactggatcagacagtccccctctcggggcctggaatggctgggccggacctactaccgcagcaagtggtacaacgactacgccgtgtccgtgaagtcccggatcaccatcaaccccgacaccagcaagaaccagttctccttgcaactgaacagcgtgacccccgaggacaccgccgtgtactactgcgccagagaagtgaccggcgacctggaagatgccttcgacatctggggccagggaacaatggtcacagtgtccagcacgcgtgaggacctgaagaacgtgttcccacctgaggtggccgtgttcgagcctagcgaggccgagatcagccacacccagaaagccaccctcgtgtgcctggctaccggcttctaccccgaccatgtggaactgtcttggtgggtcaacggcaaagaggtgcacagcggcgtgtgtaccgacccccagccactgaaagaacagcccgccctgaacgacagccggtactgcctgagcagcagactgagagtgtccgccaccttctggcagaacccccggaaccacttcagatgccaggtgcagttctacggcctgagcgagaacgacgagtggacccaggacagagccaagcccgtgacccagatcgtgtctgccgaagcctggggcagagccgatgatgtgattaagatccactggcaggaaaagaagtccaacaccatcctgggcagccaggaaggcaacaccatgaagaccaacgacacctacatgaagttcagctggctgaccgtgcccgagaagtccctggacaaagaacacagatgcatcgtgcggcacgaaaacaacaagaacggcgtggaccaggaaatcatcttcccacccatcaagaccgatgtgattacaatggaccccaaggacaactgctccaaggacgccaacgataccctgctgctccagctgaccaacaccagcgcctactacatgtacttgttgctgctgctgaagtccgtggtgtacttcgccatcatcacatgctgcctgctgatggctatggtcaagcggaaggacagccgggga

SEQ ID NO: 6186 - DNA, 2175 bp, synthetic construct
  source 1..2175: mol_type = other DNA
atggccttaccagtgaccgccttgctcctgccgctggccttgctgctccacgccgccaggccggacatccagatgacccagagccccgccaccatcgagaacacaagcctgtctgccagcgtgggcgacagagtgaccatcacctgtagagccagccagggcatcagctcttggctgacctggtatcagcagaagcccgagaaggcccccaagagcctgatctacgccgccagctctctgcagtctggcgtgcccagcagattttccggcagcggctctggcaccgacttcaccctgacaatcagcagcctgcagcccgaggacttcgccacctactactgccagcagtacgacagctaccccatcaccttcggccagggcacccggctggaaatcaagctcgagatccagaaccctgatcctgccgtgtaccagctgcgggatagcaagagcagcgacaagagcgtgtgtctgttcaccgacttcgacagccagaccaacgtgtcccagagcaaggactccgacgtgtacatcaccgataagtgcgtgctggacatgcggagcatggacttcaagagcaactccgccgtggcctggtccaacaagtccgatttcgcctgcgccaacgccttcaacaacagcattatccccgaggacacattcttcccaagccccgagagcagcgactccaccgaccacgtgaagcccaaagagacagagaacaccaagcagcccagcaagagctgccacaagcccaaggccatcgtgcacaccgagaaagtgaacatgatgagcctgaccgtgctgggcctgcggatgctgttcgccaaaaccgtggccgtgaacttcctgctgaccgccaagctgttcttcctcctcaccgcccgcgccaagagaagcggatctggcgtgaagcagaccctgaatttcgacctgctgaagctggctggcgacgtggaatccaacccaggccctactagtatggactggatttggcgcatccttttccttgtcggcgctgctaccggcgcgcattccttcgaacaggtgcaactgcagcagtggggagccggactgctgaagcctagcgagacactgagcctgacctgcgccgtgtacggcggcagcttcagcgcctactattggagctggatcagacagccccctggcaagggcctggaatggatcggcgacatcaatcacggcggaggcaccaactacaaccccagcctgaagtcccgcgtgaccatctccgtggacaccagcaagaaccagttctccctgaagctgaacagcgtgacagccgccgacacagccgtgtactactgtgccagcctgaccgcctattggggccagggatctcttgtgaccgtgtccagcacgcgtgaggacctgaagaacgtgttcccacctgaggtggccgtgttcgagcctagcgaggccgagatcagccacacccagaaagccaccctcgtgtgcctggctaccggcttctaccccgaccatgtggaactgtcttggtgggtcaacggcaaagaggtgcacagcggcgtgtgtaccgacccccagccactgaaagaacagcccgccctgaacgacagccggtactgcctgagcagcagactgagagtgtccgccaccttctggcagaacccccggaaccacttcagatgccaggtgcagttctacggcctgagcgagaacgacgagtggacccaggacagagccaagcccgtgacccagatcgtgtctgccgaagcctggggcagagccgatgatgtgattaagatccactggcaggaaaagaagtccaacaccatcctgggcagccaggaaggcaacaccatgaagaccaacgacacctacatgaagttcagctggctgaccgtgcccgagaagtccctggacaaagaacacagatgcatcgtgcggcacgaaaacaacaagaacggcgtggaccaggaaatcatcttcccacccatcaagaccgatgtgattacaatggaccccaaggacaactgctccaaggacgccaacgataccctgctgctccagctgaccaacaccagcgcctactacatgtacttgttgctgctgctgaagtccgtggtgtacttcgccatcatcacatgctgcctgctgatggctatggtcaagcggaaggacagccgggga

SEQ ID NO: 6187 - DNA, 2190 bp, synthetic construct
  source 1..2190: mol_type = other DNA
atggccttaccagtgaccgccttgctcctgccgctggccttgctgctccacgccgccaggccggacgagatcgtgctgacccagagccctgatagcctggccgtgtctctgggcgagagagccaccatcaactgcaaggccagccagagcgtggacttcgacggcgacagctacctgaactggtatcagcagaagcccggccagccccccaaggtgctgatctatgccgccagcacactgcagagcggcgtgcccagcagattttctggcagcggctccggcaccgacttcaccctgaccatcaacagcctggaagccgaggacgccgccacctactactgccagcagagcaacgaggacccctggacctttggcggcggaacaaaggtggaaatcaagctcgagatccagaaccctgatcctgccgtgtaccagctgcgggatagcaagagcagcgacaagagcgtgtgtctgttcaccgacttcgacagccagaccaacgtgtcccagagcaaggactccgacgtgtacatcaccgataagtgcgtgctggacatgcggagcatggacttcaagagcaactccgccgtggcctggtccaacaagtccgatttcgcctgcgccaacgccttcaacaacagcattatccccgaggacacattcttcccaagccccgagagcagcgactccaccgaccacgtgaagcccaaagagacagagaacaccaagcagcccagcaagagctgccacaagcccaaggccatcgtgcacaccgagaaagtgaacatgatgagcctgaccgtgctgggcctgcggatgctgttcgccaaaaccgtggccgtgaacttcctgctgaccgccaagctgttcttcctcctcaccgcccgcgccaagagaagcggatctggcgtgaagcagaccctgaatttcgacctgctgaagctggctggcgacgtggaatccaacccaggccctactagtatggactggatttggcgcatccttttccttgtcggcgctgctaccggcgcgcattccttcgaacaggtgcaactggtgcagtccggcgctgaagtgaagaaacctggggccagcgtgaaggtgtcctgcaaggtgtccggctacacctttaccgactactacattacctgggtgcgccaggcccctggacaggccctggaatggatgggctggatctaccccggcagcggcaacaccaagtacagccagaagttccagggcagattcgtgttcagcgtggacaccagcgccagcaccgcctacctgcaactgtctagcctgaaggccgaagataccgccgtgtactactgcgccaactacggcaactattggttcgcctattggggccagggaacccttgtgaccgtgtcctctacgcgtgaggacctgaagaacgtgttcccacctgaggtggccgtgttcgagcctagcgaggccgagatcagccacacccagaaagccaccctcgtgtgcctggctaccggcttctaccccgaccatgtggaactgtcttggtgggtcaacggcaaagaggtgcacagcggcgtgtgtaccgacccccagccactgaaagaacagcccgccctgaacgacagccggtactgcctgagcagcagactgagagtgtccgccaccttctggcagaacccccggaaccacttcagatgccaggtgcagttctacggcctgagcgagaacgacgagtggacccaggacagagccaagcccgtgacccagatcgtgtctgccgaagcctggggcagagccgatgatgtgattaagatccactggcaggaaaagaagtccaacaccatcctgggcagccaggaaggcaacaccatgaagaccaacgacacctacatgaagttcagctggctgaccgtgcccgagaagtccctggacaaagaacacagatgcatcgtgcggcacgaaaacaacaagaacggcgtggaccaggaaatcatcttcccacccatcaagaccgatgtgattacaatggaccccaaggacaactgctccaaggacgccaacgataccctgctgctccagctgaccaacaccagcgcctactacatgtacttgttgctgctgctgaagtccgtggtgtacttcgccatcatcacatgctgcctgctgatggctatggtcaagcggaaggacagccgggga

SEQ ID NO: 6188 - DNA, 2181 bp, synthetic construct
  source 1..2181: mol_type = other DNA
atggccttaccagtgaccgccttgctcctgccgctggccttgctgctccacgccgccaggccggacatccagatgacccagagccccagcagcctgtctgccagcgtgggcgacagagtgaccatcacctgtagagccagccagggcatcagctcttggctggcctggtatcagcagaagcccgagaaggcccccaagagcctgatctacgccgcctctagtctccagagcggcgtgcccagcagattttctggcagcggctccggcaccgacttcaccctgacaatcagctccctccagcccgaggacttcgccacctactactgccagcagtacaacagctaccctcccacctttggcggaggcaccaaggtggaaatcaagctcgagatccagaaccctgatcctgccgtgtaccagctgcgggatagcaagagcagcgacaagagcgtgtgtctgttcaccgacttcgacagccagaccaacgtgtcccagagcaaggactccgacgtgtacatcaccgataagtgcgtgctggacatgcggagcatggacttcaagagcaactccgccgtggcctggtccaacaagtccgatttcgcctgcgccaacgccttcaacaacagcattatccccgaggacacattcttcccaagccccgagagcagcgactccaccgaccacgtgaagcccaaagagacagagaacaccaagcagcccagcaagagctgccacaagcccaaggccatcgtgcacaccgagaaagtgaacatgatgagcctgaccgtgctgggcctgcggatgctgttcgccaaaaccgtggccgtgaacttcctgctgaccgccaagctgttcttcctcctcaccgcccgcgccaagagaagcggatctggcgtgaagcagaccctgaatttcgacctgctgaagctggctggcgacgtggaatccaacccaggccctactagtatggactggatttggcgcatccttttccttgtcggcgctgctaccggcgcgcattccttcgaagaagtgcaactggtgcagtctggcggagggctggtgcatcctgggggaagcctgagactgagctgtgccggctctggcttcgccttcagcagcagcaccatgcactggatcagacaggcccctggcaagggcctggaatggatcagcctgatcggaagcggagggggcatctactacggcgacagcgtgaagggccggttcaccatcagccgggacaacgccaagaacagcctgtacctccagatgaactccctgcgggccgaggacatggccgtgtactattgtgtgcggggctacttcgactgggtggactacttcgattactggggccagggcaccctcgtgaccgtgtcatctacgcgtgaggacctgaagaacgtgttcccacctgaggtggccgtgttcgagcctagcgaggccgagatcagccacacccagaaagccaccctcgtgtgcctggctaccggcttctaccccgaccatgtggaactgtcttggtgggtcaacggcaaagaggtgcacagcggcgtgtgtaccgacccccagccactgaaagaacagcccgccctgaacgacagccggtactgcctgagcagcagactgagagtgtccgccaccttctggcagaacccccggaaccacttcagatgccaggtgcagttctacggcctgagcgagaacgacgagtggacccaggacagagccaagcccgtgacccagatcgtgtctgccgaagcctggggcagagccgatgatgtgattaagatccactggcaggaaaagaagtccaacaccatcctgggcagccaggaaggcaacaccatgaagaccaacgacacctacatgaagttcagctggctgaccgtgcccgagaagtccctggacaaagaacacagatgcatcgtgcggcacgaaaacaacaagaacggcgtggaccaggaaatcatcttcccacccatcaagaccgatgtgattacaatggaccccaaggacaactgctccaaggacgccaacgataccctgctgctccagctgaccaacaccagcgcctactacatgtacttgttgctgctgctgaagtccgtggtgtacttcgccatcatcacatgctgcctgctgatggctatggtcaagcggaaggacagccgggga

SEQ ID NO: 6189 - DNA, 2211 bp, synthetic construct
  source 1..2211: mol_type = other DNA
atggccttaccagtgaccgccttgctcctgccgctggccttgctgctccacgccgccaggccggacgacatcgtgatgacacagtcaccagatagcctcaccgtctccctgggggagcggaccaccattaattgtaaatccagccaaagcgtgctggactcaagcaagaacaagaatagcctcgcctggtatcagcagaagcccggtcagcctccaaagctgctgctttcttgggcctccaccagagagtccgggattcctgataggtttagtggttcaggctccggcacagattttactctgaccattgattctctccagccagaggattctgcaacttattactgccagcaaagcgcccactttcctataacttttggccagggaacccgacttgaaatcaagctcgagatccagaaccctgatcctgccgtgtaccagctgcgggatagcaagagcagcgacaagagcgtgtgtctgttcaccgacttcgacagccagaccaacgtgtcccagagcaaggactccgacgtgtacatcaccgataagtgcgtgctggacatgcggagcatggacttcaagagcaactccgccgtggcctggtccaacaagtccgatttcgcctgcgccaacgccttcaacaacagcattatccccgaggacacattcttcccaagccccgagagcagcgactccaccgaccacgtgaagcccaaagagacagagaacaccaagcagcccagcaagagctgccacaagcccaaggccatcgtgcacaccgagaaagtgaacatgatgagcctgaccgtgctgggcctgcggatgctgttcgccaaaaccgtggccgtgaacttcctgctgaccgccaagctgttcttcctcctcaccgcccgcgccaagagaagcggatctggcgtgaagcagaccctgaatttcgacctgctgaagctggctggcgacgtggaatccaacccaggccctactagtatggactggatttggcgcatccttttccttgtcggcgctgctaccggcgcgcattccttcgaacaggtgcagctggtgcagagcggtgccgaagtgaagaaaccaggtgcatccgttaaagtttcatgtaaggctagtggatataccttcaccaattacggaatgaactgggtgaaacaggcccctggccagggactgaagtggatggggtggattaacacctacaccggggagccgacttatgcagacgactttaaggggcgggtcacgatgacctccgacacctccaccagtaccgcctacctggagctgcacaaccttaggtcagacgataccgccgtgtattactgtgcccgatggtcttggtccgacggatactatgtctacttcgactattggggccaggggaccacagttaccgtgtcctctacgcgtgaggacctgaagaacgtgttcccacctgaggtggccgtgttcgagcctagcgaggccgagatcagccacacccagaaagccaccctcgtgtgcctggctaccggcttctaccccgaccatgtggaactgtcttggtgggtcaacggcaaagaggtgcacagcggcgtgtgtaccgacccccagccactgaaagaacagcccgccctgaacgacagccggtactgcctgagcagcagactgagagtgtccgccaccttctggcagaacccccggaaccacttcagatgccaggtgcagttctacggcctgagcgagaacgacgagtggacccaggacagagccaagcccgtgacccagatcgtgtctgccgaagcctggggcagagccgatgatgtgattaagatccactggcaggaaaagaagtccaacaccatcctgggcagccaggaaggcaacaccatgaagaccaacgacacctacatgaagttcagctggctgaccgtgcccgagaagtccctggacaaagaacacagatgcatcgtgcggcacgaaaacaacaagaacggcgtggaccaggaaatcatcttcccacccatcaagaccgatgtgattacaatggaccccaaggacaactgctccaaggacgccaacgataccctgctgctccagctgaccaacaccagcgcctactacatgtacttgttgctgctgctgaagtccgtggtgtacttcgccatcatcacatgctgcctgctgatggctatggtcaagcggaaggacagccgggga

SEQ ID NO: 6190 - DNA, 2199 bp, synthetic construct
  source 1..2199: mol_type = other DNA
atggccttaccagtgaccgccttgctcctgccgctggccttgctgctccacgccgccaggccggacgagatcgtgctgacacagagccctggaagcctggccgtgtctcctggcgagcgcgtgacaatgagctgcaagagcagccagagcgtgttcttcagcagctcccagaagaactacctggcctggtatcagcagatccccggccagagccccagactgctgatctactgggccagcaccagagaaagcggcgtgcccgatagattcaccggcagcggctctggcaccgacttcaccctgacaatcagcagcgtgcagcccgaggacctggctatctactactgccaccagtacctgagcagccggaccttcggccagggcaccaagctggaaatcaagagactcgagatccagaaccctgatcctgccgtgtaccagctgcgggatagcaagagcagcgacaagagcgtgtgtctgttcaccgacttcgacagccagaccaacgtgtcccagagcaaggactccgacgtgtacatcaccgataagtgcgtgctggacatgcggagcatggacttcaagagcaactccgccgtggcctggtccaacaagtccgatttcgcctgcgccaacgccttcaacaacagcattatccccgaggacacattcttcccaagccccgagagcagcgactccaccgaccacgtgaagcccaaagagacagagaacaccaagcagcccagcaagagctgccacaagcccaaggccatcgtgcacaccgagaaagtgaacatgatgagcctgaccgtgctgggcctgcggatgctgttcgccaaaaccgtggccgtgaacttcctgctgaccgccaagctgttcttcctcctcaccgcccgcgccaagagaagcggatctggcgtgaagcagaccctgaatttcgacctgctgaagctggctggcgacgtggaatccaacccaggccctactagtatggactggatttggcgcatccttttccttgtcggcgctgctaccggcgcgcattccttcgaacaggtgcaactgcagcagcctggcgctgaggtcgtgaagccaggcgcttccgtgaagatgtcctgcaaggccagcggctacaccttcaccagctactacatccactggatcaagcagacccctggacagggcctggaatgggtgggagtgatctaccccggcaacgacgacatcagctacaaccagaagttccagggcaaggccaccctgaccgccgacaagtctagcaccaccgcctacatgcaactgtccagcctgaccagcgaggacagcgccgtgtactactgcgccagagaagtgcggctgcggtacttcgatgtgtggggccagggaaccaccgtgaccgtgtcatctacgcgtgaggacctgaagaacgtgttcccacctgaggtggccgtgttcgagcctagcgaggccgagatcagccacacccagaaagccaccctcgtgtgcctggctaccggcttctaccccgaccatgtggaactgtcttggtgggtcaacggcaaagaggtgcacagcggcgtgtgtaccgacccccagccactgaaagaacagcccgccctgaacgacagccggtactgcctgagcagcagactgagagtgtccgccaccttctggcagaacccccggaaccacttcagatgccaggtgcagttctacggcctgagcgagaacgacgagtggacccaggacagagccaagcccgtgacccagatcgtgtctgccgaagcctggggcagagccgatgatgtgattaagatccactggcaggaaaagaagtccaacaccatcctgggcagccaggaaggcaacaccatgaagaccaacgacacctacatgaagttcagctggctgaccgtgcccgagaagtccctggacaaagaacacagatgcatcgtgcggcacgaaaacaacaagaacggcgtggaccaggaaatcatcttcccacccatcaagaccgatgtgattacaatggaccccaaggacaactgctccaaggacgccaacgataccctgctgctccagctgaccaacaccagcgcctactacatgtacttgttgctgctgctgaagtccgtggtgtacttcgccatcatcacatgctgcctgctgatggctatggtcaagcggaaggacagccgggga

SEQ ID NO: 6191 - DNA, 2211 bp, synthetic construct
  source 1..2211: mol_type = other DNA
atggccttaccagtgaccgccttgctcctgccgctggccttgctgctccacgccgccaggccggatgtgctgctgacccagagccctctgagcctgcctgtgacactgggacagcctgccagcatctcctgtcggagcagccagaccatcgtgcacagcaacggcaacacctacctggaatggttccagcagcggccaggccagagccccagactgctgatctaccaggtgtccaacagattcagcggcgtgcccgacagattctccggcagcggctctggcaccgacttcaccctgaagatcagccgggtggaagccgaggacgtgggcgtgtactactgttttcaaggcagccacgtgccccggacctttggcggaggaacaaaggtggaaatcaagagagccctcgagatccagaaccctgatcctgccgtgtaccagctgcgggatagcaagagcagcgacaagagcgtgtgtctgttcaccgacttcgacagccagaccaacgtgtcccagagcaaggactccgacgtgtacatcaccgataagtgcgtgctggacatgcggagcatggacttcaagagcaactccgccgtggcctggtccaacaagtccgatttcgcctgcgccaacgccttcaacaacagcattatccccgaggacacattcttcccaagccccgagagcagcgactccaccgaccacgtgaagcccaaagagacagagaacaccaagcagcccagcaagagctgccacaagcccaaggccatcgtgcacaccgagaaagtgaacatgatgagcctgaccgtgctgggcctgcggatgctgttcgccaaaaccgtggccgtgaacttcctgctgaccgccaagctgttcttcctcctcaccgcccgcgccaagagaagcggatctggcgtgaagcagaccctgaatttcgacctgctgaagctggctggcgacgtggaatccaacccaggccctactagtatggactggatttggcgcatccttttccttgtcggcgctgctaccggcgcgcattccttcgaacagatccaactggtgcagagcggcagcgagctgaagaaacctggggccagcgtgaaggtgtcctgcaaggccagcggctacacctttaccaactacggcatgaactgggtgcgccaggcccctggacagggcctgaaatggatgggctggatcaacaccaacaccggcgagcctaagtacgccgaagagttcaagggcagattcgccctgagcctggacaccagcgtgtccacagcctacctccagatcaacagcctgaaggccgaggataccgccgtgtacttctgcgccagaggctacggcaactacgccagaggggcttggctggcctattggggccagggaacactcgtgaccgtgtcctctacgcgtgaggacctgaagaacgtgttcccacctgaggtggccgtgttcgagcctagcgaggccgagatcagccacacccagaaagccaccctcgtgtgcctggctaccggcttctaccccgaccatgtggaactgtcttggtgggtcaacggcaaagaggtgcacagcggcgtgtgtaccgacccccagccactgaaagaacagcccgccctgaacgacagccggtactgcctgagcagcagactgagagtgtccgccaccttctggcagaacccccggaaccacttcagatgccaggtgcagttctacggcctgagcgagaacgacgagtggacccaggacagagccaagcccgtgacccagatcgtgtctgccgaagcctggggcagagccgatgatgtgattaagatccactggcaggaaaagaagtccaacaccatcctgggcagccaggaaggcaacaccatgaagaccaacgacacctacatgaagttcagctggctgaccgtgcccgagaagtccctggacaaagaacacagatgcatcgtgcggcacgaaaacaacaagaacggcgtggaccaggaaatcatcttcccacccatcaagaccgatgtgattacaatggaccccaaggacaactgctccaaggacgccaacgataccctgctgctccagctgaccaacaccagcgcctactacatgtacttgttgctgctgctgaagtccgtggtgtacttcgccatcatcacatgctgcctgctgatggctatggtcaagcggaaggacagccgggga

SEQ ID NO: 6192 - DNA, 2166 bp, synthetic construct
  source 1..2166: mol_type = other DNA
atggccttaccagtgaccgccttgctcctgccgctggccttgctgctccacgccgccaggccggacgagatcgtgctgacacagagccctgccacactctctctgagccctggcgaaagagccaccctgagctgtagcgccagcagcagcatcaactacatctactggctccagcagaagcccggccaggcccccagaatcctgatctacctgaccagcaacctggcctccggcgtgccagccagattttctggcagcggctccggcaccgacttcaccctgacaatcagcagcctggaacccgaggacttcgccgtgtactactgcctccagtggtccagcaaccccctgacctttggcggaggcaccaaggtggaaatcaagctcgagatccagaaccctgatcctgccgtgtaccagctgcgggatagcaagagcagcgacaagagcgtgtgtctgttcaccgacttcgacagccagaccaacgtgtcccagagcaaggactccgacgtgtacatcaccgataagtgcgtgctggacatgcggagcatggacttcaagagcaactccgccgtggcctggtccaacaagtccgatttcgcctgcgccaacgccttcaacaacagcattatccccgaggacacattcttcccaagccccgagagcagcgactccaccgaccacgtgaagcccaaagagacagagaacaccaagcagcccagcaagagctgccacaagcccaaggccatcgtgcacaccgagaaagtgaacatgatgagcctgaccgtgctgggcctgcggatgctgttcgccaaaaccgtggccgtgaacttcctgctgaccgccaagctgttcttcctcctcaccgcccgcgccaagagaagcggatctggcgtgaagcagaccctgaatttcgacctgctgaagctggctggcgacgtggaatccaacccaggccctactagtatggactggatttggcgcatccttttccttgtcggcgctgctaccggcgcgcattccttcgaagaagtgcaactggtggaaagcgggggaggacttgtgaagcctggcggctctctgagactgagctgtgccgcctctggcttcaccttcagcagctacgacatgagctgggtgcgccaggctcctggcaagggactggaatgggtgtccaccatcagcagcggcggcagctacacctactacctggacagcatcaagggccggttcaccatctccagagacaacgccaagaacagcctgtacctccagatgaactccctgcgggccgaggacacagccgtgtattattgcgccagacagggcctggattactggggcagaggcacccttgtgaccgtgtcctctacgcgtgaggacctgaagaacgtgttcccacctgaggtggccgtgttcgagcctagcgaggccgagatcagccacacccagaaagccaccctcgtgtgcctggctaccggcttctaccccgaccatgtggaactgtcttggtgggtcaacggcaaagaggtgcacagcggcgtgtgtaccgacccccagccactgaaagaacagcccgccctgaacgacagccggtactgcctgagcagcagactgagagtgtccgccaccttctggcagaacccccggaaccacttcagatgccaggtgcagttctacggcctgagcgagaacgacgagtggacccaggacagagccaagcccgtgacccagatcgtgtctgccgaagcctggggcagagccgatgatgtgattaagatccactggcaggaaaagaagtccaacaccatcctgggcagccaggaaggcaacaccatgaagaccaacgacacctacatgaagttcagctggctgaccgtgcccgagaagtccctggacaaagaacacagatgcatcgtgcggcacgaaaacaacaagaacggcgtggaccaggaaatcatcttcccacccatcaagaccgatgtgattacaatggaccccaaggacaactgctccaaggacgccaacgataccctgctgctccagctgaccaacaccagcgcctactacatgtacttgttgctgctgctgaagtccgtggtgtacttcgccatcatcacatgctgcctgctgatggctatggtcaagcggaaggacagccgggga

SEQ ID NO: 6193 - DNA, 2193 bp, synthetic construct
  source 1..2193: mol_type = other DNA
atggccttaccagtgaccgccttgctcctgccgctggccttgctgctccacgccgccaggccggacatcgtgatgacccagagccccgatagcctggccgtgtctctgggagagagagccaccatcaactgccgggccagcaagagcgtgtccaccagcggctacagcttcatgcactggtatcagcagaagcccggccagccccccaagctgctgatctacctggcctccaacctggaaagcggcgtgcccgatagattcagcggcagcggctctggcaccgacttcaccctgaccatcagttctcttcaggccgaggacgtggccgtgtactactgccagcacagcagagaggtgccctggacattcggccagggcacaaaggtggaaatcaagcggctcgagatccagaaccctgatcctgccgtgtaccagctgcgggatagcaagagcagcgacaagagcgtgtgtctgttcaccgacttcgacagccagaccaacgtgtcccagagcaaggactccgacgtgtacatcaccgataagtgcgtgctggacatgcggagcatggacttcaagagcaactccgccgtggcctggtccaacaagtccgatttcgcctgcgccaacgccttcaacaacagcattatccccgaggacacattcttcccaagccccgagagcagcgactccaccgaccacgtgaagcccaaagagacagagaacaccaagcagcccagcaagagctgccacaagcccaaggccatcgtgcacaccgagaaagtgaacatgatgagcctgaccgtgctgggcctgcggatgctgttcgccaaaaccgtggccgtgaacttcctgctgaccgccaagctgttcttcctcctcaccgcccgcgccaagagaagcggatctggcgtgaagcagaccctgaatttcgacctgctgaagctggctggcgacgtggaatccaacccaggccctactagtatggactggatttggcgcatccttttccttgtcggcgctgctaccggcgcgcattccttcgaacaggtgcagctggtgcagtctggggccgaagtgaagaaacctggggccagcgtgaaggtgtcctgcaaggccagcggatacacctttaccaactacggcatgaactgggtgcgccaggcccctggacagggcctggaatggatgggctggatcaacacctacaccggcgagcccacatacgccgacgccttcaagggcagattcgccttcagcctggacaccagcacctccaccgcctacctccagatcaacagcctgcggagcgacgacaccgccgtgtattattgcgccagagattacggcgactacgggatggactattggggccagggaaccaccgtgaccgtgtcctctacgcgtgaggacctgaagaacgtgttcccacctgaggtggccgtgttcgagcctagcgaggccgagatcagccacacccagaaagccaccctcgtgtgcctggctaccggcttctaccccgaccatgtggaactgtcttggtgggtcaacggcaaagaggtgcacagcggcgtgtgtaccgacccccagccactgaaagaacagcccgccctgaacgacagccggtactgcctgagcagcagactgagagtgtccgccaccttctggcagaacccccggaaccacttcagatgccaggtgcagttctacggcctgagcgagaacgacgagtggacccaggacagagccaagcccgtgacccagatcgtgtctgccgaagcctggggcagagccgatgatgtgattaagatccactggcaggaaaagaagtccaacaccatcctgggcagccaggaaggcaacaccatgaagaccaacgacacctacatgaagttcagctggctgaccgtgcccgagaagtccctggacaaagaacacagatgcatcgtgcggcacgaaaacaacaagaacggcgtggaccaggaaatcatcttcccacccatcaagaccgatgtgattacaatggaccccaaggacaactgctccaaggacgccaacgataccctgctgctccagctgaccaacaccagcgcctactacatgtacttgttgctgctgctgaagtccgtggtgtacttcgccatcatcacatgctgcctgctgatggctatggtcaagcggaaggacagccgggga

SEQ ID NO: 6194 - DNA, 2181 bp, synthetic construct
  source 1..2181: mol_type = other DNA
atggccttaccagtgaccgccttgctcctgccgctggccttgctgctccacgccgccaggccggacatcgtgatgacccagacccccctgaccctgagcgtgacaatcggacagcctgccagcatctcctgcaagagcagccagagcctgctggacagcgacggcaagacctacctgaactggctgctgcagaggccaggccagagccccgagagactgatctacctggtgtccaagctggactccggcgtgcccgatagattcacaggcagcggctccggcaccgacttcaccctgaagatcagccgggtggaagccgaggacctgggcgtgtactgttgttggcagggcacccacttcccttacaccttcggcggagggaccaaggtggaaatcaagggcctcgagatccagaaccctgatcctgccgtgtaccagctgcgggatagcaagagcagcgacaagagcgtgtgtctgttcaccgacttcgacagccagaccaacgtgtcccagagcaaggactccgacgtgtacatcaccgataagtgcgtgctggacatgcggagcatggacttcaagagcaactccgccgtggcctggtccaacaagtccgatttcgcctgcgccaacgccttcaacaacagcattatccccgaggacacattcttcccaagccccgagagcagcgactccaccgaccacgtgaagcccaaagagacagagaacaccaagcagcccagcaagagctgccacaagcccaaggccatcgtgcacaccgagaaagtgaacatgatgagcctgaccgtgctgggcctgcggatgctgttcgccaaaaccgtggccgtgaacttcctgctgaccgccaagctgttcttcctcctcaccgcccgcgccaagagaagcggatctggcgtgaagcagaccctgaatttcgacctgctgaagctggctggcgacgtggaatccaacccaggccctactagtatggactggatttggcgcatccttttccttgtcggcgctgctaccggcgcgcattccttcgaacaggtgcaactgcagcagcctggcgctgaacttgtgcggccaggcgcctctgtgaagctgagctgtaaagccagcggctacaccttcaccagctactggatgaactgggtcaagcagcgcccaggccagggcctggaatggatcggaatgatcgaccccagcgacagcgagacacactacaaccacatcttcaaggacaaggccaccctgaccgtggacaagtccagcagcacagcctacctgcaactgtccagcctgaccagcgaggacagcgccgtgtactactgcgcccggaacctgtatctgtggggccagggaacaagcgtgaccgtgtctagcacgcgtgaggacctgaagaacgtgttcccacctgaggtggccgtgttcgagcctagcgaggccgagatcagccacacccagaaagccaccctcgtgtgcctggctaccggcttctaccccgaccatgtggaactgtcttggtgggtcaacggcaaagaggtgcacagcggcgtgtgtaccgacccccagccactgaaagaacagcccgccctgaacgacagccggtactgcctgagcagcagactgagagtgtccgccaccttctggcagaacccccggaaccacttcagatgccaggtgcagttctacggcctgagcgagaacgacgagtggacccaggacagagccaagcccgtgacccagatcgtgtctgccgaagcctggggcagagccgatgatgtgattaagatccactggcaggaaaagaagtccaacaccatcctgggcagccaggaaggcaacaccatgaagaccaacgacacctacatgaagttcagctggctgaccgtgcccgagaagtccctggacaaagaacacagatgcatcgtgcggcacgaaaacaacaagaacggcgtggaccaggaaatcatcttcccacccatcaagaccgatgtgattacaatggaccccaaggacaactgctccaaggacgccaacgataccctgctgctccagctgaccaacaccagcgcctactacatgtacttgttgctgctgctgaagtccgtggtgtacttcgccatcatcacatgctgcctgctgatggctatggtcaagcggaaggacagccgggga

SEQ ID NO: 6195 - DNA, 2205 bp, synthetic construct
  source 1..2205: mol_type = other DNA
atggccttaccagtgaccgccttgctcctgccgctggccttgctgctccacgccgccaggccggacatcgtgatgacccagagccccgatagcctggccgtgtctctgggagagagagccaccatcaactgcgagagcagccagagcctgctgaacagcggcaaccagaagaactacctgacctggtatcagcagaagcccggccagccccccaagcccctgatctattgggccagcaccagagaaagcggcgtgcccgatagattcagcggcagcggaagcggcaccgacttcaccctgaccatcagttctcttcaggccgaggacgtggccgtgtactactgccagaacgactacagctacccctacaccttcggccagggcaccaagctggaaatcaagagactcgagatccagaaccctgatcctgccgtgtaccagctgcgggatagcaagagcagcgacaagagcgtgtgtctgttcaccgacttcgacagccagaccaacgtgtcccagagcaaggactccgacgtgtacatcaccgataagtgcgtgctggacatgcggagcatggacttcaagagcaactccgccgtggcctggtccaacaagtccgatttcgcctgcgccaacgccttcaacaacagcattatccccgaggacacattcttcccaagccccgagagcagcgactccaccgaccacgtgaagcccaaagagacagagaacaccaagcagcccagcaagagctgccacaagcccaaggccatcgtgcacaccgagaaagtgaacatgatgagcctgaccgtgctgggcctgcggatgctgttcgccaaaaccgtggccgtgaacttcctgctgaccgccaagctgttcttcctcctcaccgcccgcgccaagagaagcggatctggcgtgaagcagaccctgaatttcgacctgctgaagctggctggcgacgtggaatccaacccaggccctactagtatggactggatttggcgcatccttttccttgtcggcgctgctaccggcgcgcattccttcgaagaagtgcagctggtgcagtctggggccgaagtgaagaagcctggcgagagcctgaagatcagctgcaagggcagcggctacagcttcaccgactactacatgaagtgggccagacagatgcccggcaagggcctggaatggatgggcgacatcatccccagcaacggggccaccttctacaaccagaaattcaagggccaagtgaccatctccgccgacaagagcatcagcaccacctacctccagtggtccagcctgaaggccagcgacaccgccatgtactattgcgccagaagccatctgctgcgggccagttggttcgcctattggggccagggaacaatggtcacagtgtccagcacgcgtgaggacctgaagaacgtgttcccacctgaggtggccgtgttcgagcctagcgaggccgagatcagccacacccagaaagccaccctcgtgtgcctggctaccggcttctaccccgaccatgtggaactgtcttggtgggtcaacggcaaagaggtgcacagcggcgtgtgtaccgacccccagccactgaaagaacagcccgccctgaacgacagccggtactgcctgagcagcagactgagagtgtccgccaccttctggcagaacccccggaaccacttcagatgccaggtgcagttctacggcctgagcgagaacgacgagtggacccaggacagagccaagcccgtgacccagatcgtgtctgccgaagcctggggcagagccgatgatgtgattaagatccactggcaggaaaagaagtccaacaccatcctgggcagccaggaaggcaacaccatgaagaccaacgacacctacatgaagttcagctggctgaccgtgcccgagaagtccctggacaaagaacacagatgcatcgtgcggcacgaaaacaacaagaacggcgtggaccaggaaatcatcttcccacccatcaagaccgatgtgattacaatggaccccaaggacaactgctccaaggacgccaacgataccctgctgctccagctgaccaacaccagcgcctactacatgtacttgttgctgctgctgaagtccgtggtgtacttcgccatcatcacatgctgcctgctgatggctatggtcaagcggaaggacagccgggga

SEQ ID NO: 6196 - DNA, 2190 bp, synthetic construct
  source 1..2190: mol_type = other DNA
atggccttaccagtgaccgccttgctcctgccgctggccttgctgctccacgccgccaggccggacatccagatgacccagtctaccagttccctgagtgcatccctcggagacagggtgacgatcagttgcagcgcaagccaagggatcaataactatctgaactggtatcagcagaaaccggacggaacagtcgaactcctgatttattacaccagcacccttcagagtggcgtcccttcccggttcagtggctccggaagcgggaccgattactccctgaccatttctaatctggagccagaggacataggaacgtattattgccagcagtatagtaaactgccacgaacttttggaggggggacgaaactggagatcaaactcgagatccagaaccctgatcctgccgtgtaccagctgcgggatagcaagagcagcgacaagagcgtgtgtctgttcaccgacttcgacagccagaccaacgtgtcccagagcaaggactccgacgtgtacatcaccgataagtgcgtgctggacatgcggagcatggacttcaagagcaactccgccgtggcctggtccaacaagtccgatttcgcctgcgccaacgccttcaacaacagcattatccccgaggacacattcttcccaagccccgagagcagcgactccaccgaccacgtgaagcccaaagagacagagaacaccaagcagcccagcaagagctgccacaagcccaaggccatcgtgcacaccgagaaagtgaacatgatgagcctgaccgtgctgggcctgcggatgctgttcgccaaaaccgtggccgtgaacttcctgctgaccgccaagctgttcttcctcctcaccgcccgcgccaagagaagcggatctggcgtgaagcagaccctgaatttcgacctgctgaagctggctggcgacgtggaatccaacccaggccctactagtatggactggatttggcgcatccttttccttgtcggcgctgctaccggcgcgcattccttcgaacaggtgcaactccagcagtccggaagcgagcttatgatgccaggggcatcagtgaagatcagctgcaaggctactggctacaccttctctaattactggatagagtgggttaaacaaaggccagggcacggcctggaatggatcggcgagatcctgcctgggacaggccgaaccatttataacgagaagttcaaaggcaaggctactttcaccgcagatataagctctaatacagtgcaaatgcagctctcttccctgacaagtgaggatagtgccgtgtattattgcgcacgaagagattactatggaaatttttattacgctatggattattggggtcaaggaacaagtgtgaccgttagcagcacgcgtgaggacctgaagaacgtgttcccacctgaggtggccgtgttcgagcctagcgaggccgagatcagccacacccagaaagccaccctcgtgtgcctggctaccggcttctaccccgaccatgtggaactgtcttggtgggtcaacggcaaagaggtgcacagcggcgtgtgtaccgacccccagccactgaaagaacagcccgccctgaacgacagccggtactgcctgagcagcagactgagagtgtccgccaccttctggcagaacccccggaaccacttcagatgccaggtgcagttctacggcctgagcgagaacgacgagtggacccaggacagagccaagcccgtgacccagatcgtgtctgccgaagcctggggcagagccgatgatgtgattaagatccactggcaggaaaagaagtccaacaccatcctgggcagccaggaaggcaacaccatgaagaccaacgacacctacatgaagttcagctggctgaccgtgcccgagaagtccctggacaaagaacacagatgcatcgtgcggcacgaaaacaacaagaacggcgtggaccaggaaatcatcttcccacccatcaagaccgatgtgattacaatggaccccaaggacaactgctccaaggacgccaacgataccctgctgctccagctgaccaacaccagcgcctactacatgtacttgttgctgctgctgaagtccgtggtgtacttcgccatcatcacatgctgcctgctgatggctatggtcaagcggaaggacagccgggga

SEQ ID NO: 6197 - DNA, 2175 bp, synthetic construct
  source 1..2175: mol_type = other DNA
atggccttaccagtgaccgccttgctcctgccgctggccttgctgctccacgccgccaggccggacatccagatgacccagagccctgccagcctgtccgtgtctgtgggcgagacagtgaccatcacctgtcgggccagcgagaacatctacagcaacctggcctggtatcagcagaagcagggcaagagcccccaactgctggtgtacgccgccaccaatctggccgatggcgtgcccagcagattttccggctctggcagcggcacccagtacagcctgaagatcaacagcctccagagcgaggacttcggcagctactactgccagcacttctggggcacctggacctttggaggaggcaccaccctggaaatcaagctcgagatccagaaccctgatcctgccgtgtaccagctgcgggatagcaagagcagcgacaagagcgtgtgtctgttcaccgacttcgacagccagaccaacgtgtcccagagcaaggactccgacgtgtacatcaccgataagtgcgtgctggacatgcggagcatggacttcaagagcaactccgccgtggcctggtccaacaagtccgatttcgcctgcgccaacgccttcaacaacagcattatccccgaggacacattcttcccaagccccgagagcagcgactccaccgaccacgtgaagcccaaagagacagagaacaccaagcagcccagcaagagctgccacaagcccaaggccatcgtgcacaccgagaaagtgaacatgatgagcctgaccgtgctgggcctgcggatgctgttcgccaaaaccgtggccgtgaacttcctgctgaccgccaagctgttcttcctcctcaccgcccgcgccaagagaagcggatctggcgtgaagcagaccctgaatttcgacctgctgaagctggctggcgacgtggaatccaacccaggccctactagtatggactggatttggcgcatccttttccttgtcggcgctgctaccggcgcgcattccttcgaagaagtgcaactccagcagagcggccctgagcttgtgaagcctggcgcttccgtgaagatgagctgcaaggccagcggctacaccttcaccgactactacatgaagtggatgaagcagagccacggcaagtccctggaatggatcggcgacatcaaccccaacaacggcggcaccacctacaaccagaagttcaagggcaaggccaccctgaccgtggacaagagcagcagcaccgcctacatgcaactgaacagcctgaccagcgaggacagcgccgtgtactactgcgccagagactacggctacggctatttcgactactggggccagggcacaaccctgacagtgtcctctacgcgtgaggacctgaagaacgtgttcccacctgaggtggccgtgttcgagcctagcgaggccgagatcagccacacccagaaagccaccctcgtgtgcctggctaccggcttctaccccgaccatgtggaactgtcttggtgggtcaacggcaaagaggtgcacagcggcgtgtgtaccgacccccagccactgaaagaacagcccgccctgaacgacagccggtactgcctgagcagcagactgagagtgtccgccaccttctggcagaacccccggaaccacttcagatgccaggtgcagttctacggcctgagcgagaacgacgagtggacccaggacagagccaagcccgtgacccagatcgtgtctgccgaagcctggggcagagccgatgatgtgattaagatccactggcaggaaaagaagtccaacaccatcctgggcagccaggaaggcaacaccatgaagaccaacgacacctacatgaagttcagctggctgaccgtgcccgagaagtccctggacaaagaacacagatgcatcgtgcggcacgaaaacaacaagaacggcgtggaccaggaaatcatcttcccacccatcaagaccgatgtgattacaatggaccccaaggacaactgctccaaggacgccaacgataccctgctgctccagctgaccaacaccagcgcctactacatgtacttgttgctgctgctgaagtccgtggtgtacttcgccatcatcacatgctgcctgctgatggctatggtcaagcggaaggacagccgggga

SEQ ID NO: 6198 - DNA, 2184 bp, synthetic construct
  source 1..2184: mol_type = other DNA
atggccttaccagtgaccgccttgctcctgccgctggccttgctgctccacgccgccaggccggagatcgtgctgacacagagccctggcaccctgagcctgtctccaggcgaaagagccacactgagctgtcgggcctctcagagcgtgggaggctacctggcttggtatcagcagaagccaggccaggcccccagactgctgatctacgacgccagcaatcgggccacaggcatccccgccagattttctggcagcggctccggcaccgacttcaccctgacaatcagcagcctggaacccgaggacttcgccgtgtactactgccagcagcggaacaactggccccccatgtacacattcggccagggcaccaagctggaaatcaagagactcgagatccagaaccctgatcctgccgtgtaccagctgcgggatagcaagagcagcgacaagagcgtgtgtctgttcaccgacttcgacagccagaccaacgtgtcccagagcaaggactccgacgtgtacatcaccgataagtgcgtgctggacatgcggagcatggacttcaagagcaactccgccgtggcctggtccaacaagtccgatttcgcctgcgccaacgccttcaacaacagcattatccccgaggacacattcttcccaagccccgagagcagcgactccaccgaccacgtgaagcccaaagagacagagaacaccaagcagcccagcaagagctgccacaagcccaaggccatcgtgcacaccgagaaagtgaacatgatgagcctgaccgtgctgggcctgcggatgctgttcgccaaaaccgtggccgtgaacttcctgctgaccgccaagctgttcttcctcctcaccgcccgcgccaagagaagcggatctggcgtgaagcagaccctgaatttcgacctgctgaagctggctggcgacgtggaatccaacccaggccctactagtatggactggatttggcgcatccttttccttgtcggcgctgctaccggcgcgcattccttcgaacaggtgcaactggtgcagagcggagccgaagtgaagaaacccggcagcagcgtgaaggtgtcctgcaaggcttccggcggcaccttcagcagctacgccatttcttgggtgcgccaggctcctggacagggcctggaatggatgggcggcatcatccctatcctgggcaccgccaactacgcccagaaattccagggcagagtgaccatcaccgccgacgagagcaccagcaccgcctacatggaactgagcagcctgcggagcgaggacacagccgtgtattattgcgccagatggggcggaggggccttcgacatttggggccagggaacaatggtcaccgtgtccagcacgcgtgaggacctgaagaacgtgttcccacctgaggtggccgtgttcgagcctagcgaggccgagatcagccacacccagaaagccaccctcgtgtgcctggctaccggcttctaccccgaccatgtggaactgtcttggtgggtcaacggcaaagaggtgcacagcggcgtgtgtaccgacccccagccactgaaagaacagcccgccctgaacgacagccggtactgcctgagcagcagactgagagtgtccgccaccttctggcagaacccccggaaccacttcagatgccaggtgcagttctacggcctgagcgagaacgacgagtggacccaggacagagccaagcccgtgacccagatcgtgtctgccgaagcctggggcagagccgatgatgtgattaagatccactggcaggaaaagaagtccaacaccatcctgggcagccaggaaggcaacaccatgaagaccaacgacacctacatgaagttcagctggctgaccgtgcccgagaagtccctggacaaagaacacagatgcatcgtgcggcacgaaaacaacaagaacggcgtggaccaggaaatcatcttcccacccatcaagaccgatgtgattacaatggaccccaaggacaactgctccaaggacgccaacgataccctgctgctccagctgaccaacaccagcgcctactacatgtacttgttgctgctgctgaagtccgtggtgtacttcgccatcatcacatgctgcctgctgatggctatggtcaagcggaaggacagccgggga

SEQ ID NO: 6199 - DNA, 2169 bp, synthetic construct
  source 1..2169: mol_type = other DNA
atggccttaccagtgaccgccttgctcctgccgctggccttgctgctccacgccgccaggccgcagatcgtgctgacacagagccctgccctgatgagcgccagccctggcgagaaagtgaccatgacctgtagcgccagcagcagcgtgcgctacatgtactggtatcagcagaagcccagaagcagccccaagccctggattcacctgaccagcaatctggcctctggcgtgcccgctagattttccggctctggcagcggcaccagctacagcctgaccatcagcagcatggaagccgaggacgccgccacctactactgccagcagtggtccagccaccccttcacatttggctccggcaccaagctggaaatcaagctcgagatccagaaccctgatcctgccgtgtaccagctgcgggatagcaagagcagcgacaagagcgtgtgtctgttcaccgacttcgacagccagaccaacgtgtcccagagcaaggactccgacgtgtacatcaccgataagtgcgtgctggacatgcggagcatggacttcaagagcaactccgccgtggcctggtccaacaagtccgatttcgcctgcgccaacgccttcaacaacagcattatccccgaggacacattcttcccaagccccgagagcagcgactccaccgaccacgtgaagcccaaagagacagagaacaccaagcagcccagcaagagctgccacaagcccaaggccatcgtgcacaccgagaaagtgaacatgatgagcctgaccgtgctgggcctgcggatgctgttcgccaaaaccgtggccgtgaacttcctgctgaccgccaagctgttcttcctcctcaccgcccgcgccaagagaagcggatctggcgtgaagcagaccctgaatttcgacctgctgaagctggctggcgacgtggaatccaacccaggccctactagtatggactggatttggcgcatccttttccttgtcggcgctgctaccggcgcgcattccttcgaagatgtgcaactccaggaaagcggccctggccttgtgaagcctagccagagcctgtccctgacctgtaccgtgaccggcttcagcatcaccagcgactactcttggaactggatcagacagttccctggcaacaaactggaatggatgggctacatcagctactccggccacacctcctacaaccccagcctggaaagccggatctccatcaccagagacaccagcaagaaccagttcttcttgcaactgaacagcgtgaccaccgaggataccgccacatattactgtaccagaggcaactgggacgtggtgtactggggccagggcacacttgtgaccgtgtctgctacgcgtgaggacctgaagaacgtgttcccacctgaggtggccgtgttcgagcctagcgaggccgagatcagccacacccagaaagccaccctcgtgtgcctggctaccggcttctaccccgaccatgtggaactgtcttggtgggtcaacggcaaagaggtgcacagcggcgtgtgtaccgacccccagccactgaaagaacagcccgccctgaacgacagccggtactgcctgagcagcagactgagagtgtccgccaccttctggcagaacccccggaaccacttcagatgccaggtgcagttctacggcctgagcgagaacgacgagtggacccaggacagagccaagcccgtgacccagatcgtgtctgccgaagcctggggcagagccgatgatgtgattaagatccactggcaggaaaagaagtccaacaccatcctgggcagccaggaaggcaacaccatgaagaccaacgacacctacatgaagttcagctggctgaccgtgcccgagaagtccctggacaaagaacacagatgcatcgtgcggcacgaaaacaacaagaacggcgtggaccaggaaatcatcttcccacccatcaagaccgatgtgattacaatggaccccaaggacaactgctccaaggacgccaacgataccctgctgctccagctgaccaacaccagcgcctactacatgtacttgttgctgctgctgaagtccgtggtgtacttcgccatcatcacatgctgcctgctgatggctatggtcaagcggaaggacagccgggga

SEQ ID NO: 6200 - DNA, 2199 bp, synthetic construct
  source 1..2199: mol_type = other DNA
atggccttaccagtgaccgccttgctcctgccgctggccttgctgctccacgccgccaggccggacgtcgtgatgacccagagccctctgagcctgcctgtgacactgggacagcctgccagcatctcctgtcggagcagccagagcatcgtgcacagcgacggcaacacctacctggaatggtatcagcagcggccaggccagagccccagacggctgatctacaaggtgtccaacagattcagcggcgtgcccgacagattctccggcagcggctctggcaccgacttcaccctgaagatcagcagagtggaagccgaggacgtgggcgtgtactactgttttcaaggcagccacgccccctggacctttggcggaggaacaaaggtggaaatcaagctcgagatccagaaccctgatcctgccgtgtaccagctgcgggatagcaagagcagcgacaagagcgtgtgtctgttcaccgacttcgacagccagaccaacgtgtcccagagcaaggactccgacgtgtacatcaccgataagtgcgtgctggacatgcggagcatggacttcaagagcaactccgccgtggcctggtccaacaagtccgatttcgcctgcgccaacgccttcaacaacagcattatccccgaggacacattcttcccaagccccgagagcagcgactccaccgaccacgtgaagcccaaagagacagagaacaccaagcagcccagcaagagctgccacaagcccaaggccatcgtgcacaccgagaaagtgaacatgatgagcctgaccgtgctgggcctgcggatgctgttcgccaaaaccgtggccgtgaacttcctgctgaccgccaagctgttcttcctcctcaccgcccgcgccaagagaagcggatctggcgtgaagcagaccctgaatttcgacctgctgaagctggctggcgacgtggaatccaacccaggccctactagtatggactggatttggcgcatccttttccttgtcggcgctgctaccggcgcgcattccttcgaagaagtgcaactggtggaatcaggcggcggactggtgcagcctggcggatctctgagactgagctgtgccgccagcggcttcaccttcagcagctacggaatgcactgggtgcgccaggcccctggcaaaggactggaatgggtggcctacatcaccaccagaagcagcaccatctactacgccgacagcgtgaagggccggttcaccatctccagagacaacgccaagaacagcctgtacctccagatgaactccctgcgggccgaggacaccgccgtgtactattgcaccagagagcccctgaccggctactacgctatggactattggggccagggcaccagcgtgaccgtgtctagtacgcgtgaggacctgaagaacgtgttcccacctgaggtggccgtgttcgagcctagcgaggccgagatcagccacacccagaaagccaccctcgtgtgcctggctaccggcttctaccccgaccatgtggaactgtcttggtgggtcaacggcaaagaggtgcacagcggcgtgtgtaccgacccccagccactgaaagaacagcccgccctgaacgacagccggtactgcctgagcagcagactgagagtgtccgccaccttctggcagaacccccggaaccacttcagatgccaggtgcagttctacggcctgagcgagaacgacgagtggacccaggacagagccaagcccgtgacccagatcgtgtctgccgaagcctggggcagagccgatgatgtgattaagatccactggcaggaaaagaagtccaacaccatcctgggcagccaggaaggcaacaccatgaagaccaacgacacctacatgaagttcagctggctgaccgtgcccgagaagtccctggacaaagaacacagatgcatcgtgcggcacgaaaacaacaagaacggcgtggaccaggaaatcatcttcccacccatcaagaccgatgtgattacaatggaccccaaggacaactgctccaaggacgccaacgataccctgctgctccagctgaccaacaccagcgcctactacatgtacttgttgctgctgctgaagtccgtggtgtacttcgccatcatcacatgctgcctgctgatggctatggtcaagcggaaggacagccgggga

SEQ ID NO: 6201 - DNA, 2175 bp, synthetic construct
  source 1..2175: mol_type = other DNA
atggccttaccagtgaccgccttgctcctgccgctggccttgctgctccacgccgccaggccggacatccagatgacccagagccccagcagcctgtctgccagcgtgggcgacagagtgaccatcacctgtagagccagccagagcatcagcctgtggctgaactggtatcagcagaagcccggcaaggcccccaagctgctgatctacgccgccagcacactccagagcggcgtgccaagcagattttccggcagcggctccggcaccgacttcaccctgacaatcagctccctccagcccgaggacttcgccacctactactgccagcagtactacaccagcccctacaccttcggccagggcaccaaggtggaaatcaagagactcgagatccagaaccctgatcctgccgtgtaccagctgcgggatagcaagagcagcgacaagagcgtgtgtctgttcaccgacttcgacagccagaccaacgtgtcccagagcaaggactccgacgtgtacatcaccgataagtgcgtgctggacatgcggagcatggacttcaagagcaactccgccgtggcctggtccaacaagtccgatttcgcctgcgccaacgccttcaacaacagcattatccccgaggacacattcttcccaagccccgagagcagcgactccaccgaccacgtgaagcccaaagagacagagaacaccaagcagcccagcaagagctgccacaagcccaaggccatcgtgcacaccgagaaagtgaacatgatgagcctgaccgtgctgggcctgcggatgctgttcgccaaaaccgtggccgtgaacttcctgctgaccgccaagctgttcttcctcctcaccgcccgcgccaagagaagcggatctggcgtgaagcagaccctgaatttcgacctgctgaagctggctggcgacgtggaatccaacccaggccctactagtatggactggatttggcgcatccttttccttgtcggcgctgctaccggcgcgcattccttcgaacaggtgcaactgctggaatctggcggcggactggtgcagcctggcggatctctgagactgagctgtgccgccagcggcttcaccttcagcagctacgccatgagctgggtgcgccaggcccctggaaaaggactggaatgggtgtccgtgatccggtccagcggcagcagcacctattacgccgatagcgtgaagggccggttcaccatcagccgggacaacagcaagaacaccctgtacctccagatgaacagcctgcgggccgaggacaccgccgtgtactattgtgctaggggaggcggctacttcgactactggggccagggaacactcgtgaccgtgtcctctacgcgtgaggacctgaagaacgtgttcccacctgaggtggccgtgttcgagcctagcgaggccgagatcagccacacccagaaagccaccctcgtgtgcctggctaccggcttctaccccgaccatgtggaactgtcttggtgggtcaacggcaaagaggtgcacagcggcgtgtgtaccgacccccagccactgaaagaacagcccgccctgaacgacagccggtactgcctgagcagcagactgagagtgtccgccaccttctggcagaacccccggaaccacttcagatgccaggtgcagttctacggcctgagcgagaacgacgagtggacccaggacagagccaagcccgtgacccagatcgtgtctgccgaagcctggggcagagccgatgatgtgattaagatccactggcaggaaaagaagtccaacaccatcctgggcagccaggaaggcaacaccatgaagaccaacgacacctacatgaagttcagctggctgaccgtgcccgagaagtccctggacaaagaacacagatgcatcgtgcggcacgaaaacaacaagaacggcgtggaccaggaaatcatcttcccacccatcaagaccgatgtgattacaatggaccccaaggacaactgctccaaggacgccaacgataccctgctgctccagctgaccaacaccagcgcctactacatgtacttgttgctgctgctgaagtccgtggtgtacttcgccatcatcacatgctgcctgctgatggctatggtcaagcggaaggacagccgggga

SEQ ID NO: 6202 - DNA, 2184 bp, synthetic construct
  source 1..2184: mol_type = other DNA
atggccttaccagtgaccgccttgctcctgccgctggccttgctgctccacgccgccaggccggacatccagatgacccagagccccagcagcctgtctgccagcgtgggcgacagagtgaccatcacctgtagagccagccagagcatcagcagctacctgaactggtatcagcagaagcccggcaaggcccccaaactgctgatctacgccgtgtccacactccagagcggcgtgcccagcagattttctggcagcggctccggcaccgacttcaccctgacaatcagctccctccagcccgaggacttcgccacctactactgtcagcagagcggcaccttccctcccaccacatttggacagggcaccaaggtggaaatcaagagactcgagatccagaaccctgatcctgccgtgtaccagctgcgggatagcaagagcagcgacaagagcgtgtgtctgttcaccgacttcgacagccagaccaacgtgtcccagagcaaggactccgacgtgtacatcaccgataagtgcgtgctggacatgcggagcatggacttcaagagcaactccgccgtggcctggtccaacaagtccgatttcgcctgcgccaacgccttcaacaacagcattatccccgaggacacattcttcccaagccccgagagcagcgactccaccgaccacgtgaagcccaaagagacagagaacaccaagcagcccagcaagagctgccacaagcccaaggccatcgtgcacaccgagaaagtgaacatgatgagcctgaccgtgctgggcctgcggatgctgttcgccaaaaccgtggccgtgaacttcctgctgaccgccaagctgttcttcctcctcaccgcccgcgccaagagaagcggatctggcgtgaagcagaccctgaatttcgacctgctgaagctggctggcgacgtggaatccaacccaggccctactagtatggactggatttggcgcatccttttccttgtcggcgctgctaccggcgcgcattccttcgaacaggtgcaactgctggaatctggcggcggactggtgcagcctggcggatctctgagactgagctgtgccgccagcggcttcaccttcagcagccacggaatgcactgggtgcgccaggcccctggaaagggactggaatgggtgtccgtgatctccggcagcggcagcaataccggctacgccgatagcgtgaagggccggttcaccatcagccgggacaacagcaagaacaccctgtacctccagatgaacagcctgcgggccgaggacaccgccgtgtactattgtgccagacagtggggcagctacgccttcgattcttggggccagggcaccctcgtgaccgtgtcatctacgcgtgaggacctgaagaacgtgttcccacctgaggtggccgtgttcgagcctagcgaggccgagatcagccacacccagaaagccaccctcgtgtgcctggctaccggcttctaccccgaccatgtggaactgtcttggtgggtcaacggcaaagaggtgcacagcggcgtgtgtaccgacccccagccactgaaagaacagcccgccctgaacgacagccggtactgcctgagcagcagactgagagtgtccgccaccttctggcagaacccccggaaccacttcagatgccaggtgcagttctacggcctgagcgagaacgacgagtggacccaggacagagccaagcccgtgacccagatcgtgtctgccgaagcctggggcagagccgatgatgtgattaagatccactggcaggaaaagaagtccaacaccatcctgggcagccaggaaggcaacaccatgaagaccaacgacacctacatgaagttcagctggctgaccgtgcccgagaagtccctggacaaagaacacagatgcatcgtgcggcacgaaaacaacaagaacggcgtggaccaggaaatcatcttcccacccatcaagaccgatgtgattacaatggaccccaaggacaactgctccaaggacgccaacgataccctgctgctccagctgaccaacaccagcgcctactacatgtacttgttgctgctgctgaagtccgtggtgtacttcgccatcatcacatgctgcctgctgatggctatggtcaagcggaaggacagccgggga

SEQ ID NO: 6203 - DNA, 2214 bp, synthetic construct
  source 1..2214: mol_type = other DNA
atggccttaccagtgaccgccttgctcctgccgctggccttgctgctccacgccgccaggccggacatcgtgatgagccagagccctagcagcctggccgtgtccgtgggcgagaaagtgaccatgagctgcaagagcagccagtccctgctgcacagcagcaaccagaagaactacctggcctggtatcagcagaagcccggccagtcccccaaggtgctgatctactgggccagcaccagagaaagcggcgtgcccgatagattcaccggcagcggctctggcaccgacttcaccctgaccatcaccagcgtgaagtccgaggacctggctgtgtactactgccagcagtattacagctacccctggaccttcggcggaggcacccggctggaaatcaaaagactcgagatccagaaccctgatcctgccgtgtaccagctgcgggatagcaagagcagcgacaagagcgtgtgtctgttcaccgacttcgacagccagaccaacgtgtcccagagcaaggactccgacgtgtacatcaccgataagtgcgtgctggacatgcggagcatggacttcaagagcaactccgccgtggcctggtccaacaagtccgatttcgcctgcgccaacgccttcaacaacagcattatccccgaggacacattcttcccaagccccgagagcagcgactccaccgaccacgtgaagcccaaagagacagagaacaccaagcagcccagcaagagctgccacaagcccaaggccatcgtgcacaccgagaaagtgaacatgatgagcctgaccgtgctgggcctgcggatgctgttcgccaaaaccgtggccgtgaacttcctgctgaccgccaagctgttcttcctcctcaccgcccgcgccaagagaagcggatctggcgtgaagcagaccctgaatttcgacctgctgaagctggctggcgacgtggaatccaacccaggccctactagtatggactggatttggcgcatccttttccttgtcggcgctgctaccggcgcgcattccttcgaagaagtgcaactccagcagagcgtggccgagcttgtgaagcctggcgcttccgtgaagatgtcctgcaaggtgtccggctacaccctgacagaccacaccatccactggatgaagcagcggcctgagcagggcctggaatggatcggctacatctaccccagggacggcatcaccggctacaacgagaagttcaagggcaaggccacactgaccgccgacaccagcagcagcacagcctacatgcaactgaacagcctgaccagcgaggacagcgccgtgtacttctgtgccagatggggctacagctacagaaactacgcctactactacgactactggggccagggcacaaccctgaccgtgtctagtacgcgtgaggacctgaagaacgtgttcccacctgaggtggccgtgttcgagcctagcgaggccgagatcagccacacccagaaagccaccctcgtgtgcctggctaccggcttctaccccgaccatgtggaactgtcttggtgggtcaacggcaaagaggtgcacagcggcgtgtgtaccgacccccagccactgaaagaacagcccgccctgaacgacagccggtactgcctgagcagcagactgagagtgtccgccaccttctggcagaacccccggaaccacttcagatgccaggtgcagttctacggcctgagcgagaacgacgagtggacccaggacagagccaagcccgtgacccagatcgtgtctgccgaagcctggggcagagccgatgatgtgattaagatccactggcaggaaaagaagtccaacaccatcctgggcagccaggaaggcaacaccatgaagaccaacgacacctacatgaagttcagctggctgaccgtgcccgagaagtccctggacaaagaacacagatgcatcgtgcggcacgaaaacaacaagaacggcgtggaccaggaaatcatcttcccacccatcaagaccgatgtgattacaatggaccccaaggacaactgctccaaggacgccaacgataccctgctgctccagctgaccaacaccagcgcctactacatgtacttgttgctgctgctgaagtccgtggtgtacttcgccatcatcacatgctgcctgctgatggctatggtcaagcggaaggacagccgggga

SEQ ID NO: 6204 - DNA, 2205 bp, synthetic construct
  source 1..2205: mol_type = other DNA
atggccttaccagtgaccgccttgctcctgccgctggccttgctgctccacgccgccaggccggagatcgtgctgacacagagccctggcaccctgagcctgtctccaggcgaaagagccacactgagctgtcgggccagccagagcgtgtccagctcttacctggcctggtatcagcagaagcccggccaggctccccggctgctgatctacggaacaagcagcagagccaccggcatccccgacagattttctggcagcggctccggcaccgacttcaccctgacaatcagcagactggaacccgaggacttcgccgtgtactactgccagcagtacggcagcagccccttcacctttggcggaggcaccaaggtggaaatcaagagactcgagatccagaaccctgatcctgccgtgtaccagctgcgggatagcaagagcagcgacaagagcgtgtgtctgttcaccgacttcgacagccagaccaacgtgtcccagagcaaggactccgacgtgtacatcaccgataagtgcgtgctggacatgcggagcatggacttcaagagcaactccgccgtggcctggtccaacaagtccgatttcgcctgcgccaacgccttcaacaacagcattatccccgaggacacattcttcccaagccccgagagcagcgactccaccgaccacgtgaagcccaaagagacagagaacaccaagcagcccagcaagagctgccacaagcccaaggccatcgtgcacaccgagaaagtgaacatgatgagcctgaccgtgctgggcctgcggatgctgttcgccaaaaccgtggccgtgaacttcctgctgaccgccaagctgttcttcctcctcaccgcccgcgccaagagaagcggatctggcgtgaagcagaccctgaatttcgacctgctgaagctggctggcgacgtggaatccaacccaggccctactagtatggactggatttggcgcatccttttccttgtcggcgctgctaccggcgcgcattccttcgaacaggtgcaactccaggaatctggccccggactggctaagcccagcgagacactgagcctgacctgtaccgtgtccggcgacagcatcaccagctactactggtcctggatcagacagccccctggcaagggcctggaatggatcggctacatctactacagcggcagcaccaactacaaccccagcctgaagtccagagtgaccatcagcgtggacaccagcaagaaccagttctccctgaagctgagcagcgtgacagccgccgacaccgccgtgtattattgcgccagagatcagcggagaatcgccgctgccggcacccacttttacggcatggatgtgtggggccagggcaccaccgtgaccgtgtcatctacgcgtgaggacctgaagaacgtgttcccacctgaggtggccgtgttcgagcctagcgaggccgagatcagccacacccagaaagccaccctcgtgtgcctggctaccggcttctaccccgaccatgtggaactgtcttggtgggtcaacggcaaagaggtgcacagcggcgtgtgtaccgacccccagccactgaaagaacagcccgccctgaacgacagccggtactgcctgagcagcagactgagagtgtccgccaccttctggcagaacccccggaaccacttcagatgccaggtgcagttctacggcctgagcgagaacgacgagtggacccaggacagagccaagcccgtgacccagatcgtgtctgccgaagcctggggcagagccgatgatgtgattaagatccactggcaggaaaagaagtccaacaccatcctgggcagccaggaaggcaacaccatgaagaccaacgacacctacatgaagttcagctggctgaccgtgcccgagaagtccctggacaaagaacacagatgcatcgtgcggcacgaaaacaacaagaacggcgtggaccaggaaatcatcttcccacccatcaagaccgatgtgattacaatggaccccaaggacaactgctccaaggacgccaacgataccctgctgctccagctgaccaacaccagcgcctactacatgtacttgttgctgctgctgaagtccgtggtgtacttcgccatcatcacatgctgcctgctgatggctatggtcaagcggaaggacagccgggga

SEQ ID NO: 6205 - DNA, 2181 bp, synthetic construct
  source 1..2181: mol_type = other DNA
atggccttaccagtgaccgccttgctcctgccgctggccttgctgctccacgccgccaggccggacatcctgctgacccagagccccgtgatcctgtccgtgtctcctggcgagagagtgtccttcagctgtcgggccagccagagcatcggcaccaacatccactggtatcagcagcggaccaacggcagccccagactgctgattaagtacgccagcgagtccatcagcggcatccccagcagattttccggcagcggctccggcaccgacttcaccctgagcatcaacagcgtggaaagcgaggacattgccgactactactgccagcagaacaacaactggcccaccaccttcggagccggcaccaagctggaactgaagctcgagatccagaaccctgatcctgccgtgtaccagctgcgggatagcaagagcagcgacaagagcgtgtgtctgttcaccgacttcgacagccagaccaacgtgtcccagagcaaggactccgacgtgtacatcaccgataagtgcgtgctggacatgcggagcatggacttcaagagcaactccgccgtggcctggtccaacaagtccgatttcgcctgcgccaacgccttcaacaacagcattatccccgaggacacattcttcccaagccccgagagcagcgactccaccgaccacgtgaagcccaaagagacagagaacaccaagcagcccagcaagagctgccacaagcccaaggccatcgtgcacaccgagaaagtgaacatgatgagcctgaccgtgctgggcctgcggatgctgttcgccaaaaccgtggccgtgaacttcctgctgaccgccaagctgttcttcctcctcaccgcccgcgccaagagaagcggatctggcgtgaagcagaccctgaatttcgacctgctgaagctggctggcgacgtggaatccaacccaggccctactagtatggactggatttggcgcatccttttccttgtcggcgctgctaccggcgcgcattccttcgaacaggtgcagctgaagcagagcggacctggcctggtgcagcctagccagagcctgtccatcacctgtaccgtgtccggcttcagcctgaccaactacggcgtgcactgggtgcgccagagccctggaaaaggactggaatggctgggagtgatttggagcggcggcaacaccgactacaacacccccttcaccagcagactgtctatcaacaaggacaacagcaagagccaggtgttcttcaagatgaacagcctccagagcaacgacaccgccatctactactgtgctagagccctgacctactatgactacgagttcgcctactggggccagggcacactcgtgacagtgtctgctacgcgtgaggacctgaagaacgtgttcccacctgaggtggccgtgttcgagcctagcgaggccgagatcagccacacccagaaagccaccctcgtgtgcctggctaccggcttctaccccgaccatgtggaactgtcttggtgggtcaacggcaaagaggtgcacagcggcgtgtgtaccgacccccagccactgaaagaacagcccgccctgaacgacagccggtactgcctgagcagcagactgagagtgtccgccaccttctggcagaacccccggaaccacttcagatgccaggtgcagttctacggcctgagcgagaacgacgagtggacccaggacagagccaagcccgtgacccagatcgtgtctgccgaagcctggggcagagccgatgatgtgattaagatccactggcaggaaaagaagtccaacaccatcctgggcagccaggaaggcaacaccatgaagaccaacgacacctacatgaagttcagctggctgaccgtgcccgagaagtccctggacaaagaacacagatgcatcgtgcggcacgaaaacaacaagaacggcgtggaccaggaaatcatcttcccacccatcaagaccgatgtgattacaatggaccccaaggacaactgctccaaggacgccaacgataccctgctgctccagctgaccaacaccagcgcctactacatgtacttgttgctgctgctgaagtccgtggtgtacttcgccatcatcacatgctgcctgctgatggctatggtcaagcggaaggacagccgggga

SEQ ID NO: 6206 - DNA, 2160 bp, synthetic construct
  source 1..2160: mol_type = other DNA
atggccttaccagtgaccgccttgctcctgccgctggccttgctgctccacgccgccaggccgatgacccagagccccaagttcctgctggtgtctgccggcgacagagtgaccctgacatgcaaggccagccagagcgtgaacaacgacgtgtactggtatcagcaggaacccggccagtcccccaagctgctgatctactgggccagcaccagagaaagcggcgtgcccgatagattcaccggcagcggctctggcaccgacttcaccctgacaatcagcagcgtgcaggccgaggacctggccgtgtactactgcaagcagagctacaacctgtacaccttcggcggaggcaccaagctggaaatcaagagactcgagatccagaaccctgatcctgccgtgtaccagctgcgggatagcaagagcagcgacaagagcgtgtgtctgttcaccgacttcgacagccagaccaacgtgtcccagagcaaggactccgacgtgtacatcaccgataagtgcgtgctggacatgcggagcatggacttcaagagcaactccgccgtggcctggtccaacaagtccgatttcgcctgcgccaacgccttcaacaacagcattatccccgaggacacattcttcccaagccccgagagcagcgactccaccgaccacgtgaagcccaaagagacagagaacaccaagcagcccagcaagagctgccacaagcccaaggccatcgtgcacaccgagaaagtgaacatgatgagcctgaccgtgctgggcctgcggatgctgttcgccaaaaccgtggccgtgaacttcctgctgaccgccaagctgttcttcctcctcaccgcccgcgccaagagaagcggatctggcgtgaagcagaccctgaatttcgacctgctgaagctggctggcgacgtggaatccaacccaggccctactagtatggactggatttggcgcatccttttccttgtcggcgctgctaccggcgcgcattccttcgaagaatctggaagaggactggtgcagcctggcggcagcagaaagctgtcttgtgccgccagcggcttcaccttcagcaccagcggaatgcactgggtgcgccaggcccctgagaagggactggaatgggtggcctacatcagctccggcagcaccaccatctaccacgccgataccgtgaagggccggttcaccatcagccgggacaaccccaagaataccctgttcctccagatgaccagcctgcggagcgaggacaccgccatgtactattgctgcgccagaagcggccagttcggcaactacttcgactactggggccagggcaccaccctgaccgtgtcatctacgcgtgaggacctgaagaacgtgttcccacctgaggtggccgtgttcgagcctagcgaggccgagatcagccacacccagaaagccaccctcgtgtgcctggctaccggcttctaccccgaccatgtggaactgtcttggtgggtcaacggcaaagaggtgcacagcggcgtgtgtaccgacccccagccactgaaagaacagcccgccctgaacgacagccggtactgcctgagcagcagactgagagtgtccgccaccttctggcagaacccccggaaccacttcagatgccaggtgcagttctacggcctgagcgagaacgacgagtggacccaggacagagccaagcccgtgacccagatcgtgtctgccgaagcctggggcagagccgatgatgtgattaagatccactggcaggaaaagaagtccaacaccatcctgggcagccaggaaggcaacaccatgaagaccaacgacacctacatgaagttcagctggctgaccgtgcccgagaagtccctggacaaagaacacagatgcatcgtgcggcacgaaaacaacaagaacggcgtggaccaggaaatcatcttcccacccatcaagaccgatgtgattacaatggaccccaaggacaactgctccaaggacgccaacgataccctgctgctccagctgaccaacaccagcgcctactacatgtacttgttgctgctgctgaagtccgtggtgtacttcgccatcatcacatgctgcctgctgatggctatggtcaagcggaaggacagccgggga

SEQ ID NO: 6207 - DNA, 2175 bp, synthetic construct
  source 1..2175: mol_type = other DNA
atggccttaccagtgaccgccttgctcctgccgctggccttgctgctccacgccgccaggccgcagagcccatctagcctggctgtgtctgccggcgagaaagtgaccatgagctgcaagagcagccagagcctgctgaacagccggacccggaagaactacctggcctggtatcagcagaagcccggccagagccccaagctgctgatctactgggccagcaccagagaaagcggcgtgcccgatagattcaccggctctggcagcggcaccgacttcaccctgacaatcagcagcgtgcaggccgaggacctggccgtgtactactgcaagcagagcaacctgtacaccttcggcggaggcaccaagctggaaatcaagctcgagatccagaaccctgatcctgccgtgtaccagctgcgggatagcaagagcagcgacaagagcgtgtgtctgttcaccgacttcgacagccagaccaacgtgtcccagagcaaggactccgacgtgtacatcaccgataagtgcgtgctggacatgcggagcatggacttcaagagcaactccgccgtggcctggtccaacaagtccgatttcgcctgcgccaacgccttcaacaacagcattatccccgaggacacattcttcccaagccccgagagcagcgactccaccgaccacgtgaagcccaaagagacagagaacaccaagcagcccagcaagagctgccacaagcccaaggccatcgtgcacaccgagaaagtgaacatgatgagcctgaccgtgctgggcctgcggatgctgttcgccaaaaccgtggccgtgaacttcctgctgaccgccaagctgttcttcctcctcaccgcccgcgccaagagaagcggatctggcgtgaagcagaccctgaatttcgacctgctgaagctggctggcgacgtggaatccaacccaggccctactagtatggactggatttggcgcatccttttccttgtcggcgctgctaccggcgcgcattccttcgaacaggtgcagctggaagagtctggacccgagcttgtgaagcctggggccagcgtgaagctgtcctgtaaagccagcggctacaccttcaccgagtacatcatccactgggtcaagcagcggagcggccagggcctggaatggatcggctggttttaccctggctccggcagcatcaagtacaacgagaagttcaaggacaaggccaccctgaccgccgacaagtccagcagcaccgtgtacatggaactgagcggcctgaccagcgaggacagcgccgtgtatttctgcgccagacacgacggctacagctacttcgactattggggccagggcaccacactgaccgtgtcctctacgcgtgaggacctgaagaacgtgttcccacctgaggtggccgtgttcgagcctagcgaggccgagatcagccacacccagaaagccaccctcgtgtgcctggctaccggcttctaccccgaccatgtggaactgtcttggtgggtcaacggcaaagaggtgcacagcggcgtgtgtaccgacccccagccactgaaagaacagcccgccctgaacgacagccggtactgcctgagcagcagactgagagtgtccgccaccttctggcagaacccccggaaccacttcagatgccaggtgcagttctacggcctgagcgagaacgacgagtggacccaggacagagccaagcccgtgacccagatcgtgtctgccgaagcctggggcagagccgatgatgtgattaagatccactggcaggaaaagaagtccaacaccatcctgggcagccaggaaggcaacaccatgaagaccaacgacacctacatgaagttcagctggctgaccgtgcccgagaagtccctggacaaagaacacagatgcatcgtgcggcacgaaaacaacaagaacggcgtggaccaggaaatcatcttcccacccatcaagaccgatgtgattacaatggaccccaaggacaactgctccaaggacgccaacgataccctgctgctccagctgaccaacaccagcgcctactacatgtacttgttgctgctgctgaagtccgtggtgtacttcgccatcatcacatgctgcctgctgatggctatggtcaagcggaaggacagccgggga

SEQ ID NO: 6208 - DNA, 2184 bp, synthetic construct
  source 1..2184: mol_type = other DNA
atggccttaccagtgaccgccttgctcctgccgctggccttgctgctccacgccgccaggccggacatccagatgacccagagccccagcagcctgtctgcctctctgggcgagagagtgtccctgacctgtcgggccacacaggaactgagcggctacctgtcttggctgcagcagaagcccgacggcaccatcaagcggctgatctacgccgccagcaccctggatagcggcgtgcccaagagattcagcggcaacagaagcggcagcgactacagcctgaccatcagctccctggaaagcgaggacttcgccgactactactgcctgcagtacgccatctacccctacaccttcggcggaggcaccaagctggaaatcaagctcgagatccagaaccctgatcctgccgtgtaccagctgcgggatagcaagagcagcgacaagagcgtgtgtctgttcaccgacttcgacagccagaccaacgtgtcccagagcaaggactccgacgtgtacatcaccgataagtgcgtgctggacatgcggagcatggacttcaagagcaactccgccgtggcctggtccaacaagtccgatttcgcctgcgccaacgccttcaacaacagcattatccccgaggacacattcttcccaagccccgagagcagcgactccaccgaccacgtgaagcccaaagagacagagaacaccaagcagcccagcaagagctgccacaagcccaaggccatcgtgcacaccgagaaagtgaacatgatgagcctgaccgtgctgggcctgcggatgctgttcgccaaaaccgtggccgtgaacttcctgctgaccgccaagctgttcttcctcctcaccgcccgcgccaagagaagcggatctggcgtgaagcagaccctgaatttcgacctgctgaagctggctggcgacgtggaatccaacccaggccctactagtatggactggatttggcgcatccttttccttgtcggcgctgctaccggcgcgcattccttcgaagaggtgcaactgcagcagtctggccccgagcttgtgaagcctggcgcctccgtgaagatgagctgcaaggccagcggctacacctttaccagctacttcatccactgggtcaagcagaaacccggccagggcctggaatggatcggcttcatcaacccttacaacgacggcagcaagtacaacgagaagttcaagggcaaggccaccctgaccagcgacaagagcagcagcaccgcctacatggaactgtccagcctgacatccgaggacagcgccgtgtactactgcaccagggacgacggctactacggctacgccatggactactggggccagggaacaagcgtcaccgtgtcctctacgcgtgaggacctgaagaacgtgttcccacctgaggtggccgtgttcgagcctagcgaggccgagatcagccacacccagaaagccaccctcgtgtgcctggctaccggcttctaccccgaccatgtggaactgtcttggtgggtcaacggcaaagaggtgcacagcggcgtgtgtaccgacccccagccactgaaagaacagcccgccctgaacgacagccggtactgcctgagcagcagactgagagtgtccgccaccttctggcagaacccccggaaccacttcagatgccaggtgcagttctacggcctgagcgagaacgacgagtggacccaggacagagccaagcccgtgacccagatcgtgtctgccgaagcctggggcagagccgatgatgtgattaagatccactggcaggaaaagaagtccaacaccatcctgggcagccaggaaggcaacaccatgaagaccaacgacacctacatgaagttcagctggctgaccgtgcccgagaagtccctggacaaagaacacagatgcatcgtgcggcacgaaaacaacaagaacggcgtggaccaggaaatcatcttcccacccatcaagaccgatgtgattacaatggaccccaaggacaactgctccaaggacgccaacgataccctgctgctccagctgaccaacaccagcgcctactacatgtacttgttgctgctgctgaagtccgtggtgtacttcgccatcatcacatgctgcctgctgatggctatggtcaagcggaaggacagccgggga

SEQ ID NO: 6209 - DNA, 2199 bp, synthetic construct
  source 1..2199: mol_type = other DNA
atggccttaccagtgaccgccttgctcctgccgctggccttgctgctccacgccgccaggccggacaccatcgtgctgacacagagccctgcttccctggccgtgtccctgggacagagagccaccatctcttgcagagccagcgagagcgtggacagctacggcaacagcttcatgcactggtatcagcagaagcccggccagccccccaagctgctgatctacctggcctccaacctggaaagcggcgtgcccgccagattttctggcagcggcagcagaaccgacttcaccctgaccatcgaccccgtggaagccgatgatgccgccacctactactgccagcagaacaactacgacccctggaccttcggcggaggcaccaagctggaaatcaagctcgagatccagaaccctgatcctgccgtgtaccagctgcgggatagcaagagcagcgacaagagcgtgtgtctgttcaccgacttcgacagccagaccaacgtgtcccagagcaaggactccgacgtgtacatcaccgataagtgcgtgctggacatgcggagcatggacttcaagagcaactccgccgtggcctggtccaacaagtccgatttcgcctgcgccaacgccttcaacaacagcattatccccgaggacacattcttcccaagccccgagagcagcgactccaccgaccacgtgaagcccaaagagacagagaacaccaagcagcccagcaagagctgccacaagcccaaggccatcgtgcacaccgagaaagtgaacatgatgagcctgaccgtgctgggcctgcggatgctgttcgccaaaaccgtggccgtgaacttcctgctgaccgccaagctgttcttcctcctcaccgcccgcgccaagagaagcggatctggcgtgaagcagaccctgaatttcgacctgctgaagctggctggcgacgtggaatccaacccaggccctactagtatggactggatttggcgcatccttttccttgtcggcgctgctaccggcgcgcattccttcgaagaagtgcaactccagcagagcggccctgagcttgtgaagcctggcgcttccgtgaagatgagctgcaaggccagcggctacaccttcaccagctacgtgatgcactgggtcaagcagaaacctggacagggcctggaatggatcggctacatcaacccctacaacgacggcaccaagtacaacgagaagttcaagggcaaggccaccctgacaagcgacaccagcagcagcaccgcctacatggaactgaacagcctgaccagcgaggacagcgccgtgtacttctgcgccagacccatctacttcgacaacgactacttcgattactggggccagggcaccaccctgaaggtgtcctctacgcgtgaggacctgaagaacgtgttcccacctgaggtggccgtgttcgagcctagcgaggccgagatcagccacacccagaaagccaccctcgtgtgcctggctaccggcttctaccccgaccatgtggaactgtcttggtgggtcaacggcaaagaggtgcacagcggcgtgtgtaccgacccccagccactgaaagaacagcccgccctgaacgacagccggtactgcctgagcagcagactgagagtgtccgccaccttctggcagaacccccggaaccacttcagatgccaggtgcagttctacggcctgagcgagaacgacgagtggacccaggacagagccaagcccgtgacccagatcgtgtctgccgaagcctggggcagagccgatgatgtgattaagatccactggcaggaaaagaagtccaacaccatcctgggcagccaggaaggcaacaccatgaagaccaacgacacctacatgaagttcagctggctgaccgtgcccgagaagtccctggacaaagaacacagatgcatcgtgcggcacgaaaacaacaagaacggcgtggaccaggaaatcatcttcccacccatcaagaccgatgtgattacaatggaccccaaggacaactgctccaaggacgccaacgataccctgctgctccagctgaccaacaccagcgcctactacatgtacttgttgctgctgctgaagtccgtggtgtacttcgccatcatcacatgctgcctgctgatggctatggtcaagcggaaggacagccgggga

SEQ ID NO: 6210 - DNA, 2184 bp, synthetic construct
  source 1..2184: mol_type = other DNA
atggccttaccagtgaccgccttgctcctgccgctggccttgctgctccacgccgccaggccggacatccagatgacccagagccccagcagcctgtctgccagcgtgggcgacagagtgaccatcacatgcaaggccagccaggacgtgggaatcgccgtggcctggtatcagcagaaacccggcaaggtgcccaagctgctgatctactgggccagcaccagacacaccggcgtgcccgatagattttccggcagcggctccggcaccgacttcaccctgacaatcagctccctccagcccgaggacgtggcaacctactactgccagcagtacagcagctacccctacaccttcggccagggcaccaaggtggaaatcaagagactcgagatccagaaccctgatcctgccgtgtaccagctgcgggatagcaagagcagcgacaagagcgtgtgtctgttcaccgacttcgacagccagaccaacgtgtcccagagcaaggactccgacgtgtacatcaccgataagtgcgtgctggacatgcggagcatggacttcaagagcaactccgccgtggcctggtccaacaagtccgatttcgcctgcgccaacgccttcaacaacagcattatccccgaggacacattcttcccaagccccgagagcagcgactccaccgaccacgtgaagcccaaagagacagagaacaccaagcagcccagcaagagctgccacaagcccaaggccatcgtgcacaccgagaaagtgaacatgatgagcctgaccgtgctgggcctgcggatgctgttcgccaaaaccgtggccgtgaacttcctgctgaccgccaagctgttcttcctcctcaccgcccgcgccaagagaagcggatctggcgtgaagcagaccctgaatttcgacctgctgaagctggctggcgacgtggaatccaacccaggccctactagtatggactggatttggcgcatccttttccttgtcggcgctgctaccggcgcgcattccttcgaagaagtgcaactggtggaatcaggcggcggactggtgcagcctggcggatctctgagactgagctgtgccgccagcggcttcgacttcagccggtactggatgagctgggtgcgccaggcccctggcaaaggactggaatggatcggcgagatcaaccccgacagcagcaccatcaactacgcccccagcctgaaggacaagttcatcatcagccgggacaacgccaagaacagcctgtacctccagatgaactccctgcgggccgaggacaccgccgtgtactattgcgccagacccgacggcaactactggtacttcgacgtgtggggccagggaaccctcgtgaccgtgtcatctacgcgtgaggacctgaagaacgtgttcccacctgaggtggccgtgttcgagcctagcgaggccgagatcagccacacccagaaagccaccctcgtgtgcctggctaccggcttctaccccgaccatgtggaactgtcttggtgggtcaacggcaaagaggtgcacagcggcgtgtgtaccgacccccagccactgaaagaacagcccgccctgaacgacagccggtactgcctgagcagcagactgagagtgtccgccaccttctggcagaacccccggaaccacttcagatgccaggtgcagttctacggcctgagcgagaacgacgagtggacccaggacagagccaagcccgtgacccagatcgtgtctgccgaagcctggggcagagccgatgatgtgattaagatccactggcaggaaaagaagtccaacaccatcctgggcagccaggaaggcaacaccatgaagaccaacgacacctacatgaagttcagctggctgaccgtgcccgagaagtccctggacaaagaacacagatgcatcgtgcggcacgaaaacaacaagaacggcgtggaccaggaaatcatcttcccacccatcaagaccgatgtgattacaatggaccccaaggacaactgctccaaggacgccaacgataccctgctgctccagctgaccaacaccagcgcctactacatgtacttgttgctgctgctgaagtccgtggtgtacttcgccatcatcacatgctgcctgctgatggctatggtcaagcggaaggacagccgggga

SEQ ID NO: 6211 - DNA, 2184 bp, synthetic construct
  source 1..2184: mol_type = other DNA
atggccttaccagtgaccgccttgctcctgccgctggccttgctgctccacgccgccaggccggacatcgtgatgacccagagccagaagagcatgagcaccagcgtgggcgacagagtgagcatcacctgcaaggccagccaggacgtgatcaccggcgtggcctggtaccagcagaagcccggccagagccccaagctgctgatctacagcgccagctacagatacaccggcgtgcccgacagattcaccggcagcggcagcggcaccgacttcaccttcaccatcagcaacgtgcaggccgaggacctggccgtgtactactgccagcagcactacagcacccccctgaccttcggcgccggcaccaagctggagctgaagctcgagatccagaaccctgatcctgccgtgtaccagctgcgggatagcaagagcagcgacaagagcgtgtgtctgttcaccgacttcgacagccagaccaacgtgtcccagagcaaggactccgacgtgtacatcaccgataagtgcgtgctggacatgcggagcatggacttcaagagcaactccgccgtggcctggtccaacaagtccgatttcgcctgcgccaacgccttcaacaacagcattatccccgaggacacattcttcccaagccccgagagcagcgactccaccgaccacgtgaagcccaaagagacagagaacaccaagcagcccagcaagagctgccacaagcccaaggccatcgtgcacaccgagaaagtgaacatgatgagcctgaccgtgctgggcctgcggatgctgttcgccaaaaccgtggccgtgaacttcctgctgaccgccaagctgttcttcctcctcaccgcccgcgccaagagaagcggatctggcgtgaagcagaccctgaatttcgacctgctgaagctggctggcgacgtggaatccaacccaggccctactagtatggactggatttggcgcatccttttccttgtcggcgctgctaccggcgcgcattccttcgaacaggtgcagctgcagcagcccggcgccgagctggtgagacccggcgccagcgtgaagctgagctgcaaggccagcggctacagcttcaccacctactggatgaactgggtgaagcagagacccggccagggcctggagtggatcggcatgatccaccccagcgacagcgagaccagactgaaccagaagttcaaggacaaggccaccctgaccgtggacaagagcagcagcaccgcctacatgcagctgagcagccccaccagcgaggacagcgccgtgtactactgcgccagaagcaccatgatcgccaccagagccatggactactggggccagggcaccagcgtgaccgtgagcagcacgcgtgaggacctgaagaacgtgttcccacctgaggtggccgtgttcgagcctagcgaggccgagatcagccacacccagaaagccaccctcgtgtgcctggctaccggcttctaccccgaccatgtggaactgtcttggtgggtcaacggcaaagaggtgcacagcggcgtgtgtaccgacccccagccactgaaagaacagcccgccctgaacgacagccggtactgcctgagcagcagactgagagtgtccgccaccttctggcagaacccccggaaccacttcagatgccaggtgcagttctacggcctgagcgagaacgacgagtggacccaggacagagccaagcccgtgacccagatcgtgtctgccgaagcctggggcagagccgatgatgtgattaagatccactggcaggaaaagaagtccaacaccatcctgggcagccaggaaggcaacaccatgaagaccaacgacacctacatgaagttcagctggctgaccgtgcccgagaagtccctggacaaagaacacagatgcatcgtgcggcacgaaaacaacaagaacggcgtggaccaggaaatcatcttcccacccatcaagaccgatgtgattacaatggaccccaaggacaactgctccaaggacgccaacgataccctgctgctccagctgaccaacaccagcgcctactacatgtacttgttgctgctgctgaagtccgtggtgtacttcgccatcatcacatgctgcctgctgatggctatggtcaagcggaaggacagccgggga

SEQ ID NO: 6212 - DNA, 2202 bp, synthetic construct
  source 1..2202: mol_type = other DNA
atggccttaccagtgaccgccttgctcctgccgctggccttgctgctccacgccgccaggccgcagagcgtgctgacacagcctccatccgtgtctggcgctccaggccagagagtgaccatctcctgtaccggcagcggcagcaacatcggagccccctacgacgtgtcctggtatcagcaactgcctggcaccgcccccaagctgctgatctaccacaacaacaagcggcccagcggcgtgcccgatagattcagcggctctaagagcggcaccagcgccagcctggctatcactggactccaggccgaggacgaggccgactactactgtgccacagtggaagccggcctgagcggctctgtgtttggcggcggaacaaagctgaccgtgctgggagctctcgagatccagaaccctgatcctgccgtgtaccagctgcgggatagcaagagcagcgacaagagcgtgtgtctgttcaccgacttcgacagccagaccaacgtgtcccagagcaaggactccgacgtgtacatcaccgataagtgcgtgctggacatgcggagcatggacttcaagagcaactccgccgtggcctggtccaacaagtccgatttcgcctgcgccaacgccttcaacaacagcattatccccgaggacacattcttcccaagccccgagagcagcgactccaccgaccacgtgaagcccaaagagacagagaacaccaagcagcccagcaagagctgccacaagcccaaggccatcgtgcacaccgagaaagtgaacatgatgagcctgaccgtgctgggcctgcggatgctgttcgccaaaaccgtggccgtgaacttcctgctgaccgccaagctgttcttcctcctcaccgcccgcgccaagagaagcggatctggcgtgaagcagaccctgaatttcgacctgctgaagctggctggcgacgtggaatccaacccaggccctactagtatggactggatttggcgcatccttttccttgtcggcgctgctaccggcgcgcattccttcgaacaggtgcaactggtgcagagcggagccgaagtgaagaaacctggggccagcgtgaaggtgtcctgcaaggtgtccggctacaccctgaccgagctgagcattcactgggtgcgccaggcccctggcaagggactggaatggatgggcggcttcgaccccgaagagaacgagatcgtgtacgcccagcggttccagggcagagtgacaatgaccgaggacaccagcaccgacaccgcctacatggaactgagcagcctgcggagcgaggataccgccgtgtactactgcgccatcgtgggcagcttcagccctctgacactgggcctgtggggccagggaactatggtcaccgtgtccagcacgcgtgaggacctgaagaacgtgttcccacctgaggtggccgtgttcgagcctagcgaggccgagatcagccacacccagaaagccaccctcgtgtgcctggctaccggcttctaccccgaccatgtggaactgtcttggtgggtcaacggcaaagaggtgcacagcggcgtgtgtaccgacccccagccactgaaagaacagcccgccctgaacgacagccggtactgcctgagcagcagactgagagtgtccgccaccttctggcagaacccccggaaccacttcagatgccaggtgcagttctacggcctgagcgagaacgacgagtggacccaggacagagccaagcccgtgacccagatcgtgtctgccgaagcctggggcagagccgatgatgtgattaagatccactggcaggaaaagaagtccaacaccatcctgggcagccaggaaggcaacaccatgaagaccaacgacacctacatgaagttcagctggctgaccgtgcccgagaagtccctggacaaagaacacagatgcatcgtgcggcacgaaaacaacaagaacggcgtggaccaggaaatcatcttcccacccatcaagaccgatgtgattacaatggaccccaaggacaactgctccaaggacgccaacgataccctgctgctccagctgaccaacaccagcgcctactacatgtacttgttgctgctgctgaagtccgtggtgtacttcgccatcatcacatgctgcctgctgatggctatggtcaagcggaaggacagccgggga

SEQ ID NO: 6213 - DNA, 2202 bp, synthetic construct
  source 1..2202: mol_type = other DNA
atggccttaccagtgaccgccttgctcctgccgctggccttgctgctccacgccgccaggccgcagagcgtgctgacacagcctccatccgtgtctggcgctccaggccagagagtgaccatctcctgtaccggcagcggcagcaacatcggagccccctacgacgtgtcctggtatcagcaactgcctggcaccgcccccaagctgctgatctaccacaacaacaagcggcccagcggcgtgcccgatagattcagcggctctaagagcggcaccagcgccagcctggctatcactggactccaggccgaggacgaggccgactactactgccagagctacgacagcagcagcatcagcaccatcttcggcggaggcaccaagctgacagtgctgggagctctcgagatccagaaccctgatcctgccgtgtaccagctgcgggatagcaagagcagcgacaagagcgtgtgtctgttcaccgacttcgacagccagaccaacgtgtcccagagcaaggactccgacgtgtacatcaccgataagtgcgtgctggacatgcggagcatggacttcaagagcaactccgccgtggcctggtccaacaagtccgatttcgcctgcgccaacgccttcaacaacagcattatccccgaggacacattcttcccaagccccgagagcagcgactccaccgaccacgtgaagcccaaagagacagagaacaccaagcagcccagcaagagctgccacaagcccaaggccatcgtgcacaccgagaaagtgaacatgatgagcctgaccgtgctgggcctgcggatgctgttcgccaaaaccgtggccgtgaacttcctgctgaccgccaagctgttcttcctcctcaccgcccgcgccaagagaagcggatctggcgtgaagcagaccctgaatttcgacctgctgaagctggctggcgacgtggaatccaacccaggccctactagtatggactggatttggcgcatccttttccttgtcggcgctgctaccggcgcgcattccttcgaacaggtgcaactggtgcagagcggagccgaagtgaagaaacctggggccagcgtgaaggtgtcctgcaaggtgtccggctacaccctgaccgagctgagcattcactgggtgcgccaggcccctggcaagggactggaatggatgggcggcttcgaccccgaagagaacgagatcgtgtacgcccagcggttccagggcagagtgacaatgaccgaggacaccagcaccgacaccgcctacatggaactgagcagcctgcggagcgaggataccgccgtgtactactgtgccatcgtgggcagcttcagcggaatcgcctacagaccttggggccagggcacaatggtcaccgtgtctagcacgcgtgaggacctgaagaacgtgttcccacctgaggtggccgtgttcgagcctagcgaggccgagatcagccacacccagaaagccaccctcgtgtgcctggctaccggcttctaccccgaccatgtggaactgtcttggtgggtcaacggcaaagaggtgcacagcggcgtgtgtaccgacccccagccactgaaagaacagcccgccctgaacgacagccggtactgcctgagcagcagactgagagtgtccgccaccttctggcagaacccccggaaccacttcagatgccaggtgcagttctacggcctgagcgagaacgacgagtggacccaggacagagccaagcccgtgacccagatcgtgtctgccgaagcctggggcagagccgatgatgtgattaagatccactggcaggaaaagaagtccaacaccatcctgggcagccaggaaggcaacaccatgaagaccaacgacacctacatgaagttcagctggctgaccgtgcccgagaagtccctggacaaagaacacagatgcatcgtgcggcacgaaaacaacaagaacggcgtggaccaggaaatcatcttcccacccatcaagaccgatgtgattacaatggaccccaaggacaactgctccaaggacgccaacgataccctgctgctccagctgaccaacaccagcgcctactacatgtacttgttgctgctgctgaagtccgtggtgtacttcgccatcatcacatgctgcctgctgatggctatggtcaagcggaaggacagccgggga

SEQ ID NO: 6214 - DNA, 2166 bp, synthetic construct
  source 1..2166: mol_type = other DNA
atggccttaccagtgaccgccttgctcctgccgctggccttgctgctccacgccgccaggccggacatccagatgacccagagccccagcagcctgtctgccagcgtgggcgacagagtgaccatcacctgtagagccagccagggcatcagaaacaacctggcctggtatcagcagaagcccggcaaggcccccaagcggctgatctacgccgccagcaatctccagagcggcgtgcccagcagattcacaggctctggcagcggcaccgagttcaccctgatcgtgtctagcctccagcccgaggacttcgccacctactactgcctccagcaccacagctaccccctgacatctggcggaggcaccaaggtggaactcgagatccagaaccctgatcctgccgtgtaccagctgcgggatagcaagagcagcgacaagagcgtgtgtctgttcaccgacttcgacagccagaccaacgtgtcccagagcaaggactccgacgtgtacatcaccgataagtgcgtgctggacatgcggagcatggacttcaagagcaactccgccgtggcctggtccaacaagtccgatttcgcctgcgccaacgccttcaacaacagcattatccccgaggacacattcttcccaagccccgagagcagcgactccaccgaccacgtgaagcccaaagagacagagaacaccaagcagcccagcaagagctgccacaagcccaaggccatcgtgcacaccgagaaagtgaacatgatgagcctgaccgtgctgggcctgcggatgctgttcgccaaaaccgtggccgtgaacttcctgctgaccgccaagctgttcttcctcctcaccgcccgcgccaagagaagcggatctggcgtgaagcagaccctgaatttcgacctgctgaagctggctggcgacgtggaatccaacccaggccctactagtatggactggatttggcgcatccttttccttgtcggcgctgctaccggcgcgcattccttcgaagaggtgcaggtgctggaaagtggcggaggactggtgcagcctggcggctctctgagactgtcttgtgccgccagcggcttcaccttcagcagctacgccatgagctgggtgcgccaggcccctggaaaaggactggaatgggtgtccgccatcagcggctctggcgggtctaccaactacgccgatagcgtgaagggccggttcaccatcagccgggacaacagcaagaacaccctgtacctccagatgaacagcctgcgggccgaggacaccgccgtgtattattgtgccggcagcagcgggtggagcgagtattggggacagggcaccctcgtgaccgtgtcctctacgcgtgaggacctgaagaacgtgttcccacctgaggtggccgtgttcgagcctagcgaggccgagatcagccacacccagaaagccaccctcgtgtgcctggctaccggcttctaccccgaccatgtggaactgtcttggtgggtcaacggcaaagaggtgcacagcggcgtgtgtaccgacccccagccactgaaagaacagcccgccctgaacgacagccggtactgcctgagcagcagactgagagtgtccgccaccttctggcagaacccccggaaccacttcagatgccaggtgcagttctacggcctgagcgagaacgacgagtggacccaggacagagccaagcccgtgacccagatcgtgtctgccgaagcctggggcagagccgatgatgtgattaagatccactggcaggaaaagaagtccaacaccatcctgggcagccaggaaggcaacaccatgaagaccaacgacacctacatgaagttcagctggctgaccgtgcccgagaagtccctggacaaagaacacagatgcatcgtgcggcacgaaaacaacaagaacggcgtggaccaggaaatcatcttcccacccatcaagaccgatgtgattacaatggaccccaaggacaactgctccaaggacgccaacgataccctgctgctccagctgaccaacaccagcgcctactacatgtacttgttgctgctgctgaagtccgtggtgtacttcgccatcatcacatgctgcctgctgatggctatggtcaagcggaaggacagccgggga

SEQ ID NO: 6215 - DNA, 2184 bp, synthetic construct
  source 1..2184: mol_type = other DNA
atggccttaccagtgaccgccttgctcctgccgctggccttgctgctccacgccgccaggccggacgagatccagctggtgcagagcggagccgaagtgaagaagcctggcgagagcctgcggatcagctgcaagggcagcggcttcaacatcgaggactactacatccactgggtgcgccagatgcccggcaagggcctggaatggatgggcagaatcgaccccgagaacgacgagactaagtacggccccatcttccagggccacgtgaccatcagcgccgacaccagcatcaacaccgtgtacctccagtggtccagcctgaaggccagcgacaccgccatgtactactgcgcctttagaggcggcgtgtactggggccagggcaccacagtgacagtgtctagcctcgagatccagaaccctgatcctgccgtgtaccagctgcgggatagcaagagcagcgacaagagcgtgtgtctgttcaccgacttcgacagccagaccaacgtgtcccagagcaaggactccgacgtgtacatcaccgataagtgcgtgctggacatgcggagcatggacttcaagagcaactccgccgtggcctggtccaacaagtccgatttcgcctgcgccaacgccttcaacaacagcattatccccgaggacacattcttcccaagccccgagagcagcgactccaccgaccacgtgaagcccaaagagacagagaacaccaagcagcccagcaagagctgccacaagcccaaggccatcgtgcacaccgagaaagtgaacatgatgagcctgaccgtgctgggcctgcggatgctgttcgccaaaaccgtggccgtgaacttcctgctgaccgccaagctgttcttcctcctcaccgcccgcgccaagagaagcggatctggcgtgaagcagaccctgaatttcgacctgctgaagctggctggcgacgtggaatccaacccaggccctactagtatggactggatttggcgcatccttttccttgtcggcgctgctaccggcgcgcattccttcgaagatgtcgtgatgacccagagccccgacagcctggctgtgtctctgggagagagagccaccatcaactgcaagtccagccagtccctgctggacagcgacggcaagacctacctgaactggctccagcagaagcccggccagccccccaagagactgatctccctggtgtccaagctggactccggcgtgcccgatagattttccggctctggcagcggcaccgacttcaccctgacaatcagctcccttcaggccgaggacgtggccgtgtactattgctggcagggcacacacttccccggcacctttggcggaggcaccaaggtggaaatcaagacgcgtgaggacctgaagaacgtgttcccacctgaggtggccgtgttcgagcctagcgaggccgagatcagccacacccagaaagccaccctcgtgtgcctggctaccggcttctaccccgaccatgtggaactgtcttggtgggtcaacggcaaagaggtgcacagcggcgtgtgtaccgacccccagccactgaaagaacagcccgccctgaacgacagccggtactgcctgagcagcagactgagagtgtccgccaccttctggcagaacccccggaaccacttcagatgccaggtgcagttctacggcctgagcgagaacgacgagtggacccaggacagagccaagcccgtgacccagatcgtgtctgccgaagcctggggcagagccgatgatgtgattaagatccactggcaggaaaagaagtccaacaccatcctgggcagccaggaaggcaacaccatgaagaccaacgacacctacatgaagttcagctggctgaccgtgcccgagaagtccctggacaaagaacacagatgcatcgtgcggcacgaaaacaacaagaacggcgtggaccaggaaatcatcttcccacccatcaagaccgatgtgattacaatggaccccaaggacaactgctccaaggacgccaacgataccctgctgctccagctgaccaacaccagcgcctactacatgtacttgttgctgctgctgaagtccgtggtgtacttcgccatcatcacatgctgcctgctgatggctatggtcaagcggaaggacagccgggga

SEQ ID NO: 6216 - DNA, 2205 bp, synthetic construct
  source 1..2205: mol_type = other DNA
atggccttaccagtgaccgccttgctcctgccgctggccttgctgctccacgccgccaggccggacgagcttgtgatgacccagagccccagcagcctgacagtgacagccggcgagaaagtgaccatgagctgcaagagcagccagagcctgctgaacagcggcaaccagaagaactacctgacctggtatcagcagaagcccggccagccccccaagctgctgatctactgggccagcaccagagaaagcggcgtgcccgatagattcaccggctctggcagcggcaccgacttcaccctgacaatcagcagcgtgcaggccgaggacctggccgtgtactactgccagaacgactacagctaccccctgaccttcggagccggcaccaagctggaaatcaagctcgagatccagaaccctgatcctgccgtgtaccagctgcgggatagcaagagcagcgacaagagcgtgtgtctgttcaccgacttcgacagccagaccaacgtgtcccagagcaaggactccgacgtgtacatcaccgataagtgcgtgctggacatgcggagcatggacttcaagagcaactccgccgtggcctggtccaacaagtccgatttcgcctgcgccaacgccttcaacaacagcattatccccgaggacacattcttcccaagccccgagagcagcgactccaccgaccacgtgaagcccaaagagacagagaacaccaagcagcccagcaagagctgccacaagcccaaggccatcgtgcacaccgagaaagtgaacatgatgagcctgaccgtgctgggcctgcggatgctgttcgccaaaaccgtggccgtgaacttcctgctgaccgccaagctgttcttcctcctcaccgcccgcgccaagagaagcggatctggcgtgaagcagaccctgaatttcgacctgctgaagctggctggcgacgtggaatccaacccaggccctactagtatggactggatttggcgcatccttttccttgtcggcgctgctaccggcgcgcattccttcgaagaagtgcagctgctggaacagtctggcgccgaacttgtgcggcctggcaccagcgtgaagatcagctgtaaagccagcggctacgccttcaccaactactggctgggctgggtcaagcagaggcctggacacggcctggaatggatcggcgacatctttcccggctccggcaacatccactacaacgagaagttcaagggcaaggccaccctgaccgccgacaagtctagcagcaccgcctacatgcagctgtccagcctgacctttgaggacagcgccgtgtatttctgtgcccggctgcggaactgggacgagcccatggattattggggccagggcaccaccgtgaccgtgtctagtacgcgtgaggacctgaagaacgtgttcccacctgaggtggccgtgttcgagcctagcgaggccgagatcagccacacccagaaagccaccctcgtgtgcctggctaccggcttctaccccgaccatgtggaactgtcttggtgggtcaacggcaaagaggtgcacagcggcgtgtgtaccgacccccagccactgaaagaacagcccgccctgaacgacagccggtactgcctgagcagcagactgagagtgtccgccaccttctggcagaacccccggaaccacttcagatgccaggtgcagttctacggcctgagcgagaacgacgagtggacccaggacagagccaagcccgtgacccagatcgtgtctgccgaagcctggggcagagccgatgatgtgattaagatccactggcaggaaaagaagtccaacaccatcctgggcagccaggaaggcaacaccatgaagaccaacgacacctacatgaagttcagctggctgaccgtgcccgagaagtccctggacaaagaacacagatgcatcgtgcggcacgaaaacaacaagaacggcgtggaccaggaaatcatcttcccacccatcaagaccgatgtgattacaatggaccccaaggacaactgctccaaggacgccaacgataccctgctgctccagctgaccaacaccagcgcctactacatgtacttgttgctgctgctgaagtccgtggtgtacttcgccatcatcacatgctgcctgctgatggctatggtcaagcggaaggacagccgggga

SEQ ID NO: 6217 - DNA, 2208 bp, synthetic construct
  source 1..2208: mol_type = other DNA
atggccttaccagtgaccgccttgctcctgccgctggccttgctgctccacgccgccaggccggacgagctgcagatgacccagagccctagcagcctgtctgccagcgtgggcgacagagtgaccatcacctgtagagccagccagagcatcagcagctacctgaactggtatcagcagaagcccggccagccccccaaactgctgatctactgggccagcaccagagaaagcggcgtgcccgatagattcagcggcagcgagagcggcaccaactacaccctgaccatcagctccctgcagcccgaggacttcgccacctacttttgccagcagagcgacagcctgcccatcacctttggacagggcacccggctggacattcagctcgagatccagaaccctgatcctgccgtgtaccagctgcgggatagcaagagcagcgacaagagcgtgtgtctgttcaccgacttcgacagccagaccaacgtgtcccagagcaaggactccgacgtgtacatcaccgataagtgcgtgctggacatgcggagcatggacttcaagagcaactccgccgtggcctggtccaacaagtccgatttcgcctgcgccaacgccttcaacaacagcattatccccgaggacacattcttcccaagccccgagagcagcgactccaccgaccacgtgaagcccaaagagacagagaacaccaagcagcccagcaagagctgccacaagcccaaggccatcgtgcacaccgagaaagtgaacatgatgagcctgaccgtgctgggcctgcggatgctgttcgccaaaaccgtggccgtgaacttcctgctgaccgccaagctgttcttcctcctcaccgcccgcgccaagagaagcggatctggcgtgaagcagaccctgaatttcgacctgctgaagctggctggcgacgtggaatccaacccaggccctactagtatggactggatttggcgcatccttttccttgtcggcgctgctaccggcgcgcattccttcgaagaggtgcaactgctggaatctgggggcggagtggtgcagcctggcagaagcctgagactgagctgtgccgccagcggcttcaccttcagctcctacggaatgcactgggtgcgccaggcccctggcaaaggactggaatgggtggccgtgatctcctacgacggcagcaacaagtactacgccgacagcgtgaagggccggttcaccatcagccgggacaacagcaagaacaccctgtacctgcagatgaacagcctgcgggccgaggacaccgccgtgtactactgcgccaaggatatgggctggggcagcggctggcggccttactactactacggcatggacgtgtggggccagggcaccaccgtgacagtgtcatctacgcgtgaggacctgaagaacgtgttcccacctgaggtggccgtgttcgagcctagcgaggccgagatcagccacacccagaaagccaccctcgtgtgcctggctaccggcttctaccccgaccatgtggaactgtcttggtgggtcaacggcaaagaggtgcacagcggcgtgtgtaccgacccccagccactgaaagaacagcccgccctgaacgacagccggtactgcctgagcagcagactgagagtgtccgccaccttctggcagaacccccggaaccacttcagatgccaggtgcagttctacggcctgagcgagaacgacgagtggacccaggacagagccaagcccgtgacccagatcgtgtctgccgaagcctggggcagagccgatgatgtgattaagatccactggcaggaaaagaagtccaacaccatcctgggcagccaggaaggcaacaccatgaagaccaacgacacctacatgaagttcagctggctgaccgtgcccgagaagtccctggacaaagaacacagatgcatcgtgcggcacgaaaacaacaagaacggcgtggaccaggaaatcatcttcccacccatcaagaccgatgtgattacaatggaccccaaggacaactgctccaaggacgccaacgataccctgctgctccagctgaccaacaccagcgcctactacatgtacttgttgctgctgctgaagtccgtggtgtacttcgccatcatcacatgctgcctgctgatggctatggtcaagcggaaggacagccgggga

SEQ ID NO: 6218 - DNA, 2199 bp, synthetic construct
  source 1..2199: mol_type = other DNA
atggccttaccagtgaccgccttgctcctgccgctggccttgctgctccacgccgccaggccggacgacatccaaatgacacagagtccttctagtttgagtgcgagcgtgggggacagggtgaccattacctgcagggccagccagagcataagctcataccttaattggtaccagcaaaaaccaggtaaggcccctaagctcctgatctacgcggcctcttcacttcaatctggggtcccttcccgcttcagtggctccggcagcggcaccgacttcacgctcactatatcaagtctgcagcctgaggatctcgccacctattactgtcaacaaagttattccacccctttcacctttggaccgggcacgaaagtggatattaagctcgagatccagaaccctgatcctgccgtgtaccagctgcgggatagcaagagcagcgacaagagcgtgtgtctgttcaccgacttcgacagccagaccaacgtgtcccagagcaaggactccgacgtgtacatcaccgataagtgcgtgctggacatgcggagcatggacttcaagagcaactccgccgtggcctggtccaacaagtccgatttcgcctgcgccaacgccttcaacaacagcattatccccgaggacacattcttcccaagccccgagagcagcgactccaccgaccacgtgaagcccaaagagacagagaacaccaagcagcccagcaagagctgccacaagcccaaggccatcgtgcacaccgagaaagtgaacatgatgagcctgaccgtgctgggcctgcggatgctgttcgccaaaaccgtggccgtgaacttcctgctgaccgccaagctgttcttcctcctcaccgcccgcgccaagagaagcggatctggcgtgaagcagaccctgaatttcgacctgctgaagctggctggcgacgtggaatccaacccaggccctactagtatggactggatttggcgcatccttttccttgtcggcgctgctaccggcgcgcattccttcgaagtgcacgaggtccagcttgtgcagtccggggcagaggtcaagaagcctggttctagcgtaaaagtgagttgcaaagcctcaggtgggacattttcatcctacgcgatcagttgggttagacaggctcctggtcaagggctggaatggatgggcggaattattccaatcttcggaacagcgaattacgcgcagaagttccagggtagagtaaccatcactgctgacaagtccacctccaccgcatacatggaattgtctagtctccggagcgaggatacggcggtgtattattgtgctacgttcgccctgtttggcttccgcgaacaggctttcgacatctgggggcagggcacgacagtcacggttagtagtacgcgtgaggacctgaagaacgtgttcccacctgaggtggccgtgttcgagcctagcgaggccgagatcagccacacccagaaagccaccctcgtgtgcctggctaccggcttctaccccgaccatgtggaactgtcttggtgggtcaacggcaaagaggtgcacagcggcgtgtgtaccgacccccagccactgaaagaacagcccgccctgaacgacagccggtactgcctgagcagcagactgagagtgtccgccaccttctggcagaacccccggaaccacttcagatgccaggtgcagttctacggcctgagcgagaacgacgagtggacccaggacagagccaagcccgtgacccagatcgtgtctgccgaagcctggggcagagccgatgatgtgattaagatccactggcaggaaaagaagtccaacaccatcctgggcagccaggaaggcaacaccatgaagaccaacgacacctacatgaagttcagctggctgaccgtgcccgagaagtccctggacaaagaacacagatgcatcgtgcggcacgaaaacaacaagaacggcgtggaccaggaaatcatcttcccacccatcaagaccgatgtgattacaatggaccccaaggacaactgctccaaggacgccaacgataccctgctgctccagctgaccaacaccagcgcctactacatgtacttgttgctgctgctgaagtccgtggtgtacttcgccatcatcacatgctgcctgctgatggctatggtcaagcggaaggacagccgggga

SEQ ID NO: 6219 - DNA, 2193 bp, synthetic construct
  source 1..2193: mol_type = other DNA
atggccttaccagtgaccgccttgctcctgccgctggccttgctgctccacgccgccaggccggacatcgtgctgacccagagccctctgagcctggccgtgtctctgggacagcctgccatcatcagctgcaaggccagccagagcgtgtcctttgccggcacctctctgatgcactggtatcaccagaagcccggccagcagcccagactgctgatctacagagccagcaacctggaagccggcgtgcccgatagattttccggcagcggcagcaagaccgacttcaccctgaccatcagccccgtggaagccgaagatgccgccacctactactgccagcagagcagagagtacccctacaccttcggcggaggcaccaagctggaaatcaagaggctcgagatccagaaccctgatcctgccgtgtaccagctgcgggatagcaagagcagcgacaagagcgtgtgtctgttcaccgacttcgacagccagaccaacgtgtcccagagcaaggactccgacgtgtacatcaccgataagtgcgtgctggacatgcggagcatggacttcaagagcaactccgccgtggcctggtccaacaagtccgatttcgcctgcgccaacgccttcaacaacagcattatccccgaggacacattcttcccaagccccgagagcagcgactccaccgaccacgtgaagcccaaagagacagagaacaccaagcagcccagcaagagctgccacaagcccaaggccatcgtgcacaccgagaaagtgaacatgatgagcctgaccgtgctgggcctgcggatgctgttcgccaaaaccgtggccgtgaacttcctgctgaccgccaagctgttcttcctcctcaccgcccgcgccaagagaagcggatctggcgtgaagcagaccctgaatttcgacctgctgaagctggctggcgacgtggaatccaacccaggccctactagtatggactggatttggcgcatccttttccttgtcggcgctgctaccggcgcgcattccttcgaacaggtccaactggtgcagagcggagccgaggtcgtgaagcctggcgcttccgtgaagattagctgcaaagccagcggctacacctttaccggctactttatgaactgggtcaagcagagccctggccagagcctggaatggatcggcagaatccacccctacgacggcgacaccttctacaaccagaagttccagggcaaggccaccctgacagtggacaagagcagcaacaccgcccacatggaactgctgagcctgaccagcgaggacttcgccgtgtactactgcaccagatacgacggcagccgggctatggactattggggccagggcaccaccgtgaccgtgtctagtacgcgtgaggacctgaagaacgtgttcccacctgaggtggccgtgttcgagcctagcgaggccgagatcagccacacccagaaagccaccctcgtgtgcctggctaccggcttctaccccgaccatgtggaactgtcttggtgggtcaacggcaaagaggtgcacagcggcgtgtgtaccgacccccagccactgaaagaacagcccgccctgaacgacagccggtactgcctgagcagcagactgagagtgtccgccaccttctggcagaacccccggaaccacttcagatgccaggtgcagttctacggcctgagcgagaacgacgagtggacccaggacagagccaagcccgtgacccagatcgtgtctgccgaagcctggggcagagccgatgatgtgattaagatccactggcaggaaaagaagtccaacaccatcctgggcagccaggaaggcaacaccatgaagaccaacgacacctacatgaagttcagctggctgaccgtgcccgagaagtccctggacaaagaacacagatgcatcgtgcggcacgaaaacaacaagaacggcgtggaccaggaaatcatcttcccacccatcaagaccgatgtgattacaatggaccccaaggacaactgctccaaggacgccaacgataccctgctgctccagctgaccaacaccagcgcctactacatgtacttgttgctgctgctgaagtccgtggtgtacttcgccatcatcacatgctgcctgctgatggctatggtcaagcggaaggacagccgggga

SEQ ID NO: 6220 - DNA, 2184 bp, synthetic construct
  source 1..2184: mol_type = other DNA
atggccttaccagtgaccgccttgctcctgccgctggccttgctgctccacgccgccaggccggacgacgttgtgatgacccagacccccctgagcctgcctgtgacacctggcgaacctgccagcatcagctgtcggagcagccagagcctggtgcacagaaacggcaacacctacctgcactggtatctccagaagcccggccagagccccaagctgctgatccacaaggtgtccaacagattcagcggcgtgcccgacagattctccggcagcggctctggcaccgacttcaccctgaagatcagccgggtggaagccgaggacctgggcgtgtacttctgtagccagagcacccatgtgccccccctgacatttggagccggcaccaagctggaactgaagctcgagatccagaaccctgatcctgccgtgtaccagctgcgggatagcaagagcagcgacaagagcgtgtgtctgttcaccgacttcgacagccagaccaacgtgtcccagagcaaggactccgacgtgtacatcaccgataagtgcgtgctggacatgcggagcatggacttcaagagcaactccgccgtggcctggtccaacaagtccgatttcgcctgcgccaacgccttcaacaacagcattatccccgaggacacattcttcccaagccccgagagcagcgactccaccgaccacgtgaagcccaaagagacagagaacaccaagcagcccagcaagagctgccacaagcccaaggccatcgtgcacaccgagaaagtgaacatgatgagcctgaccgtgctgggcctgcggatgctgttcgccaaaaccgtggccgtgaacttcctgctgaccgccaagctgttcttcctcctcaccgcccgcgccaagagaagcggatctggcgtgaagcagaccctgaatttcgacctgctgaagctggctggcgacgtggaatccaacccaggccctactagtatggactggatttggcgcatccttttccttgtcggcgctgctaccggcgcgcattccttcgaagaagtgcagctggtgcagtctggcgctgaggtggaaaagcctggggccagcgtgaagattagctgcaaggccagcggcagcagcttcaccggctacaacatgaactgggtgcgccagaacatcggcaagagcctggaatggatcggagccatcgacccctactacggcggcaccagctacaaccagaagttcaagggcagagccaccctgaccgtggacaagagcaccagcaccgcctacatgcacctgaagtccctgcggagcgaggacaccgccgtgtactactgtgtgtccggcatggaatattggggccagggcaccagcgtgaccgtgtctagtacgcgtgaggacctgaagaacgtgttcccacctgaggtggccgtgttcgagcctagcgaggccgagatcagccacacccagaaagccaccctcgtgtgcctggctaccggcttctaccccgaccatgtggaactgtcttggtgggtcaacggcaaagaggtgcacagcggcgtgtgtaccgacccccagccactgaaagaacagcccgccctgaacgacagccggtactgcctgagcagcagactgagagtgtccgccaccttctggcagaacccccggaaccacttcagatgccaggtgcagttctacggcctgagcgagaacgacgagtggacccaggacagagccaagcccgtgacccagatcgtgtctgccgaagcctggggcagagccgatgatgtgattaagatccactggcaggaaaagaagtccaacaccatcctgggcagccaggaaggcaacaccatgaagaccaacgacacctacatgaagttcagctggctgaccgtgcccgagaagtccctggacaaagaacacagatgcatcgtgcggcacgaaaacaacaagaacggcgtggaccaggaaatcatcttcccacccatcaagaccgatgtgattacaatggaccccaaggacaactgctccaaggacgccaacgataccctgctgctccagctgaccaacaccagcgcctactacatgtacttgttgctgctgctgaagtccgtggtgtacttcgccatcatcacatgctgcctgctgatggctatggtcaagcggaaggacagccgggga

SEQ ID NO: 6221 - DNA, 2178 bp, synthetic construct
  source 1..2178: mol_type = other DNA
atggccttaccagtgaccgccttgctcctgccgctggccttgctgctccacgccgccaggccggacgagatcgtgatgacccagacccctgccaccctgtctgtgtctgccggcgagagagtgaccattacctgcaaggccagccagagcgtgtccaacgacgtgacctggtatcagcagaagcccggccaggcccccagactgctgatctacagcgccagcaacagatacagcggcgtgcccgccagattttccggcagcggctacggcaccgagttcaccttcaccatcagcagcgtgcagagcgaggacttcgccgtgtacttctgtcagcaagactacagcagcttcggccagggcaccaagctggaaatcaagaggctcgagatccagaaccctgatcctgccgtgtaccagctgcgggatagcaagagcagcgacaagagcgtgtgtctgttcaccgacttcgacagccagaccaacgtgtcccagagcaaggactccgacgtgtacatcaccgataagtgcgtgctggacatgcggagcatggacttcaagagcaactccgccgtggcctggtccaacaagtccgatttcgcctgcgccaacgccttcaacaacagcattatccccgaggacacattcttcccaagccccgagagcagcgactccaccgaccacgtgaagcccaaagagacagagaacaccaagcagcccagcaagagctgccacaagcccaaggccatcgtgcacaccgagaaagtgaacatgatgagcctgaccgtgctgggcctgcggatgctgttcgccaaaaccgtggccgtgaacttcctgctgaccgccaagctgttcttcctcctcaccgcccgcgccaagagaagcggatctggcgtgaagcagaccctgaatttcgacctgctgaagctggctggcgacgtggaatccaacccaggccctactagtatggactggatttggcgcatccttttccttgtcggcgctgctaccggcgcgcattccttcgaacaggtgcagctggtggaatctggacctggcgtggtgcagcctggcagaagcctgagaatcagctgtgccgtgtccggcttcagcgtgaccaactacggcgtgcactgggtgcgccagccacctggaaaaggactggaatggctgggcgtgatctgggctggcggcatcaccaactacaacagcgccttcatgtcccggctgaccatctccaaggacaacagcaagaacaccgtgtacctccagatgaacagcctgcgggccgaggacaccgccatgtactactgtgcttccagaggcggccactacggctacgccctggattattggggccagggaaccctcgtgaccgtgtcctctacgcgtgaggacctgaagaacgtgttcccacctgaggtggccgtgttcgagcctagcgaggccgagatcagccacacccagaaagccaccctcgtgtgcctggctaccggcttctaccccgaccatgtggaactgtcttggtgggtcaacggcaaagaggtgcacagcggcgtgtgtaccgacccccagccactgaaagaacagcccgccctgaacgacagccggtactgcctgagcagcagactgagagtgtccgccaccttctggcagaacccccggaaccacttcagatgccaggtgcagttctacggcctgagcgagaacgacgagtggacccaggacagagccaagcccgtgacccagatcgtgtctgccgaagcctggggcagagccgatgatgtgattaagatccactggcaggaaaagaagtccaacaccatcctgggcagccaggaaggcaacaccatgaagaccaacgacacctacatgaagttcagctggctgaccgtgcccgagaagtccctggacaaagaacacagatgcatcgtgcggcacgaaaacaacaagaacggcgtggaccaggaaatcatcttcccacccatcaagaccgatgtgattacaatggaccccaaggacaactgctccaaggacgccaacgataccctgctgctccagctgaccaacaccagcgcctactacatgtacttgttgctgctgctgaagtccgtggtgtacttcgccatcatcacatgctgcctgctgatggctatggtcaagcggaaggacagccgggga

SEQ ID NO: 6222 - DNA, 2184 bp, synthetic construct
  source 1..2184: mol_type = other DNA
atggccttaccagtgaccgccttgctcctgccgctggccttgctgctccacgccgccaggccggacatccagatgacccagaccgccagcagcctgcctgcctctctgggcgacagagtgaccatctcctgtagcgccagccaggacatcagcaactacctgaactggtatcagcagaaacccgacggcaccgtgaagctgctgatcttctacagcagcaacctgcacagcggcgtgcccagcagattttctggcggcggaagcggcaccgactacagcctgaccatcagcaatctggaacccgaggacattgccacctacttttgccaccagtacagcaagctgccctggacctttggcggaggcaccaagctggaaatcaagagactcgagatccagaaccctgatcctgccgtgtaccagctgcgggatagcaagagcagcgacaagagcgtgtgtctgttcaccgacttcgacagccagaccaacgtgtcccagagcaaggactccgacgtgtacatcaccgataagtgcgtgctggacatgcggagcatggacttcaagagcaactccgccgtggcctggtccaacaagtccgatttcgcctgcgccaacgccttcaacaacagcattatccccgaggacacattcttcccaagccccgagagcagcgactccaccgaccacgtgaagcccaaagagacagagaacaccaagcagcccagcaagagctgccacaagcccaaggccatcgtgcacaccgagaaagtgaacatgatgagcctgaccgtgctgggcctgcggatgctgttcgccaaaaccgtggccgtgaacttcctgctgaccgccaagctgttcttcctcctcaccgcccgcgccaagagaagcggatctggcgtgaagcagaccctgaatttcgacctgctgaagctggctggcgacgtggaatccaacccaggccctactagtatggactggatttggcgcatccttttccttgtcggcgctgctaccggcgcgcattccttcgaagaagtgaccctggtggaaagcggcggagacttcgtgaagcctggcggctctctgaaggtgtcctgtgccgccagcggcttcgcctttagccactacgccatgagctgggtgcgccagacccctgccaagagactggaatgggtggcctacatcagcagcggcggctccggcacctactactccgatagcgtgaagggccggttcaccatcagccgggacaacgccaagaacaccctgtacctccagatgcggagcctgcggagcgaggacagcgccatgtatttctgcaccagagtgaagctgggcacctattacttcgactcttggggccagggcaccaccctgaccgtgtcatctacgcgtgaggacctgaagaacgtgttcccacctgaggtggccgtgttcgagcctagcgaggccgagatcagccacacccagaaagccaccctcgtgtgcctggctaccggcttctaccccgaccatgtggaactgtcttggtgggtcaacggcaaagaggtgcacagcggcgtgtgtaccgacccccagccactgaaagaacagcccgccctgaacgacagccggtactgcctgagcagcagactgagagtgtccgccaccttctggcagaacccccggaaccacttcagatgccaggtgcagttctacggcctgagcgagaacgacgagtggacccaggacagagccaagcccgtgacccagatcgtgtctgccgaagcctggggcagagccgatgatgtgattaagatccactggcaggaaaagaagtccaacaccatcctgggcagccaggaaggcaacaccatgaagaccaacgacacctacatgaagttcagctggctgaccgtgcccgagaagtccctggacaaagaacacagatgcatcgtgcggcacgaaaacaacaagaacggcgtggaccaggaaatcatcttcccacccatcaagaccgatgtgattacaatggaccccaaggacaactgctccaaggacgccaacgataccctgctgctccagctgaccaacaccagcgcctactacatgtacttgttgctgctgctgaagtccgtggtgtacttcgccatcatcacatgctgcctgctgatggctatggtcaagcggaaggacagccgggga

SEQ ID NO: 6223 - DNA, 2190 bp, synthetic construct
  source 1..2190: mol_type = other DNA
atggccttaccagtgaccgccttgctcctgccgctggccttgctgctccacgccgccaggccgcagttcgtgctgacccagagcccttctgcctctgctgccctgggagcctctgccaagctgacctgtacactgagcagcgcccacaagacctacaccatcgactggtatcagcagcagaagggaaaggcccccagatacctgatccaagtgaagtccgacggcacctacacaaaggccaccggcgtgcccgatagattcagcggcagtagcagcggagccgatagatacctgattatccccagcgtgcaggccgacgacgaggccgattactactgcggcaccgattacaccggcggctacgtgttcggcggaggcacacaactgaccgtgacactcgagatccagaaccctgatcctgccgtgtaccagctgcgggatagcaagagcagcgacaagagcgtgtgtctgttcaccgacttcgacagccagaccaacgtgtcccagagcaaggactccgacgtgtacatcaccgataagtgcgtgctggacatgcggagcatggacttcaagagcaactccgccgtggcctggtccaacaagtccgatttcgcctgcgccaacgccttcaacaacagcattatccccgaggacacattcttcccaagccccgagagcagcgactccaccgaccacgtgaagcccaaagagacagagaacaccaagcagcccagcaagagctgccacaagcccaaggccatcgtgcacaccgagaaagtgaacatgatgagcctgaccgtgctgggcctgcggatgctgttcgccaaaaccgtggccgtgaacttcctgctgaccgccaagctgttcttcctcctcaccgcccgcgccaagagaagcggatctggcgtgaagcagaccctgaatttcgacctgctgaagctggctggcgacgtggaatccaacccaggccctactagtatggactggatttggcgcatccttttccttgtcggcgctgctaccggcgcgcattccttcgaagagcaactgaaagagtctggcggcggactgttcaagcccaccgataccctgaccctgacctgcaccgtgtccggcttcagcctgagctactacggcgtgaactgggtgcgccaggcccctggcaatggcctggaatggatcggcacaatcggcggcagcggcgacacctactatgcctcttgggccaagtccagaagcaccatcatcagaaacaccaacgagaacaccgtgaccctgaagatgaccagcctgacagccgccgacaccgccacctacttttgcgtcagatacgccaacatcggctacgagtatttcaacgtgtggggacccggcaccctcgtgaccgtgtcatctacgcgtgaggacctgaagaacgtgttcccacctgaggtggccgtgttcgagcctagcgaggccgagatcagccacacccagaaagccaccctcgtgtgcctggctaccggcttctaccccgaccatgtggaactgtcttggtgggtcaacggcaaagaggtgcacagcggcgtgtgtaccgacccccagccactgaaagaacagcccgccctgaacgacagccggtactgcctgagcagcagactgagagtgtccgccaccttctggcagaacccccggaaccacttcagatgccaggtgcagttctacggcctgagcgagaacgacgagtggacccaggacagagccaagcccgtgacccagatcgtgtctgccgaagcctggggcagagccgatgatgtgattaagatccactggcaggaaaagaagtccaacaccatcctgggcagccaggaaggcaacaccatgaagaccaacgacacctacatgaagttcagctggctgaccgtgcccgagaagtccctggacaaagaacacagatgcatcgtgcggcacgaaaacaacaagaacggcgtggaccaggaaatcatcttcccacccatcaagaccgatgtgattacaatggaccccaaggacaactgctccaaggacgccaacgataccctgctgctccagctgaccaacaccagcgcctactacatgtacttgttgctgctgctgaagtccgtggtgtacttcgccatcatcacatgctgcctgctgatggctatggtcaagcggaaggacagccgggga

SEQ ID NO: 6224 - DNA, 2205 bp, synthetic construct
  source 1..2205: mol_type = other DNA
atggccttaccagtgaccgccttgctcctgccgctggccttgctgctccacgccgccaggccgcagttcgtgctgacccagagcccttctgtgtctgccgccctgggagcctctgccaagctgacctgtacactgagcagcgcccacaagacctacaccatcgactggtatcagcagcagcagggcgaggcccccagatacctgatgcaagtgaagtccgacggcagctacaccaagggcaccggcgtgcccgatagattcagcggcagtagcagcggagccgatagatacctgattatccccagcgtgcaggccgacgacgaggccggatatgtgtgcggcgctgacgacaatggcggctacgtgttcggcggaggcacccaactgacagtgacactcgagatccagaaccctgatcctgccgtgtaccagctgcgggatagcaagagcagcgacaagagcgtgtgtctgttcaccgacttcgacagccagaccaacgtgtcccagagcaaggactccgacgtgtacatcaccgataagtgcgtgctggacatgcggagcatggacttcaagagcaactccgccgtggcctggtccaacaagtccgatttcgcctgcgccaacgccttcaacaacagcattatccccgaggacacattcttcccaagccccgagagcagcgactccaccgaccacgtgaagcccaaagagacagagaacaccaagcagcccagcaagagctgccacaagcccaaggccatcgtgcacaccgagaaagtgaacatgatgagcctgaccgtgctgggcctgcggatgctgttcgccaaaaccgtggccgtgaacttcctgctgaccgccaagctgttcttcctcctcaccgcccgcgccaagagaagcggatctggcgtgaagcagaccctgaatttcgacctgctgaagctggctggcgacgtggaatccaacccaggccctactagtatggactggatttggcgcatccttttccttgtcggcgctgctaccggcgcgcattccttcgaacagagcgtgaaagagtctgagggcggcctgttcaagcccaccgataccctgaccctgacctgcaccgtgtccggcttcagcctgagcagacacgccctgacatgggtgcgccaggcccctggaaatggcctggaatggatcggagccatcgacaacgccggcaccacctactatgcctcttgggccaagtccagaagcaccatcacccggaacaccgacctgcacaccgtgaccctgaagatgaccagcctgaccgccagcgacaccgccacctacttttgcgccagagtgttctacgacatcaacagcggctactacctggacggcatggacctgtggggacctggcacacttgtgaccgtgtccagcacgcgtgaggacctgaagaacgtgttcccacctgaggtggccgtgttcgagcctagcgaggccgagatcagccacacccagaaagccaccctcgtgtgcctggctaccggcttctaccccgaccatgtggaactgtcttggtgggtcaacggcaaagaggtgcacagcggcgtgtgtaccgacccccagccactgaaagaacagcccgccctgaacgacagccggtactgcctgagcagcagactgagagtgtccgccaccttctggcagaacccccggaaccacttcagatgccaggtgcagttctacggcctgagcgagaacgacgagtggacccaggacagagccaagcccgtgacccagatcgtgtctgccgaagcctggggcagagccgatgatgtgattaagatccactggcaggaaaagaagtccaacaccatcctgggcagccaggaaggcaacaccatgaagaccaacgacacctacatgaagttcagctggctgaccgtgcccgagaagtccctggacaaagaacacagatgcatcgtgcggcacgaaaacaacaagaacggcgtggaccaggaaatcatcttcccacccatcaagaccgatgtgattacaatggaccccaaggacaactgctccaaggacgccaacgataccctgctgctccagctgaccaacaccagcgcctactacatgtacttgttgctgctgctgaagtccgtggtgtacttcgccatcatcacatgctgcctgctgatggctatggtcaagcggaaggacagccgggga

SEQ ID NO: 6225 - DNA, 2187 bp, synthetic construct
  source 1..2187: mol_type = other DNA
atggccttaccagtgaccgccttgctcctgccgctggccttgctgctccacgccgccaggccggacatccagatgacccagagccccagcagcctgtctgccagcgtgggcgacagagtgaccatcacctgtagagccagccagggcatcagctcttggctggcctggtatcagcagaagcccgagaaggcccccaagagcctgatctacgccgcctctagtctccagagcggcgtgcccagcagattttctggcagcggctccggcaccgacttcaccctgacaatcagctccctccagcccgaggacttcgccacctactactgccagcagtacaacagctacccccccacctttggcggaggcaccaaggtggaaatcaagctcgagatccagaaccctgatcctgccgtgtaccagctgcgggatagcaagagcagcgacaagagcgtgtgtctgttcaccgacttcgacagccagaccaacgtgtcccagagcaaggactccgacgtgtacatcaccgataagtgcgtgctggacatgcggagcatggacttcaagagcaactccgccgtggcctggtccaacaagtccgatttcgcctgcgccaacgccttcaacaacagcattatccccgaggacacattcttcccaagccccgagagcagcgactccaccgaccacgtgaagcccaaagagacagagaacaccaagcagcccagcaagagctgccacaagcccaaggccatcgtgcacaccgagaaagtgaacatgatgagcctgaccgtgctgggcctgcggatgctgttcgccaaaaccgtggccgtgaacttcctgctgaccgccaagctgttcttcctcctcaccgcccgcgccaagagaagcggatctggcgtgaagcagaccctgaatttcgacctgctgaagctggctggcgacgtggaatccaacccaggccctactagtatggactggatttggcgcatccttttccttgtcggcgctgctaccggcgcgcattccttcgaagaagtgcaactggtggaatcaggcggcggactggtgcagcctggcgagtctctgagactgagctgtgtggcctccggcttcaccttcagccggtacaagatgaactgggtgcgccaggcccctggcaagggactggaatgggtgtcctacatcagccgcagcggcagagacatctactacgccgacagcgtgaagggccggttcaccatcagcagagacaacgccaagaacagcctgtacctccagatgaactccctgcgggacgaggacaccgccgtgtactactgtgccggaaccgtgaccacctattactacttcggcatggacgtgtggggccacggcaccaccgtgacagtgtcatctacgcgtgaggacctgaagaacgtgttcccacctgaggtggccgtgttcgagcctagcgaggccgagatcagccacacccagaaagccaccctcgtgtgcctggctaccggcttctaccccgaccatgtggaactgtcttggtgggtcaacggcaaagaggtgcacagcggcgtgtgtaccgacccccagccactgaaagaacagcccgccctgaacgacagccggtactgcctgagcagcagactgagagtgtccgccaccttctggcagaacccccggaaccacttcagatgccaggtgcagttctacggcctgagcgagaacgacgagtggacccaggacagagccaagcccgtgacccagatcgtgtctgccgaagcctggggcagagccgatgatgtgattaagatccactggcaggaaaagaagtccaacaccatcctgggcagccaggaaggcaacaccatgaagaccaacgacacctacatgaagttcagctggctgaccgtgcccgagaagtccctggacaaagaacacagatgcatcgtgcggcacgaaaacaacaagaacggcgtggaccaggaaatcatcttcccacccatcaagaccgatgtgattacaatggaccccaaggacaactgctccaaggacgccaacgataccctgctgctccagctgaccaacaccagcgcctactacatgtacttgttgctgctgctgaagtccgtggtgtacttcgccatcatcacatgctgcctgctgatggctatggtcaagcggaaggacagccgggga

SEQ ID NO: 6226 - DNA, 2190 bp, synthetic construct
  source 1..2190: mol_type = other DNA
atggccttaccagtgaccgccttgctcctgccgctggccttgctgctccacgccgccaggccggacatccagatgacccagagccccagcagcctgtctgccagcgtgggcgacagagtgaccatcacctgtagagccagccagggcatcagctcttggctggcctggtatcagcagaagcccgagaaggcccccaagagcctgatctacgccgcctctagtctccagagcggcgtgcccagcagattttctggcagcggctccggcaccgacttcaccctgacaatcagctccctccagcccgaggacttcgccacctactactgccagcagtacaacagctaccctcccacctttggcggaggcaccaaggtggaaatcaagctcgagatccagaaccctgatcctgccgtgtaccagctgcgggatagcaagagcagcgacaagagcgtgtgtctgttcaccgacttcgacagccagaccaacgtgtcccagagcaaggactccgacgtgtacatcaccgataagtgcgtgctggacatgcggagcatggacttcaagagcaactccgccgtggcctggtccaacaagtccgatttcgcctgcgccaacgccttcaacaacagcattatccccgaggacacattcttcccaagccccgagagcagcgactccaccgaccacgtgaagcccaaagagacagagaacaccaagcagcccagcaagagctgccacaagcccaaggccatcgtgcacaccgagaaagtgaacatgatgagcctgaccgtgctgggcctgcggatgctgttcgccaaaaccgtggccgtgaacttcctgctgaccgccaagctgttcttcctcctcaccgcccgcgccaagagaagcggatctggcgtgaagcagaccctgaatttcgacctgctgaagctggctggcgacgtggaatccaacccaggccctactagtatggactggatttggcgcatccttttccttgtcggcgctgctaccggcgcgcattccttcgaagaagtgcaactggtggaatccgggggaggctctgtgcagcctggcgagtctctgagactgagctgtgtggcctccggcttcaccttcagccggtacaagatgaactgggtgcgccaggcccctggcaagggactggaatgggtgtcctacatcagccgcagcggcagagacatctactacgccgacagcgtgaagggccggttcaccatcagcagagacaacgccaagaacagcctgtacctccagatgaactccctgcgggacgaggacaccgccgtgtactactgtgccggaaccgtgaccacctattactacgacttcggcatggacgtgtggggccagggcacaaccgtgacagtgtctagcacgcgtgaggacctgaagaacgtgttcccacctgaggtggccgtgttcgagcctagcgaggccgagatcagccacacccagaaagccaccctcgtgtgcctggctaccggcttctaccccgaccatgtggaactgtcttggtgggtcaacggcaaagaggtgcacagcggcgtgtgtaccgacccccagccactgaaagaacagcccgccctgaacgacagccggtactgcctgagcagcagactgagagtgtccgccaccttctggcagaacccccggaaccacttcagatgccaggtgcagttctacggcctgagcgagaacgacgagtggacccaggacagagccaagcccgtgacccagatcgtgtctgccgaagcctggggcagagccgatgatgtgattaagatccactggcaggaaaagaagtccaacaccatcctgggcagccaggaaggcaacaccatgaagaccaacgacacctacatgaagttcagctggctgaccgtgcccgagaagtccctggacaaagaacacagatgcatcgtgcggcacgaaaacaacaagaacggcgtggaccaggaaatcatcttcccacccatcaagaccgatgtgattacaatggaccccaaggacaactgctccaaggacgccaacgataccctgctgctccagctgaccaacaccagcgcctactacatgtacttgttgctgctgctgaagtccgtggtgtacttcgccatcatcacatgctgcctgctgatggctatggtcaagcggaaggacagccgggga

SEQ ID NO: 6227 - DNA, 2184 bp, synthetic construct
  source 1..2184: mol_type = other DNA
atggccttaccagtgaccgccttgctcctgccgctggccttgctgctccacgccgccaggccgcagtctgtgctgacacagcctccatctgcctctggcacacctggacagagagtgaccatcagctgtagcggcagcagaagcaacgtcggcggcaactacgtgttctggtatcagcaggtcccaggcgctacccctaagctgctgatctacagaagcaatcagcggcctagcggcgtgcccgatagatttgccggaagcaagagcggcagctctgccagccttgccatctctggactgagaagcgaggacgaggccgactactactgtgccacctgggatgatagcctgagcggcttcgtgtttggcaccggcaccaaagtgacagtgcttggtctcgagatccagaaccctgatcctgccgtgtaccagctgcgggatagcaagagcagcgacaagagcgtgtgtctgttcaccgacttcgacagccagaccaacgtgtcccagagcaaggactccgacgtgtacatcaccgataagtgcgtgctggacatgcggagcatggacttcaagagcaactccgccgtggcctggtccaacaagtccgatttcgcctgcgccaacgccttcaacaacagcattatccccgaggacacattcttcccaagccccgagagcagcgactccaccgaccacgtgaagcccaaagagacagagaacaccaagcagcccagcaagagctgccacaagcccaaggccatcgtgcacaccgagaaagtgaacatgatgagcctgaccgtgctgggcctgcggatgctgttcgccaaaaccgtggccgtgaacttcctgctgaccgccaagctgttcttcctcctcaccgcccgcgccaagagaagcggatctggcgtgaagcagaccctgaatttcgacctgctgaagctggctggcgacgtggaatccaacccaggccctactagtatggactggatttggcgcatccttttccttgtcggcgctgctaccggcgcgcattccttcgaagttcagctggttgaatctggcggcggactggttaagcctggcggatctctgagactgtcttgtgccgccagcggcttcaccttcagcgattactacatgagctggatcagacaggcccctggcaaaggactggaatgggtgtcctacatcagcagcagcggctccaccatctactacgccgatagcgtgaagggcagattcaccatcagccgggacaacgccaagaacagcctgtacctccagatgaactccctgagagccgaggacaccgccgtgtactattgcgccagaggctacggcaaagcctacgatcaatggggccagggcacactggtcaccgtttcttctacgcgtgaggacctgaagaacgtgttcccacctgaggtggccgtgttcgagcctagcgaggccgagatcagccacacccagaaagccaccctcgtgtgcctggctaccggcttctaccccgaccatgtggaactgtcttggtgggtcaacggcaaagaggtgcacagcggcgtgtgtaccgacccccagccactgaaagaacagcccgccctgaacgacagccggtactgcctgagcagcagactgagagtgtccgccaccttctggcagaacccccggaaccacttcagatgccaggtgcagttctacggcctgagcgagaacgacgagtggacccaggacagagccaagcccgtgacccagatcgtgtctgccgaagcctggggcagagccgatgatgtgattaagatccactggcaggaaaagaagtccaacaccatcctgggcagccaggaaggcaacaccatgaagaccaacgacacctacatgaagttcagctggctgaccgtgcccgagaagtccctggacaaagaacacagatgcatcgtgcggcacgaaaacaacaagaacggcgtggaccaggaaatcatcttcccacccatcaagaccgatgtgattacaatggaccccaaggacaactgctccaaggacgccaacgataccctgctgctccagctgaccaacaccagcgcctactacatgtacttgttgctgctgctgaagtccgtggtgtacttcgccatcatcacatgctgcctgctgatggctatggtcaagcggaaggacagccgggga

SEQ ID NO: 6228 - DNA, 2181 bp, synthetic construct
  source 1..2181: mol_type = other DNA
atggccttaccagtgaccgccttgctcctgccgctggccttgctgctccacgccgccaggccgcagtctgtggtcacacagccacctagcatgtctgccgctccaggccagcaagtgaccatctcttgtagcggcggcaacagcaacatcgagcggaactacgtgtcctggtatctgcaactgcctggcacagcccctaagctggtcatcttcgacaacgacagacggcccagcggcatccccgatagattttctggcagcaagagcggcaccagcgccacactgggaattaccggacttcagacaggcgacgaggccgactactactgtggcacatgggactctagcctgagaggctgggttttcggcggaggcacaaagctgacagtgcttggtctcgagatccagaaccctgatcctgccgtgtaccagctgcgggatagcaagagcagcgacaagagcgtgtgtctgttcaccgacttcgacagccagaccaacgtgtcccagagcaaggactccgacgtgtacatcaccgataagtgcgtgctggacatgcggagcatggacttcaagagcaactccgccgtggcctggtccaacaagtccgatttcgcctgcgccaacgccttcaacaacagcattatccccgaggacacattcttcccaagccccgagagcagcgactccaccgaccacgtgaagcccaaagagacagagaacaccaagcagcccagcaagagctgccacaagcccaaggccatcgtgcacaccgagaaagtgaacatgatgagcctgaccgtgctgggcctgcggatgctgttcgccaaaaccgtggccgtgaacttcctgctgaccgccaagctgttcttcctcctcaccgcccgcgccaagagaagcggatctggcgtgaagcagaccctgaatttcgacctgctgaagctggctggcgacgtggaatccaacccaggccctactagtatggactggatttggcgcatccttttccttgtcggcgctgctaccggcgcgcattccttcgaagtgcagctcgttgagtctggcggcggactgattcaacctggcggaagcctgagactgagctgtgccgcttccggcttcaccttcagcaactacgccatgaactgggttcgacaggcccctggcaaaggactggaatgggtgtccaccatcaacggcagaggcagcagcaccatctacgccgattctgtgaagggcagattcaccatcagccgggacaacagcaagaacaccctgtacctccagatgaactccctgagagccgaggacaccgccacctattactgtgcccggtacatcagcagaggactgggcgattcttggggccagggcacactggttacagtgacgcgtgaggacctgaagaacgtgttcccacctgaggtggccgtgttcgagcctagcgaggccgagatcagccacacccagaaagccaccctcgtgtgcctggctaccggcttctaccccgaccatgtggaactgtcttggtgggtcaacggcaaagaggtgcacagcggcgtgtgtaccgacccccagccactgaaagaacagcccgccctgaacgacagccggtactgcctgagcagcagactgagagtgtccgccaccttctggcagaacccccggaaccacttcagatgccaggtgcagttctacggcctgagcgagaacgacgagtggacccaggacagagccaagcccgtgacccagatcgtgtctgccgaagcctggggcagagccgatgatgtgattaagatccactggcaggaaaagaagtccaacaccatcctgggcagccaggaaggcaacaccatgaagaccaacgacacctacatgaagttcagctggctgaccgtgcccgagaagtccctggacaaagaacacagatgcatcgtgcggcacgaaaacaacaagaacggcgtggaccaggaaatcatcttcccacccatcaagaccgatgtgattacaatggaccccaaggacaactgctccaaggacgccaacgataccctgctgctccagctgaccaacaccagcgcctactacatgtacttgttgctgctgctgaagtccgtggtgtacttcgccatcatcacatgctgcctgctgatggctatggtcaagcggaaggacagccgggga

SEQ ID NO: 6229 - DNA, 2184 bp, synthetic construct
  source 1..2184: mol_type = other DNA
atggccttaccagtgaccgccttgctcctgccgctggccttgctgctccacgccgccaggccggacgtcgtgatgacccagacccctctgagcctgcctgtgtccctgggcgatcaggccagcatcagctgtagaagcagccagagcctggtgcacagcaacggcaacacctacctgcactggtatctccagaagcccggccagagccccaagctgctgatctacaaggtgtccaacagattcagcggcgtgcccgacagattctccggcagcggctctggcaccgacttcaccctgaagatcagccgggtggaagccgaggacctgggcgtgtacttctgtagccagaacacccccgtgccccccaagtttggcagcggcaccaagctggaaatcaagctcgagatccagaaccctgatcctgccgtgtaccagctgcgggatagcaagagcagcgacaagagcgtgtgtctgttcaccgacttcgacagccagaccaacgtgtcccagagcaaggactccgacgtgtacatcaccgataagtgcgtgctggacatgcggagcatggacttcaagagcaactccgccgtggcctggtccaacaagtccgatttcgcctgcgccaacgccttcaacaacagcattatccccgaggacacattcttcccaagccccgagagcagcgactccaccgaccacgtgaagcccaaagagacagagaacaccaagcagcccagcaagagctgccacaagcccaaggccatcgtgcacaccgagaaagtgaacatgatgagcctgaccgtgctgggcctgcggatgctgttcgccaaaaccgtggccgtgaacttcctgctgaccgccaagctgttcttcctcctcaccgcccgcgccaagagaagcggatctggcgtgaagcagaccctgaatttcgacctgctgaagctggctggcgacgtggaatccaacccaggccctactagtatggactggatttggcgcatccttttccttgtcggcgctgctaccggcgcgcattccttcgaacaggtgcagctccagcagtctggcgctgaactcgtgcggcctggcgcttctgtgaagctgtcttgcaaggccagcggctacaccttcaacgactacgagatgcactgggtcaagcagacccctgtgcacggcctgaagtggatcggagccctggaacccaagaccggcgataccgcctacagccagaagttcaagggcaaggccaccctgaccgccgacaagagcagcagcacagcctacatggaactgcggagcctgaccagcgaggacagcgccgtgtactactgcaccagctgctactactacacctacagcggccagggcaccctcgtgacagtgtctgctacgcgtgaggacctgaagaacgtgttcccacctgaggtggccgtgttcgagcctagcgaggccgagatcagccacacccagaaagccaccctcgtgtgcctggctaccggcttctaccccgaccatgtggaactgtcttggtgggtcaacggcaaagaggtgcacagcggcgtgtgtaccgacccccagccactgaaagaacagcccgccctgaacgacagccggtactgcctgagcagcagactgagagtgtccgccaccttctggcagaacccccggaaccacttcagatgccaggtgcagttctacggcctgagcgagaacgacgagtggacccaggacagagccaagcccgtgacccagatcgtgtctgccgaagcctggggcagagccgatgatgtgattaagatccactggcaggaaaagaagtccaacaccatcctgggcagccaggaaggcaacaccatgaagaccaacgacacctacatgaagttcagctggctgaccgtgcccgagaagtccctggacaaagaacacagatgcatcgtgcggcacgaaaacaacaagaacggcgtggaccaggaaatcatcttcccacccatcaagaccgatgtgattacaatggaccccaaggacaactgctccaaggacgccaacgataccctgctgctccagctgaccaacaccagcgcctactacatgtacttgttgctgctgctgaagtccgtggtgtacttcgccatcatcacatgctgcctgctgatggctatggtcaagcggaaggacagccgggga

SEQ ID NO: 6230 - DNA, 2181 bp, synthetic construct
  source 1..2181: mol_type = other DNA
atggccttaccagtgaccgccttgctcctgccgctggccttgctgctccacgccgccaggccggacatccaactgacccagagccccagcagcctgtctgcctctgtgggcgacagagtgaccatcacctgtagagccagccagggcatcagaaacgacctgggctggtatcagcagaagcccggcaaggcccccaagcggctgatctatgctgccagctccctccagaatggcgtgcccagcagattttccggcagcggctctggcaccgagttcaccctgaccatcagctccctccagcccgaggacttcgccacctactactgcctccagcacaacacctaccccgccttcggccagggcaccaaggtggaaatcaagagactcgagatccagaaccctgatcctgccgtgtaccagctgcgggatagcaagagcagcgacaagagcgtgtgtctgttcaccgacttcgacagccagaccaacgtgtcccagagcaaggactccgacgtgtacatcaccgataagtgcgtgctggacatgcggagcatggacttcaagagcaactccgccgtggcctggtccaacaagtccgatttcgcctgcgccaacgccttcaacaacagcattatccccgaggacacattcttcccaagccccgagagcagcgactccaccgaccacgtgaagcccaaagagacagagaacaccaagcagcccagcaagagctgccacaagcccaaggccatcgtgcacaccgagaaagtgaacatgatgagcctgaccgtgctgggcctgcggatgctgttcgccaaaaccgtggccgtgaacttcctgctgaccgccaagctgttcttcctcctcaccgcccgcgccaagagaagcggatctggcgtgaagcagaccctgaatttcgacctgctgaagctggctggcgacgtggaatccaacccaggccctactagtatggactggatttggcgcatccttttccttgtcggcgctgctaccggcgcgcattccttcgaacaggtgcaactccaggaatctggccctggcctcgtgaagcctagccagaccctgagcctgacctgtaccgtgtctggcggcagcatcagcagcttcaactactactggtcctggatcagacaccaccctggcaagggcctggaatggatcggctacatctactacagcggcagcacctacagcaaccccagcctgaagtcccgcgtgaccatctccgtggacaccagcaagaaccagtttagcctgaccctgtccagcgtgacagccgccgataccgccgtgtactactgcgccagaggctacaactggaactacttcgactactggggccagggaaccctcgtgaccgtgtctagtacgcgtgaggacctgaagaacgtgttcccacctgaggtggccgtgttcgagcctagcgaggccgagatcagccacacccagaaagccaccctcgtgtgcctggctaccggcttctaccccgaccatgtggaactgtcttggtgggtcaacggcaaagaggtgcacagcggcgtgtgtaccgacccccagccactgaaagaacagcccgccctgaacgacagccggtactgcctgagcagcagactgagagtgtccgccaccttctggcagaacccccggaaccacttcagatgccaggtgcagttctacggcctgagcgagaacgacgagtggacccaggacagagccaagcccgtgacccagatcgtgtctgccgaagcctggggcagagccgatgatgtgattaagatccactggcaggaaaagaagtccaacaccatcctgggcagccaggaaggcaacaccatgaagaccaacgacacctacatgaagttcagctggctgaccgtgcccgagaagtccctggacaaagaacacagatgcatcgtgcggcacgaaaacaacaagaacggcgtggaccaggaaatcatcttcccacccatcaagaccgatgtgattacaatggaccccaaggacaactgctccaaggacgccaacgataccctgctgctccagctgaccaacaccagcgcctactacatgtacttgttgctgctgctgaagtccgtggtgtacttcgccatcatcacatgctgcctgctgatggctatggtcaagcggaaggacagccgggga

SEQ ID NO: 6231 - DNA, 2187 bp, synthetic construct
  source 1..2187: mol_type = other DNA
atggccttaccagtgaccgccttgctcctgccgctggccttgctgctccacgccgccaggccggacgacatcgtgctgacccagagccccgccagcctggccgtgagcctgggccagagcgtgaccatcagctgcagagccagcgagagcgtggagtactacggcaccagcctgatgcagtggtaccagcagaagcccggccagccccccaagctgctgatctacgccaccagcaacgtggagagcggcgtgcccgccagattcagcggcagcggcagcggcaccgacttcagcctgaacatccaccccgtggaggaggacgacatcgccatgtacttctgccagcagagcagaaagctgcccagcaccttcggcggcggcaccaagctggagatcaagctcgagatccagaaccctgatcctgccgtgtaccagctgcgggatagcaagagcagcgacaagagcgtgtgtctgttcaccgacttcgacagccagaccaacgtgtcccagagcaaggactccgacgtgtacatcaccgataagtgcgtgctggacatgcggagcatggacttcaagagcaactccgccgtggcctggtccaacaagtccgatttcgcctgcgccaacgccttcaacaacagcattatccccgaggacacattcttcccaagccccgagagcagcgactccaccgaccacgtgaagcccaaagagacagagaacaccaagcagcccagcaagagctgccacaagcccaaggccatcgtgcacaccgagaaagtgaacatgatgagcctgaccgtgctgggcctgcggatgctgttcgccaaaaccgtggccgtgaacttcctgctgaccgccaagctgttcttcctcctcaccgcccgcgccaagagaagcggatctggcgtgaagcagaccctgaatttcgacctgctgaagctggctggcgacgtggaatccaacccaggccctactagtatggactggatttggcgcatccttttccttgtcggcgctgctaccggcgcgcattccttcgaagacgtgagactgcaggagagcggccccggccaggtgaagcccagccagaccgtgagcctgacctgcagcgtgaccggctacagcatcaccaacggcaaccactggtggaactggatcagacaggtgagcggcagcaagctggagtggatcggctacatcagcagcagcggcagcaccgacagcaaccccagcctgaagagcagaatcagcatcaccagagacaccagcaagaaccagctgttcctgcagctgaacagcgtgaccaccgaggacatcgccacctactactgcgccagaggctactacttcgactactggggccagggcaccaccctgaccgtgagcagcacgcgtgaggacctgaagaacgtgttcccacctgaggtggccgtgttcgagcctagcgaggccgagatcagccacacccagaaagccaccctcgtgtgcctggctaccggcttctaccccgaccatgtggaactgtcttggtgggtcaacggcaaagaggtgcacagcggcgtgtgtaccgacccccagccactgaaagaacagcccgccctgaacgacagccggtactgcctgagcagcagactgagagtgtccgccaccttctggcagaacccccggaaccacttcagatgccaggtgcagttctacggcctgagcgagaacgacgagtggacccaggacagagccaagcccgtgacccagatcgtgtctgccgaagcctggggcagagccgatgatgtgattaagatccactggcaggaaaagaagtccaacaccatcctgggcagccaggaaggcaacaccatgaagaccaacgacacctacatgaagttcagctggctgaccgtgcccgagaagtccctggacaaagaacacagatgcatcgtgcggcacgaaaacaacaagaacggcgtggaccaggaaatcatcttcccacccatcaagaccgatgtgattacaatggaccccaaggacaactgctccaaggacgccaacgataccctgctgctccagctgaccaacaccagcgcctactacatgtacttgttgctgctgctgaagtccgtggtgtacttcgccatcatcacatgctgcctgctgatggctatggtcaagcggaaggacagccgggga

SEQ ID NO: 6232 - DNA, 2184 bp, synthetic construct
  source 1..2184: mol_type = other DNA
atggccttaccagtgaccgccttgctcctgccgctggccttgctgctccacgccgccaggccggacatccagatgacccagagccccagcagcctgtctgccagcgtgggcgacagagtgaccatcacctgtagagccagccaggacgtgaacaccgccgtggcctggtatcagcagaagcctggcaaggcccccaagctgctgatctacagcgccagcttcctggaaagcggcgtgcccagcagattcagcggaagcagaagcggcaccgacttcaccctgaccatcagctccctccagcccgaggacttcgccacctactactgccagcagcactacaccacccctcccaccttcggccagaccaaggtggaaatcaagagactcgagatccagaaccctgatcctgccgtgtaccagctgcgggatagcaagagcagcgacaagagcgtgtgtctgttcaccgacttcgacagccagaccaacgtgtcccagagcaaggactccgacgtgtacatcaccgataagtgcgtgctggacatgcggagcatggacttcaagagcaactccgccgtggcctggtccaacaagtccgatttcgcctgcgccaacgccttcaacaacagcattatccccgaggacacattcttcccaagccccgagagcagcgactccaccgaccacgtgaagcccaaagagacagagaacaccaagcagcccagcaagagctgccacaagcccaaggccatcgtgcacaccgagaaagtgaacatgatgagcctgaccgtgctgggcctgcggatgctgttcgccaaaaccgtggccgtgaacttcctgctgaccgccaagctgttcttcctcctcaccgcccgcgccaagagaagcggatctggcgtgaagcagaccctgaatttcgacctgctgaagctggctggcgacgtggaatccaacccaggccctactagtatggactggatttggcgcatccttttccttgtcggcgctgctaccggcgcgcattccttcgaagaagtgcaactggtggaatctggcggcggactggtgcagcctggcggatctctgagactgagctgtgccgccagcggcttcaacatcaaggacacctacatccactgggtgcgccaggcccctggaaagggactggaatgggtggcccggatctaccccaccaacggctacaccagatacgccgacagcgtgaagggccggttcaccatcagcgccgacaccagcaagaataccgcctacctccagatgaacagcctgcgggccgaggataccgccgtgtactactgctcaagatggggaggcgacggcttctacgctatggacgtgtggggccagggcacccttgtgaccgtgtcatctacgcgtgaggacctgaagaacgtgttcccacctgaggtggccgtgttcgagcctagcgaggccgagatcagccacacccagaaagccaccctcgtgtgcctggctaccggcttctaccccgaccatgtggaactgtcttggtgggtcaacggcaaagaggtgcacagcggcgtgtgtaccgacccccagccactgaaagaacagcccgccctgaacgacagccggtactgcctgagcagcagactgagagtgtccgccaccttctggcagaacccccggaaccacttcagatgccaggtgcagttctacggcctgagcgagaacgacgagtggacccaggacagagccaagcccgtgacccagatcgtgtctgccgaagcctggggcagagccgatgatgtgattaagatccactggcaggaaaagaagtccaacaccatcctgggcagccaggaaggcaacaccatgaagaccaacgacacctacatgaagttcagctggctgaccgtgcccgagaagtccctggacaaagaacacagatgcatcgtgcggcacgaaaacaacaagaacggcgtggaccaggaaatcatcttcccacccatcaagaccgatgtgattacaatggaccccaaggacaactgctccaaggacgccaacgataccctgctgctccagctgaccaacaccagcgcctactacatgtacttgttgctgctgctgaagtccgtggtgtacttcgccatcatcacatgctgcctgctgatggctatggtcaagcggaaggacagccgggga

SEQ ID NO: 6233 - DNA, 2181 bp, synthetic construct
  source 1..2181: mol_type = other DNA
atggccttaccagtgaccgccttgctcctgccgctggccttgctgctccacgccgccaggccggaccagagcgtgctgacacagcctcctagcgtgtcagtggcccctggcaagaccgccagaatcccctgcgagggcaactacatcggcagcagcaacgtgcactggtatcagcagaagcccggccaggctcccgtgctcgtgatccacttcgacagcgacagacccagcggcatccccgacagattcagcggcagcaacagcggcaacatggctaccctgaccatcagcagagtggaagccggggacgaggccgactactactgtcaagtgtgggagaaccacggctgggtgttcggcggaggcaccaagctgacagtgctgtctctcgagatccagaaccctgatcctgccgtgtaccagctgcgggatagcaagagcagcgacaagagcgtgtgtctgttcaccgacttcgacagccagaccaacgtgtcccagagcaaggactccgacgtgtacatcaccgataagtgcgtgctggacatgcggagcatggacttcaagagcaactccgccgtggcctggtccaacaagtccgatttcgcctgcgccaacgccttcaacaacagcattatccccgaggacacattcttcccaagccccgagagcagcgactccaccgaccacgtgaagcccaaagagacagagaacaccaagcagcccagcaagagctgccacaagcccaaggccatcgtgcacaccgagaaagtgaacatgatgagcctgaccgtgctgggcctgcggatgctgttcgccaaaaccgtggccgtgaacttcctgctgaccgccaagctgttcttcctcctcaccgcccgcgccaagagaagcggatctggcgtgaagcagaccctgaatttcgacctgctgaagctggctggcgacgtggaatccaacccaggccctactagtatggactggatttggcgcatccttttccttgtcggcgctgctaccggcgcgcattccttcgaagaggtgcaactggtggaaacaggcggcggactggtgcagcctggcgagtctctgagactgagctgtgccgccagcggcttcaccttcagcgactacgagatgaactgggtgcgccaggcccctggaaagggcctggaatgggtgtcctacatcagcagctccggcagcaccatctactacgccgacagcgtgaagggccggtttaccatctaccgggacaacgccaagaacagcctgtacctccagatgaactccctgcgggccgaggacaccgccctgtactattgtgccagagcctggggcgtgggaccccctgattattggggacagggcaccctcgtgaccgtgtcctctacgcgtgaggacctgaagaacgtgttcccacctgaggtggccgtgttcgagcctagcgaggccgagatcagccacacccagaaagccaccctcgtgtgcctggctaccggcttctaccccgaccatgtggaactgtcttggtgggtcaacggcaaagaggtgcacagcggcgtgtgtaccgacccccagccactgaaagaacagcccgccctgaacgacagccggtactgcctgagcagcagactgagagtgtccgccaccttctggcagaacccccggaaccacttcagatgccaggtgcagttctacggcctgagcgagaacgacgagtggacccaggacagagccaagcccgtgacccagatcgtgtctgccgaagcctggggcagagccgatgatgtgattaagatccactggcaggaaaagaagtccaacaccatcctgggcagccaggaaggcaacaccatgaagaccaacgacacctacatgaagttcagctggctgaccgtgcccgagaagtccctggacaaagaacacagatgcatcgtgcggcacgaaaacaacaagaacggcgtggaccaggaaatcatcttcccacccatcaagaccgatgtgattacaatggaccccaaggacaactgctccaaggacgccaacgataccctgctgctccagctgaccaacaccagcgcctactacatgtacttgttgctgctgctgaagtccgtggtgtacttcgccatcatcacatgctgcctgctgatggctatggtcaagcggaaggacagccgggga

SEQ ID NO: 6234 - DNA, 2205 bp, synthetic construct
  source 1..2205: mol_type = other DNA
atggccttaccagtgaccgccttgctcctgccgctggccttgctgctccacgccgccaggccggacatccagatgacccagagccccagcagcctgtctgccagcgtgggcgataccgtgaccatcacctgtcaggccaacggctacctgaactggtatcagcagcggagaggcaaggcccccaagctgctgatctacgacggcagcaagctggaaagaggcgtgcccagcagattcagcggcagaagatggggccaggagtacaacctgaccatcaacaacctccagcccgaggatattgccacatacttttgccaggtgtacgagttcgtggtgcccggcacacggctggacctgaagagaacagtggctgctcctctcgagatccagaaccctgatcctgccgtgtaccagctgcgggatagcaagagcagcgacaagagcgtgtgtctgttcaccgacttcgacagccagaccaacgtgtcccagagcaaggactccgacgtgtacatcaccgataagtgcgtgctggacatgcggagcatggacttcaagagcaactccgccgtggcctggtccaacaagtccgatttcgcctgcgccaacgccttcaacaacagcattatccccgaggacacattcttcccaagccccgagagcagcgactccaccgaccacgtgaagcccaaagagacagagaacaccaagcagcccagcaagagctgccacaagcccaaggccatcgtgcacaccgagaaagtgaacatgatgagcctgaccgtgctgggcctgcggatgctgttcgccaaaaccgtggccgtgaacttcctgctgaccgccaagctgttcttcctcctcaccgcccgcgccaagagaagcggatctggcgtgaagcagaccctgaatttcgacctgctgaagctggctggcgacgtggaatccaacccaggccctactagtatggactggatttggcgcatccttttccttgtcggcgctgctaccggcgcgcattccttcgaacaggtgcagctgctccagtctggcgctgccgtgacaaagcctggcgcttctgtgcgggtgtcctgtgaagccagcggctacaacatccgggactacttcatccactggtggcggcaggctccaggccagggactccagtgggtgggatggatcaaccccaagaccggccagcccaacaaccccagacagttccagggcagagtgtccctgaccagacacgccagctgggacttcgacaccttcagcttctacatggatctgaaggccctgcggagcgacgataccgccgtgtacttctgcgccagacagagaagcgactactgggatttcgacgtgtggggcagcggcacccaagtgacagtgtctagcgccagcaccaagggacccacgcgtgaggacctgaagaacgtgttcccacctgaggtggccgtgttcgagcctagcgaggccgagatcagccacacccagaaagccaccctcgtgtgcctggctaccggcttctaccccgaccatgtggaactgtcttggtgggtcaacggcaaagaggtgcacagcggcgtgtgtaccgacccccagccactgaaagaacagcccgccctgaacgacagccggtactgcctgagcagcagactgagagtgtccgccaccttctggcagaacccccggaaccacttcagatgccaggtgcagttctacggcctgagcgagaacgacgagtggacccaggacagagccaagcccgtgacccagatcgtgtctgccgaagcctggggcagagccgatgatgtgattaagatccactggcaggaaaagaagtccaacaccatcctgggcagccaggaaggcaacaccatgaagaccaacgacacctacatgaagttcagctggctgaccgtgcccgagaagtccctggacaaagaacacagatgcatcgtgcggcacgaaaacaacaagaacggcgtggaccaggaaatcatcttcccacccatcaagaccgatgtgattacaatggaccccaaggacaactgctccaaggacgccaacgataccctgctgctccagctgaccaacaccagcgcctactacatgtacttgttgctgctgctgaagtccgtggtgtacttcgccatcatcacatgctgcctgctgatggctatggtcaagcggaaggacagccgggga

SEQ ID NO: 6235 - DNA, 2223 bp, synthetic construct
  source 1..2223: mol_type = other DNA
atggccttaccagtgaccgccttgctcctgccgctggccttgctgctccacgccgccaggccgcagtctgccctgacacagcctcctagcgcctctggctctcccggccagagcatcaccatcagctgtaccggcaccagcaacaacttcgtgtcctggtatcagcagcacgccggcaaggcccccaagctcgtgatctacgacgtgaacaagcggcccagcggcgtgcccgatagattcagcggcagcaagagcggcaacaccgccagcctgacagtgtctggcctccagaccgatgacgaggccgtgtactactgcggcagcctcgtgggcaactgggacgtgatctttggcggaggcaccaagctgaccgtgctgctcgagatccagaaccctgatcctgccgtgtaccagctgcgggatagcaagagcagcgacaagagcgtgtgtctgttcaccgacttcgacagccagaccaacgtgtcccagagcaaggactccgacgtgtacatcaccgataagtgcgtgctggacatgcggagcatggacttcaagagcaactccgccgtggcctggtccaacaagtccgatttcgcctgcgccaacgccttcaacaacagcattatccccgaggacacattcttcccaagccccgagagcagcgactccaccgaccacgtgaagcccaaagagacagagaacaccaagcagcccagcaagagctgccacaagcccaaggccatcgtgcacaccgagaaagtgaacatgatgagcctgaccgtgctgggcctgcggatgctgttcgccaaaaccgtggccgtgaacttcctgctgaccgccaagctgttcttcctcctcaccgcccgcgccaagagaagcggatctggcgtgaagcagaccctgaatttcgacctgctgaagctggctggcgacgtggaatccaacccaggccctactagtatggactggatttggcgcatccttttccttgtcggcgctgctaccggcgcgcattccttcgaacagccccagctccaggaatctggccccacactggtggaagccagcgagacactgagcctgacctgtgccgtgtccggcgattctaccgccgcctgcaatagcttctggggctgggtgcgccagcctcctggaaagggactggaatgggtgggaagcctgagccactgcgccagctattggaaccggggctggacctaccacaaccccagcctgaagtccagactgaccctggccctggacacccccaagaacctggtgttcctgaagctgaacagcgtgacagccgccgacaccgccacctactactgtgccagatttggcggcgaggtgctgcggtacaccgactggcctaaacctgcctgggtggacctgtggggcagaggaacactcgtgaccgtgtccagcacgcgtgaggacctgaagaacgtgttcccacctgaggtggccgtgttcgagcctagcgaggccgagatcagccacacccagaaagccaccctcgtgtgcctggctaccggcttctaccccgaccatgtggaactgtcttggtgggtcaacggcaaagaggtgcacagcggcgtgtgtaccgacccccagccactgaaagaacagcccgccctgaacgacagccggtactgcctgagcagcagactgagagtgtccgccaccttctggcagaacccccggaaccacttcagatgccaggtgcagttctacggcctgagcgagaacgacgagtggacccaggacagagccaagcccgtgacccagatcgtgtctgccgaagcctggggcagagccgatgatgtgattaagatccactggcaggaaaagaagtccaacaccatcctgggcagccaggaaggcaacaccatgaagaccaacgacacctacatgaagttcagctggctgaccgtgcccgagaagtccctggacaaagaacacagatgcatcgtgcggcacgaaaacaacaagaacggcgtggaccaggaaatcatcttcccacccatcaagaccgatgtgattacaatggaccccaaggacaactgctccaaggacgccaacgataccctgctgctccagctgaccaacaccagcgcctactacatgtacttgttgctgctgctgaagtccgtggtgtacttcgccatcatcacatgctgcctgctgatggctatggtcaagcggaaggacagccgggga

SEQ ID NO: 6236 - DNA, 2178 bp, synthetic construct
  source 1..2178: mol_type = other DNA
atggccttaccagtgaccgccttgctcctgccgctggccttgctgctccacgccgccaggccggagatcgtgctgacacagagccctggcaccctgagcctgtctccaggcgagacagccatcatcagctgccggacaagccagtacggcagcctggcctggtatcagcagaggccaggacaggcccccagactcgtgatctacagcggcagcacaagagccgccggaatccccgatagattcagcggctccagatggggacccgactacaacctgaccatcagcaacctggaaagcggcgacttcggcgtgtactactgccagcagtacgagttcttcggccagggcaccaaggtgcaggtggacatcaaaagactcgagatccagaaccctgatcctgccgtgtaccagctgcgggatagcaagagcagcgacaagagcgtgtgtctgttcaccgacttcgacagccagaccaacgtgtcccagagcaaggactccgacgtgtacatcaccgataagtgcgtgctggacatgcggagcatggacttcaagagcaactccgccgtggcctggtccaacaagtccgatttcgcctgcgccaacgccttcaacaacagcattatccccgaggacacattcttcccaagccccgagagcagcgactccaccgaccacgtgaagcccaaagagacagagaacaccaagcagcccagcaagagctgccacaagcccaaggccatcgtgcacaccgagaaagtgaacatgatgagcctgaccgtgctgggcctgcggatgctgttcgccaaaaccgtggccgtgaacttcctgctgaccgccaagctgttcttcctcctcaccgcccgcgccaagagaagcggatctggcgtgaagcagaccctgaatttcgacctgctgaagctggctggcgacgtggaatccaacccaggccctactagtatggactggatttggcgcatccttttccttgtcggcgctgctaccggcgcgcattccttcgaacaggtgcagctggtgcagtctggcggccagatgaagaaacccggcgagagcatgagaatcagctgtcgggcctccggctacgagttcatcgactgcaccctgaactggatcagactggcccctggcaagcggcctgagtggatgggatggctgaagcctagaggcggagccgtgaactacgccagacctctccagggcagagtgaccatgaccagggacgtgtacagcgataccgccttcctggaactgcggagcctgaccgtggatgataccgccgtgtacttctgcaccagaggcaagaactgcgattacaactgggacttcgagcactggggcagaggcacccctgtgatcgtgtctagcacgcgtgaggacctgaagaacgtgttcccacctgaggtggccgtgttcgagcctagcgaggccgagatcagccacacccagaaagccaccctcgtgtgcctggctaccggcttctaccccgaccatgtggaactgtcttggtgggtcaacggcaaagaggtgcacagcggcgtgtgtaccgacccccagccactgaaagaacagcccgccctgaacgacagccggtactgcctgagcagcagactgagagtgtccgccaccttctggcagaacccccggaaccacttcagatgccaggtgcagttctacggcctgagcgagaacgacgagtggacccaggacagagccaagcccgtgacccagatcgtgtctgccgaagcctggggcagagccgatgatgtgattaagatccactggcaggaaaagaagtccaacaccatcctgggcagccaggaaggcaacaccatgaagaccaacgacacctacatgaagttcagctggctgaccgtgcccgagaagtccctggacaaagaacacagatgcatcgtgcggcacgaaaacaacaagaacggcgtggaccaggaaatcatcttcccacccatcaagaccgatgtgattacaatggaccccaaggacaactgctccaaggacgccaacgataccctgctgctccagctgaccaacaccagcgcctactacatgtacttgttgctgctgctgaagtccgtggtgtacttcgccatcatcacatgctgcctgctgatggctatggtcaagcggaaggacagccgggga

SEQ ID NO: 6237 - DNA, 2208 bp, synthetic construct
  source 1..2208: mol_type = other DNA
atggccttaccagtgaccgccttgctcctgccgctggccttgctgctccacgccgccaggccggagctggtgctgacacagagccctggcaccctgtctctgtctgccggcgaaagagccaccctgagctgtagagccagccagagcgtgtcctctggcagcctggcttggtatcagcagaagccaggccaggcccccagactgctgatctacggcgcttctaccagagccaccggcatccccgatagattcagcggctctggctccggcaccgacttcaccctgacaatcggcagactggaacccgaggacctggccgtgtactactgccagcagtacggcaccagcccctacacattcggccagggcaccaagctggaaatcctcgagatccagaaccctgatcctgccgtgtaccagctgcgggatagcaagagcagcgacaagagcgtgtgtctgttcaccgacttcgacagccagaccaacgtgtcccagagcaaggactccgacgtgtacatcaccgataagtgcgtgctggacatgcggagcatggacttcaagagcaactccgccgtggcctggtccaacaagtccgatttcgcctgcgccaacgccttcaacaacagcattatccccgaggacacattcttcccaagccccgagagcagcgactccaccgaccacgtgaagcccaaagagacagagaacaccaagcagcccagcaagagctgccacaagcccaaggccatcgtgcacaccgagaaagtgaacatgatgagcctgaccgtgctgggcctgcggatgctgttcgccaaaaccgtggccgtgaacttcctgctgaccgccaagctgttcttcctcctcaccgcccgcgccaagagaagcggatctggcgtgaagcagaccctgaatttcgacctgctgaagctggctggcgacgtggaatccaacccaggccctactagtatggactggatttggcgcatccttttccttgtcggcgctgctaccggcgcgcattccttcgaactggaacagagcggagccgaagtgaagaaacccggcagcagcgtgcaggtgtcctgcaaagcaagcggcggcaccttctctatgtacggcttcaactgggtgcgccaggctcctggacacggcctggaatggatgggcggcatcatccccatcttcggcacctccaactacgcccagaaattccggggcagagtgaccttcaccgccgaccaggccacaagcaccgcctacatggaactgaccaacctgcggagcgacgacaccgccgtgtattattgcgccagagacttcggccccgactgggaggatggcgacagctacgatggcagcggcagaggcttcttcgacttctggggccagggaacccttgtgaccgtgtcctcaacgcgtgaggacctgaagaacgtgttcccacctgaggtggccgtgttcgagcctagcgaggccgagatcagccacacccagaaagccaccctcgtgtgcctggctaccggcttctaccccgaccatgtggaactgtcttggtgggtcaacggcaaagaggtgcacagcggcgtgtgtaccgacccccagccactgaaagaacagcccgccctgaacgacagccggtactgcctgagcagcagactgagagtgtccgccaccttctggcagaacccccggaaccacttcagatgccaggtgcagttctacggcctgagcgagaacgacgagtggacccaggacagagccaagcccgtgacccagatcgtgtctgccgaagcctggggcagagccgatgatgtgattaagatccactggcaggaaaagaagtccaacaccatcctgggcagccaggaaggcaacaccatgaagaccaacgacacctacatgaagttcagctggctgaccgtgcccgagaagtccctggacaaagaacacagatgcatcgtgcggcacgaaaacaacaagaacggcgtggaccaggaaatcatcttcccacccatcaagaccgatgtgattacaatggaccccaaggacaactgctccaaggacgccaacgataccctgctgctccagctgaccaacaccagcgcctactacatgtacttgttgctgctgctgaagtccgtggtgtacttcgccatcatcacatgctgcctgctgatggctatggtcaagcggaaggacagccgggga

SEQ ID NO: 6238 - DNA, 2148 bp, synthetic construct
  source 1..2148: mol_type = other DNA
atggccttaccagtgaccgccttgctcctgccgctggccttgctgctccacgccgccaggccggacatccagatgacccagagccccagcagcctgtctgccagcgtgggcgacagagtgaccatcacctgtcaggccagccaggacatcaacaactacctgaactggtatcagcagaagcccggcaaggcccccaagctgctgatctacgacgccagcaatctgcagaccggcgtgcccagcagattttccggctctggcagcggcaccgacttcaccttcaccatcgaggacattgccacctactactgccagcagtacaccttcggccctggcaccaaggtggacatcaaactcgagatccagaaccctgatcctgccgtgtaccagctgcgggatagcaagagcagcgacaagagcgtgtgtctgttcaccgacttcgacagccagaccaacgtgtcccagagcaaggactccgacgtgtacatcaccgataagtgcgtgctggacatgcggagcatggacttcaagagcaactccgccgtggcctggtccaacaagtccgatttcgcctgcgccaacgccttcaacaacagcattatccccgaggacacattcttcccaagccccgagagcagcgactccaccgaccacgtgaagcccaaagagacagagaacaccaagcagcccagcaagagctgccacaagcccaaggccatcgtgcacaccgagaaagtgaacatgatgagcctgaccgtgctgggcctgcggatgctgttcgccaaaaccgtggccgtgaacttcctgctgaccgccaagctgttcttcctcctcaccgcccgcgccaagagaagcggatctggcgtgaagcagaccctgaatttcgacctgctgaagctggctggcgacgtggaatccaacccaggccctactagtatggactggatttggcgcatccttttccttgtcggcgctgctaccggcgcgcattccttcgaagaagtgcaactgctggaatctggcggcggactggtgcagcctggcggatctctgagactgagctgtgccgccagcggcttcacctttagctggtacagcatgacctgggtgcgccaggcccctggcaaaggactggaatgggtgtccagcatcgtgccctggggcgatttcacccagtacgccgatagcgtgaagggccggttcaccatcagccgggacaacagcaagaacaccctgtacctgcagatgaacagcctgcgggccgaggacaccgccgtgtactattgtgccaagggacctggctggggcagcttcgatctgtggggcagaggaacccttgtgaccgtgtccagcacgcgtgaggacctgaagaacgtgttcccacctgaggtggccgtgttcgagcctagcgaggccgagatcagccacacccagaaagccaccctcgtgtgcctggctaccggcttctaccccgaccatgtggaactgtcttggtgggtcaacggcaaagaggtgcacagcggcgtgtgtaccgacccccagccactgaaagaacagcccgccctgaacgacagccggtactgcctgagcagcagactgagagtgtccgccaccttctggcagaacccccggaaccacttcagatgccaggtgcagttctacggcctgagcgagaacgacgagtggacccaggacagagccaagcccgtgacccagatcgtgtctgccgaagcctggggcagagccgatgatgtgattaagatccactggcaggaaaagaagtccaacaccatcctgggcagccaggaaggcaacaccatgaagaccaacgacacctacatgaagttcagctggctgaccgtgcccgagaagtccctggacaaagaacacagatgcatcgtgcggcacgaaaacaacaagaacggcgtggaccaggaaatcatcttcccacccatcaagaccgatgtgattacaatggaccccaaggacaactgctccaaggacgccaacgataccctgctgctccagctgaccaacaccagcgcctactacatgtacttgttgctgctgctgaagtccgtggtgtacttcgccatcatcacatgctgcctgctgatggctatggtcaagcggaaggacagccgggga

SEQ ID NO: 6239 - DNA, 2178 bp, synthetic construct
  source 1..2178: mol_type = other DNA
atggccttaccagtgaccgccttgctcctgccgctggccttgctgctccacgccgccaggccggacatccagatgacccagagccccagcagcctgtctgccagcgtgggcgacagagtgaccatcacctgtaccgccagcctgagcgtgtccagcacctacctgcactggtatcagcagaagcccggcagcagccccaagctgtggatctacagcaccagcaacctggcctccggcgtgcccagcagattttctggcagcggctctggcaccagctacaccctgaccatcagctccctccagcccgaggacttcgccacctactactgccaccagtaccacagaagccccctgacctttggcggaggcaccaaggtggaaatcaagagactcgagatccagaaccctgatcctgccgtgtaccagctgcgggatagcaagagcagcgacaagagcgtgtgtctgttcaccgacttcgacagccagaccaacgtgtcccagagcaaggactccgacgtgtacatcaccgataagtgcgtgctggacatgcggagcatggacttcaagagcaactccgccgtggcctggtccaacaagtccgatttcgcctgcgccaacgccttcaacaacagcattatccccgaggacacattcttcccaagccccgagagcagcgactccaccgaccacgtgaagcccaaagagacagagaacaccaagcagcccagcaagagctgccacaagcccaaggccatcgtgcacaccgagaaagtgaacatgatgagcctgaccgtgctgggcctgcggatgctgttcgccaaaaccgtggccgtgaacttcctgctgaccgccaagctgttcttcctcctcaccgcccgcgccaagagaagcggatctggcgtgaagcagaccctgaatttcgacctgctgaagctggctggcgacgtggaatccaacccaggccctactagtatggactggatttggcgcatccttttccttgtcggcgctgctaccggcgcgcattccttcgaagaagtgcaactggtggaatctggcggcggactggtgcagcctggcggatctctgagactgagctgtgccgccagcggcttcagcctgaccaaatacggcgtgcactgggtgcgccaggcccctggaaaaggactggaatgggtgggagtgaagtgggctggcggctccaccgactacaacagcgccctgatgagccggttcaccatcagcaaggacaacgccaagaacagcctgtacctccagatgaactccctgcgggccgaggacaccgccgtgtactactgtgccagagatcaccgggacgctatggactactggggccagggaacactcgtgaccgtgtcctctacgcgtgaggacctgaagaacgtgttcccacctgaggtggccgtgttcgagcctagcgaggccgagatcagccacacccagaaagccaccctcgtgtgcctggctaccggcttctaccccgaccatgtggaactgtcttggtgggtcaacggcaaagaggtgcacagcggcgtgtgtaccgacccccagccactgaaagaacagcccgccctgaacgacagccggtactgcctgagcagcagactgagagtgtccgccaccttctggcagaacccccggaaccacttcagatgccaggtgcagttctacggcctgagcgagaacgacgagtggacccaggacagagccaagcccgtgacccagatcgtgtctgccgaagcctggggcagagccgatgatgtgattaagatccactggcaggaaaagaagtccaacaccatcctgggcagccaggaaggcaacaccatgaagaccaacgacacctacatgaagttcagctggctgaccgtgcccgagaagtccctggacaaagaacacagatgcatcgtgcggcacgaaaacaacaagaacggcgtggaccaggaaatcatcttcccacccatcaagaccgatgtgattacaatggaccccaaggacaactgctccaaggacgccaacgataccctgctgctccagctgaccaacaccagcgcctactacatgtacttgttgctgctgctgaagtccgtggtgtacttcgccatcatcacatgctgcctgctgatggctatggtcaagcggaaggacagccgggga

SEQ ID NO: 6240 - DNA, 2190 bp, synthetic construct
  source 1..2190: mol_type = other DNA
atggccttaccagtgaccgccttgctcctgccgctggccttgctgctccacgccgccaggccggacatccagatgacccagagccccagcagcctgtctgccagcgtgggcgacagagtgaccatcacatgcaaggccagccaggacgtgggaacagccgtggcctggtatcagcagaagcctggcaaggcccccaagctgctgatctacagcgccagctacagatccaccggcgtgcccagcagattttccggctctggcagcggcaccgacttcaccctgaccatctctagcctccagcccgaggacttcgccacctactactgccagcaccactactccgccccctggacatttggcggaggcaccaaggtggaaatcaagctcgagatccagaaccctgatcctgccgtgtaccagctgcgggatagcaagagcagcgacaagagcgtgtgtctgttcaccgacttcgacagccagaccaacgtgtcccagagcaaggactccgacgtgtacatcaccgataagtgcgtgctggacatgcggagcatggacttcaagagcaactccgccgtggcctggtccaacaagtccgatttcgcctgcgccaacgccttcaacaacagcattatccccgaggacacattcttcccaagccccgagagcagcgactccaccgaccacgtgaagcccaaagagacagagaacaccaagcagcccagcaagagctgccacaagcccaaggccatcgtgcacaccgagaaagtgaacatgatgagcctgaccgtgctgggcctgcggatgctgttcgccaaaaccgtggccgtgaacttcctgctgaccgccaagctgttcttcctcctcaccgcccgcgccaagagaagcggatctggcgtgaagcagaccctgaatttcgacctgctgaagctggctggcgacgtggaatccaacccaggccctactagtatggactggatttggcgcatccttttccttgtcggcgctgctaccggcgcgcattccttcgaagaagtgcaactggtggaatcaggcggcggactggtgcagcctggcggatctctgagactgagctgtgccgccagcggcttcaccttcagcagaaacggcatgagctgggtgcgccaggcccctggaaaaggactggaatgggtggcaaccgtgtccagcggcggcagctacatctactacgccgacagcgtgaagggccggttcaccatctccagagacaacgccaagaacagcctgtacctccagatgaactccctgcgggccgaggacaccgccgtgtactattgtgccagacagggcaccaccgccctggctaccagattcttcgatgtgtggggccagggcaccctcgtgaccgtgtcatctacgcgtgaggacctgaagaacgtgttcccacctgaggtggccgtgttcgagcctagcgaggccgagatcagccacacccagaaagccaccctcgtgtgcctggctaccggcttctaccccgaccatgtggaactgtcttggtgggtcaacggcaaagaggtgcacagcggcgtgtgtaccgacccccagccactgaaagaacagcccgccctgaacgacagccggtactgcctgagcagcagactgagagtgtccgccaccttctggcagaacccccggaaccacttcagatgccaggtgcagttctacggcctgagcgagaacgacgagtggacccaggacagagccaagcccgtgacccagatcgtgtctgccgaagcctggggcagagccgatgatgtgattaagatccactggcaggaaaagaagtccaacaccatcctgggcagccaggaaggcaacaccatgaagaccaacgacacctacatgaagttcagctggctgaccgtgcccgagaagtccctggacaaagaacacagatgcatcgtgcggcacgaaaacaacaagaacggcgtggaccaggaaatcatcttcccacccatcaagaccgatgtgattacaatggaccccaaggacaactgctccaaggacgccaacgataccctgctgctccagctgaccaacaccagcgcctactacatgtacttgttgctgctgctgaagtccgtggtgtacttcgccatcatcacatgctgcctgctgatggctatggtcaagcggaaggacagccgggga

SEQ ID NO: 6241 - DNA, 2178 bp, synthetic construct
  source 1..2178: mol_type = other DNA
atggccttaccagtgaccgccttgctcctgccgctggccttgctgctccacgccgccaggccggacatccagatgacccagagcccccctagcctgtctgcctctgtgggcggcaaagtgaccatcacatgcaaggccagccaggacatcgaccgctacatggcctggtatcaggacaagcccggcaagggacccaagctgctgatccacgataccagcaccctccagcccggcatccccagcagattttctggcagcggctccggcagagactacagcttcagcatcagcaacctggaacccgaggacattgccacctactactgcctccagtacgacaacctgtggaccttcggcggaggcaccaagctggaaatcaagagactcgagatccagaaccctgatcctgccgtgtaccagctgcgggatagcaagagcagcgacaagagcgtgtgtctgttcaccgacttcgacagccagaccaacgtgtcccagagcaaggactccgacgtgtacatcaccgataagtgcgtgctggacatgcggagcatggacttcaagagcaactccgccgtggcctggtccaacaagtccgatttcgcctgcgccaacgccttcaacaacagcattatccccgaggacacattcttcccaagccccgagagcagcgactccaccgaccacgtgaagcccaaagagacagagaacaccaagcagcccagcaagagctgccacaagcccaaggccatcgtgcacaccgagaaagtgaacatgatgagcctgaccgtgctgggcctgcggatgctgttcgccaaaaccgtggccgtgaacttcctgctgaccgccaagctgttcttcctcctcaccgcccgcgccaagagaagcggatctggcgtgaagcagaccctgaatttcgacctgctgaagctggctggcgacgtggaatccaacccaggccctactagtatggactggatttggcgcatccttttccttgtcggcgctgctaccggcgcgcattccttcgaacaggtgcaactggtgcagagcggagccgagcttgtgaagcctggcgcttccgtgaagatgagctgcaaagccagcggctacatcttcaccaactacaacatccactgggtcaagaagtccccaggccagggcctggaatggatcggagccatctaccccggaaacggcgacgccccttacagccagaagttccaggacagagccaccctgaccgccgacaccagcagcagcaccacctacatggaactgagcagcctgaccagcgaggacagcgccgtgtactattgcgtgcgggccaactgggatgtggccttcgcctattggggccagggcacactggtgtccgtgtcctctacgcgtgaggacctgaagaacgtgttcccacctgaggtggccgtgttcgagcctagcgaggccgagatcagccacacccagaaagccaccctcgtgtgcctggctaccggcttctaccccgaccatgtggaactgtcttggtgggtcaacggcaaagaggtgcacagcggcgtgtgtaccgacccccagccactgaaagaacagcccgccctgaacgacagccggtactgcctgagcagcagactgagagtgtccgccaccttctggcagaacccccggaaccacttcagatgccaggtgcagttctacggcctgagcgagaacgacgagtggacccaggacagagccaagcccgtgacccagatcgtgtctgccgaagcctggggcagagccgatgatgtgattaagatccactggcaggaaaagaagtccaacaccatcctgggcagccaggaaggcaacaccatgaagaccaacgacacctacatgaagttcagctggctgaccgtgcccgagaagtccctggacaaagaacacagatgcatcgtgcggcacgaaaacaacaagaacggcgtggaccaggaaatcatcttcccacccatcaagaccgatgtgattacaatggaccccaaggacaactgctccaaggacgccaacgataccctgctgctccagctgaccaacaccagcgcctactacatgtacttgttgctgctgctgaagtccgtggtgtacttcgccatcatcacatgctgcctgctgatggctatggtcaagcggaaggacagccgggga

SEQ ID NO: 6242 - DNA, 2181 bp, synthetic construct
  source 1..2181: mol_type = other DNA
atggccttaccagtgaccgccttgctcctgccgctggccttgctgctccacgccgccaggccggacatccagatgacccagagccctgccagcctgtctgcctctgtgggcgagacagtgaccatcacctgtcgggtgtccggcaacatccacaactacctggcctggtatcagcagaagcagggcaagagcccccaactgctggtgtacaacgccaagaccctggccgatggcgtgcccagcagattttctggctctggcagcggcacccagtacagcctgaagatcaacagcctccagcccgaggacttcggcagctactactgccagcacttctggtccaacccctacaccttcggcggaggcaccaagctggaaatcaagctcgagatccagaaccctgatcctgccgtgtaccagctgcgggatagcaagagcagcgacaagagcgtgtgtctgttcaccgacttcgacagccagaccaacgtgtcccagagcaaggactccgacgtgtacatcaccgataagtgcgtgctggacatgcggagcatggacttcaagagcaactccgccgtggcctggtccaacaagtccgatttcgcctgcgccaacgccttcaacaacagcattatccccgaggacacattcttcccaagccccgagagcagcgactccaccgaccacgtgaagcccaaagagacagagaacaccaagcagcccagcaagagctgccacaagcccaaggccatcgtgcacaccgagaaagtgaacatgatgagcctgaccgtgctgggcctgcggatgctgttcgccaaaaccgtggccgtgaacttcctgctgaccgccaagctgttcttcctcctcaccgcccgcgccaagagaagcggatctggcgtgaagcagaccctgaatttcgacctgctgaagctggctggcgacgtggaatccaacccaggccctactagtatggactggatttggcgcatccttttccttgtcggcgctgctaccggcgcgcattccttcgaacaggtgcaactccagcagtctggcgcttccgtgaaggtgtcctgcaaggccagcgaactcgtgcggcctggcacaggctacgccttcaccaattacctgatcgagtgggtcaagcagaggcccggacagggcctggaatggatcggagtgattaacccaggcagcggcggcaccaactacaacgagaagttcaagggcaaggccaccctgaccgccgacaagagcagcagcacagcctacatgcaactgagcagcctgaccagcgacgacagcgccgtgtacttctgcgcccggtacagaagctacgactggtacttcgacgtgtggggagccggcaccaccgtgacagtgtcatctacgcgtgaggacctgaagaacgtgttcccacctgaggtggccgtgttcgagcctagcgaggccgagatcagccacacccagaaagccaccctcgtgtgcctggctaccggcttctaccccgaccatgtggaactgtcttggtgggtcaacggcaaagaggtgcacagcggcgtgtgtaccgacccccagccactgaaagaacagcccgccctgaacgacagccggtactgcctgagcagcagactgagagtgtccgccaccttctggcagaacccccggaaccacttcagatgccaggtgcagttctacggcctgagcgagaacgacgagtggacccaggacagagccaagcccgtgacccagatcgtgtctgccgaagcctggggcagagccgatgatgtgattaagatccactggcaggaaaagaagtccaacaccatcctgggcagccaggaaggcaacaccatgaagaccaacgacacctacatgaagttcagctggctgaccgtgcccgagaagtccctggacaaagaacacagatgcatcgtgcggcacgaaaacaacaagaacggcgtggaccaggaaatcatcttcccacccatcaagaccgatgtgattacaatggaccccaaggacaactgctccaaggacgccaacgataccctgctgctccagctgaccaacaccagcgcctactacatgtacttgttgctgctgctgaagtccgtggtgtacttcgccatcatcacatgctgcctgctgatggctatggtcaagcggaaggacagccgggga

SEQ ID NO: 6243 - DNA, 2178 bp, synthetic construct
  source 1..2178: mol_type = other DNA
atggccttaccagtgaccgccttgctcctgccgctggccttgctgctccacgccgccaggccggacatccagatgacccagagcttcagcagcctgagcgccagcgtgggcgacagagtgaccatcacctgtagagccagccaggacatcagcaactacctgaactggtatcagcagaagcccggcaaggcccccaagctgctgatctactacaccagcagactgcacagcggcgtgcccagcagattttctggcagcggctccggcaccgactacaccctgacaatcagctccctgcagcccgaggacttcgctacctacttctgtcagcaaggcaacaccctgccctggacctttggcggaggcaccaagctggaaatcaagagactcgagatccagaaccctgatcctgccgtgtaccagctgcgggatagcaagagcagcgacaagagcgtgtgtctgttcaccgacttcgacagccagaccaacgtgtcccagagcaaggactccgacgtgtacatcaccgataagtgcgtgctggacatgcggagcatggacttcaagagcaactccgccgtggcctggtccaacaagtccgatttcgcctgcgccaacgccttcaacaacagcattatccccgaggacacattcttcccaagccccgagagcagcgactccaccgaccacgtgaagcccaaagagacagagaacaccaagcagcccagcaagagctgccacaagcccaaggccatcgtgcacaccgagaaagtgaacatgatgagcctgaccgtgctgggcctgcggatgctgttcgccaaaaccgtggccgtgaacttcctgctgaccgccaagctgttcttcctcctcaccgcccgcgccaagagaagcggatctggcgtgaagcagaccctgaatttcgacctgctgaagctggctggcgacgtggaatccaacccaggccctactagtatggactggatttggcgcatccttttccttgtcggcgctgctaccggcgcgcattccttcgaagaagtgcaactggtgcagtccggcggagggctggtgcagagcggaggatctctgagactgagctgcagagccagcggctacaccttcacccggtactggatgctgtgggtgcgccagaggccaggcaagggactggaatgggtggccgagatcaacccccggaacgaccggaccaactacaacgagaagttcaagacccggttcaccatcagcgtggacagaagcaagaacaccctgtacctgcagatggacagcctgcgggccgaggataccgccgtgtacttttgtgctctgggaggcggctacgctatggactactggggccagggaacccttgtgaccgtgtcctctacgcgtgaggacctgaagaacgtgttcccacctgaggtggccgtgttcgagcctagcgaggccgagatcagccacacccagaaagccaccctcgtgtgcctggctaccggcttctaccccgaccatgtggaactgtcttggtgggtcaacggcaaagaggtgcacagcggcgtgtgtaccgacccccagccactgaaagaacagcccgccctgaacgacagccggtactgcctgagcagcagactgagagtgtccgccaccttctggcagaacccccggaaccacttcagatgccaggtgcagttctacggcctgagcgagaacgacgagtggacccaggacagagccaagcccgtgacccagatcgtgtctgccgaagcctggggcagagccgatgatgtgattaagatccactggcaggaaaagaagtccaacaccatcctgggcagccaggaaggcaacaccatgaagaccaacgacacctacatgaagttcagctggctgaccgtgcccgagaagtccctggacaaagaacacagatgcatcgtgcggcacgaaaacaacaagaacggcgtggaccaggaaatcatcttcccacccatcaagaccgatgtgattacaatggaccccaaggacaactgctccaaggacgccaacgataccctgctgctccagctgaccaacaccagcgcctactacatgtacttgttgctgctgctgaagtccgtggtgtacttcgccatcatcacatgctgcctgctgatggctatggtcaagcggaaggacagccgggga

SEQ ID NO: 6244 - DNA, 2181 bp, synthetic construct
  source 1..2181: mol_type = other DNA
atggccttaccagtgaccgccttgctcctgccgctggccttgctgctccacgccgccaggccggacatccagatgacacagtctccggcgtcactgtccgcctccgtgggggagactgtgactattatttgtagggcatcagttaacatctactcttatttggcctggtaccagcagaagcaaggcaagagtcctcagctgctggtgtataatgcgaagatcctggcagagggcgtgccgagccggttctccggcagcggctcaggtacccaattttccctcaagatcaattcactgcagccagaggactttggcagttactattgtcaacaccactacggcacattcactttcgggtccggtacaaaattggagattaagcgactcgagatccagaaccctgatcctgccgtgtaccagctgcgggatagcaagagcagcgacaagagcgtgtgtctgttcaccgacttcgacagccagaccaacgtgtcccagagcaaggactccgacgtgtacatcaccgataagtgcgtgctggacatgcggagcatggacttcaagagcaactccgccgtggcctggtccaacaagtccgatttcgcctgcgccaacgccttcaacaacagcattatccccgaggacacattcttcccaagccccgagagcagcgactccaccgaccacgtgaagcccaaagagacagagaacaccaagcagcccagcaagagctgccacaagcccaaggccatcgtgcacaccgagaaagtgaacatgatgagcctgaccgtgctgggcctgcggatgctgttcgccaaaaccgtggccgtgaacttcctgctgaccgccaagctgttcttcctcctcaccgcccgcgccaagagaagcggatctggcgtgaagcagaccctgaatttcgacctgctgaagctggctggcgacgtggaatccaacccaggccctactagtatggactggatttggcgcatccttttccttgtcggcgctgctaccggcgcgcattccttcgaacaggtacagttgaaagaaagcgggcctggactggtagcgccttcccaatctctctccatcacgtgcaccatctctggcttctccctgacttcctatggagttcactgggtgaggcagccccccggcaagggactggaatggctggtcgtcatctggtccgacgggtccacaacctacaactccgctctgaaaagtcggctctctatttctaaagataatagcaagagccaggtgtttctgaaaatgaactctctgcagaccgatgatacggccatttactactgcgcttcacactatggctcaaccttggcattcgcttcctggggccacggaacactggtgaccgtttccgcagccacgcgtgaggacctgaagaacgtgttcccacctgaggtggccgtgttcgagcctagcgaggccgagatcagccacacccagaaagccaccctcgtgtgcctggctaccggcttctaccccgaccatgtggaactgtcttggtgggtcaacggcaaagaggtgcacagcggcgtgtgtaccgacccccagccactgaaagaacagcccgccctgaacgacagccggtactgcctgagcagcagactgagagtgtccgccaccttctggcagaacccccggaaccacttcagatgccaggtgcagttctacggcctgagcgagaacgacgagtggacccaggacagagccaagcccgtgacccagatcgtgtctgccgaagcctggggcagagccgatgatgtgattaagatccactggcaggaaaagaagtccaacaccatcctgggcagccaggaaggcaacaccatgaagaccaacgacacctacatgaagttcagctggctgaccgtgcccgagaagtccctggacaaagaacacagatgcatcgtgcggcacgaaaacaacaagaacggcgtggaccaggaaatcatcttcccacccatcaagaccgatgtgattacaatggaccccaaggacaactgctccaaggacgccaacgataccctgctgctccagctgaccaacaccagcgcctactacatgtacttgttgctgctgctgaagtccgtggtgtacttcgccatcatcacatgctgcctgctgatggctatggtcaagcggaaggacagccgggga

SEQ ID NO: 6245 - DNA, 2205 bp, synthetic construct
  source 1..2205: mol_type = other DNA
atggccttaccagtgaccgccttgctcctgccgctggccttgctgctccacgccgccaggccggacattgtgatgacccagtctcacaaattcatgtccacatcagtaggagacagggtcagcgtcacctgcaaggccagtcagaatgtgggtaataatgtagcctggtatcaacagaaaccagggcaatctcctaaagtactgatttactcggcatcctaccggtacagtggagtccctgatcgcttcacaggcagtggatctgggacagatttcactctcaccatcagtaatgtgcagtctgaagacttggcagagtatttctgtcagcaatataacacctatccattcacgttcggctcggggacaaagttggaaataaaactcgagatccagaaccctgatcctgccgtgtaccagctgcgggatagcaagagcagcgacaagagcgtgtgtctgttcaccgacttcgacagccagaccaacgtgtcccagagcaaggactccgacgtgtacatcaccgataagtgcgtgctggacatgcggagcatggacttcaagagcaactccgccgtggcctggtccaacaagtccgatttcgcctgcgccaacgccttcaacaacagcattatccccgaggacacattcttcccaagccccgagagcagcgactccaccgaccacgtgaagcccaaagagacagagaacaccaagcagcccagcaagagctgccacaagcccaaggccatcgtgcacaccgagaaagtgaacatgatgagcctgaccgtgctgggcctgcggatgctgttcgccaaaaccgtggccgtgaacttcctgctgaccgccaagctgttcttcctcctcaccgcccgcgccaagagaagcggatctggcgtgaagcagaccctgaatttcgacctgctgaagctggctggcgacgtggaatccaacccaggccctactagtatggactggatttggcgcatccttttccttgtcggcgctgctaccggcgcgcattccttcgaagaggtacagctggaggaaagcggtggaggactggtgcaacctggagggtctatgaagctctcttgcgtagcttctgggttcacgttctccaattactggatgaactgggtgcggcagtcccccgagaaaggcctggaatgggtagcagaaattcggttcaagtcccataactatgctacacactttgccgagtctgtcaaaggccggttcactattagtcgagacgacagcaagtcttcagtctacctgcagatgaataacttgcgggcagaggacacaggtatctactactgcaccaggagaatcggcaactccgactatgactggtggtactttgacgtctggggagcaggcaccagcgtgacggtgagttcagcctcaacgcgtgaggacctgaagaacgtgttcccacctgaggtggccgtgttcgagcctagcgaggccgagatcagccacacccagaaagccaccctcgtgtgcctggctaccggcttctaccccgaccatgtggaactgtcttggtgggtcaacggcaaagaggtgcacagcggcgtgtgtaccgacccccagccactgaaagaacagcccgccctgaacgacagccggtactgcctgagcagcagactgagagtgtccgccaccttctggcagaacccccggaaccacttcagatgccaggtgcagttctacggcctgagcgagaacgacgagtggacccaggacagagccaagcccgtgacccagatcgtgtctgccgaagcctggggcagagccgatgatgtgattaagatccactggcaggaaaagaagtccaacaccatcctgggcagccaggaaggcaacaccatgaagaccaacgacacctacatgaagttcagctggctgaccgtgcccgagaagtccctggacaaagaacacagatgcatcgtgcggcacgaaaacaacaagaacggcgtggaccaggaaatcatcttcccacccatcaagaccgatgtgattacaatggaccccaaggacaactgctccaaggacgccaacgataccctgctgctccagctgaccaacaccagcgcctactacatgtacttgttgctgctgctgaagtccgtggtgtacttcgccatcatcacatgctgcctgctgatggctatggtcaagcggaaggacagccgggga

SEQ ID NO: 6246 - DNA, 2184 bp, synthetic construct
  source 1..2184: mol_type = other DNA
atggccttaccagtgaccgccttgctcctgccgctggccttgctgctccacgccgccaggccggaccagatcgtgctgacccagtcccccgctattatgtccgcatcaccgggcgaaaaagtgacgatctcctgtagcgcttcatctagcgtctcctacatgtattggtatcaacagaaacctgggtctagcccaaagccgtggatctacagaaccagtaaccttgccagtggggtgccagcccgcttcagcggtagtggcagtggaacttcctatagcctcacaataagcaacatggaggctgaagatgccgctgcctattactgccagcagtaccacagttacccaaccacgttcggcgggggaactaagctcgaagtaaaactcgagatccagaaccctgatcctgccgtgtaccagctgcgggatagcaagagcagcgacaagagcgtgtgtctgttcaccgacttcgacagccagaccaacgtgtcccagagcaaggactccgacgtgtacatcaccgataagtgcgtgctggacatgcggagcatggacttcaagagcaactccgccgtggcctggtccaacaagtccgatttcgcctgcgccaacgccttcaacaacagcattatccccgaggacacattcttcccaagccccgagagcagcgactccaccgaccacgtgaagcccaaagagacagagaacaccaagcagcccagcaagagctgccacaagcccaaggccatcgtgcacaccgagaaagtgaacatgatgagcctgaccgtgctgggcctgcggatgctgttcgccaaaaccgtggccgtgaacttcctgctgaccgccaagctgttcttcctcctcaccgcccgcgccaagagaagcggatctggcgtgaagcagaccctgaatttcgacctgctgaagctggctggcgacgtggaatccaacccaggccctactagtatggactggatttggcgcatccttttccttgtcggcgctgctaccggcgcgcattccttcgaagaggtgcagctggtggaatctgggggcggcctggtccaacctaagggatcactcaagctctcttgtgcggccagcggattctctttcaatacctatgctatgaattgggtgagacaggcgcccggaaagggcctcgaatggatagcccatatccggtcaaaatcaaacaatttcgcaacctactatgcggactccgtgaaggaccgattttccatctcccgagatgcctccgagaatattctgttcctgcagatgaataacctcaagacagaggacaccgccatgtactactgtgtgcgccagggcggtgactttcccatggattactgggggcaggggaccagcgtgaccgtgagctctacgcgtgaggacctgaagaacgtgttcccacctgaggtggccgtgttcgagcctagcgaggccgagatcagccacacccagaaagccaccctcgtgtgcctggctaccggcttctaccccgaccatgtggaactgtcttggtgggtcaacggcaaagaggtgcacagcggcgtgtgtaccgacccccagccactgaaagaacagcccgccctgaacgacagccggtactgcctgagcagcagactgagagtgtccgccaccttctggcagaacccccggaaccacttcagatgccaggtgcagttctacggcctgagcgagaacgacgagtggacccaggacagagccaagcccgtgacccagatcgtgtctgccgaagcctggggcagagccgatgatgtgattaagatccactggcaggaaaagaagtccaacaccatcctgggcagccaggaaggcaacaccatgaagaccaacgacacctacatgaagttcagctggctgaccgtgcccgagaagtccctggacaaagaacacagatgcatcgtgcggcacgaaaacaacaagaacggcgtggaccaggaaatcatcttcccacccatcaagaccgatgtgattacaatggaccccaaggacaactgctccaaggacgccaacgataccctgctgctccagctgaccaacaccagcgcctactacatgtacttgttgctgctgctgaagtccgtggtgtacttcgccatcatcacatgctgcctgctgatggctatggtcaagcggaaggacagccgggga

SEQ ID NO: 6247 - DNA, 2181 bp, synthetic construct
  source 1..2181: mol_type = other DNA
atggccttaccagtgaccgccttgctcctgccgctggccttgctgctccacgccgccaggccggacgacatccagatgacccagagcagcagcagcttcagcgtgagcctgggcgacagagtgaccatcacctgcatggccagcgaggacatctacatcagactggcctggtaccagcagaagcccggcaacgcccccagactgctgatcagcgccgccaccagcctggagaccggcgtgcccagcagattcagcggcagcggcagcggcaaggactacaccctgagcatcaccagcctgcagaccgaggacgtgggcacctactactgccagcagtactggagcagcccctggaccttcggcggcggcaccaagctggagatcaacctcgagatccagaaccctgatcctgccgtgtaccagctgcgggatagcaagagcagcgacaagagcgtgtgtctgttcaccgacttcgacagccagaccaacgtgtcccagagcaaggactccgacgtgtacatcaccgataagtgcgtgctggacatgcggagcatggacttcaagagcaactccgccgtggcctggtccaacaagtccgatttcgcctgcgccaacgccttcaacaacagcattatccccgaggacacattcttcccaagccccgagagcagcgactccaccgaccacgtgaagcccaaagagacagagaacaccaagcagcccagcaagagctgccacaagcccaaggccatcgtgcacaccgagaaagtgaacatgatgagcctgaccgtgctgggcctgcggatgctgttcgccaaaaccgtggccgtgaacttcctgctgaccgccaagctgttcttcctcctcaccgcccgcgccaagagaagcggatctggcgtgaagcagaccctgaatttcgacctgctgaagctggctggcgacgtggaatccaacccaggccctactagtatggactggatttggcgcatccttttccttgtcggcgctgctaccggcgcgcattccttcgaagacgtgcagctgcaggagagcggccccggcctggtgaagcccagccagagcctgagcctgacctgcaccgtgaccggctacagcatcaccagcgactacacctggaactggatcagacagttccccggcaacaagctggagtggatgggctacatcacctacagcggcagcaccagctacaaccccagcctgaagagcagaaacagcatcaccagagacaccagcaagaaccagttcttcctgcagctgaacagcgtgaccaccgaggacaccgccacctactactgcgccagactgggcagaagatacacaatggactactggggccagggcaccagcgtgaccgtgagcagcacgcgtgaggacctgaagaacgtgttcccacctgaggtggccgtgttcgagcctagcgaggccgagatcagccacacccagaaagccaccctcgtgtgcctggctaccggcttctaccccgaccatgtggaactgtcttggtgggtcaacggcaaagaggtgcacagcggcgtgtgtaccgacccccagccactgaaagaacagcccgccctgaacgacagccggtactgcctgagcagcagactgagagtgtccgccaccttctggcagaacccccggaaccacttcagatgccaggtgcagttctacggcctgagcgagaacgacgagtggacccaggacagagccaagcccgtgacccagatcgtgtctgccgaagcctggggcagagccgatgatgtgattaagatccactggcaggaaaagaagtccaacaccatcctgggcagccaggaaggcaacaccatgaagaccaacgacacctacatgaagttcagctggctgaccgtgcccgagaagtccctggacaaagaacacagatgcatcgtgcggcacgaaaacaacaagaacggcgtggaccaggaaatcatcttcccacccatcaagaccgatgtgattacaatggaccccaaggacaactgctccaaggacgccaacgataccctgctgctccagctgaccaacaccagcgcctactacatgtacttgttgctgctgctgaagtccgtggtgtacttcgccatcatcacatgctgcctgctgatggctatggtcaagcggaaggacagccgggga

SEQ ID NO: 6248 - DNA, 2190 bp, synthetic construct
  source 1..2190: mol_type = other DNA
atggccttaccagtgaccgccttgctcctgccgctggccttgctgctccacgccgccaggccggacgacatccagatgacccagagccccagcagcctgtctgccagcgtgggcgacagagtgaccatcacctgtagagccagccagagcatcagcagctacctgaactggtatcagcagaagcccggcaaggcccccaaactgctgatctacgacgccagcaacctggaaaccggcgtgcccagcagattttccggcagcggctctggcaccgacttcaccttcaccatcagctccctccagcccgaggacattgccacctactactgccagcagtacgacaacctgcccctgacctttggcggaggcaccaaggtggacatcaagagactcgagatccagaaccctgatcctgccgtgtaccagctgcgggatagcaagagcagcgacaagagcgtgtgtctgttcaccgacttcgacagccagaccaacgtgtcccagagcaaggactccgacgtgtacatcaccgataagtgcgtgctggacatgcggagcatggacttcaagagcaactccgccgtggcctggtccaacaagtccgatttcgcctgcgccaacgccttcaacaacagcattatccccgaggacacattcttcccaagccccgagagcagcgactccaccgaccacgtgaagcccaaagagacagagaacaccaagcagcccagcaagagctgccacaagcccaaggccatcgtgcacaccgagaaagtgaacatgatgagcctgaccgtgctgggcctgcggatgctgttcgccaaaaccgtggccgtgaacttcctgctgaccgccaagctgttcttcctcctcaccgcccgcgccaagagaagcggatctggcgtgaagcagaccctgaatttcgacctgctgaagctggctggcgacgtggaatccaacccaggccctactagtatggactggatttggcgcatccttttccttgtcggcgctgctaccggcgcgcattccttcgaacaggtgcaactggtggaatctggcggcggagtggtgcagcctggcagaagcctgagactgagctgtgccgccagcggcttcacctttagcagctacgccatgcactgggtgcgccaggcccctggaaaaggcctggaatgggtggccgtgatctcctacgacggctccaacaagtattacgccgacagcgtgaagggccggttcaccatctccagagacaacagcaagaacaccctgtacctccagatgaacagcctgcgggccgaggacaccgccgtgtactattgtgccagggctcacaacagcagctcttggagcttcgactactggggccagggcaccctcgtgaccgtgtcatctacgcgtgaggacctgaagaacgtgttcccacctgaggtggccgtgttcgagcctagcgaggccgagatcagccacacccagaaagccaccctcgtgtgcctggctaccggcttctaccccgaccatgtggaactgtcttggtgggtcaacggcaaagaggtgcacagcggcgtgtgtaccgacccccagccactgaaagaacagcccgccctgaacgacagccggtactgcctgagcagcagactgagagtgtccgccaccttctggcagaacccccggaaccacttcagatgccaggtgcagttctacggcctgagcgagaacgacgagtggacccaggacagagccaagcccgtgacccagatcgtgtctgccgaagcctggggcagagccgatgatgtgattaagatccactggcaggaaaagaagtccaacaccatcctgggcagccaggaaggcaacaccatgaagaccaacgacacctacatgaagttcagctggctgaccgtgcccgagaagtccctggacaaagaacacagatgcatcgtgcggcacgaaaacaacaagaacggcgtggaccaggaaatcatcttcccacccatcaagaccgatgtgattacaatggaccccaaggacaactgctccaaggacgccaacgataccctgctgctccagctgaccaacaccagcgcctactacatgtacttgttgctgctgctgaagtccgtggtgtacttcgccatcatcacatgctgcctgctgatggctatggtcaagcggaaggacagccgggga

SEQ ID NO: 6249 - DNA, 2217 bp, synthetic construct
  source 1..2217: mol_type = other DNA
atggccttaccagtgaccgccttgctcctgccgctggccttgctgctccacgccgccaggccggacgacgtcgtgatgacccagagccctctgagcctgcctgtgtccctgggcgatcaggccagcatctcctgcagatccagccagagactggtgcacagcaacggcaacacctacctgcactggtatctgcagaagcccggccagagccccaagctgctgatctaccgggtgtccaacagattccccggcgtgcccgatagattcagcggctctggcagcggcaccgacttcaccctgaagatcagccgggtggaagccgaggacctgggcatctatttctgcagccagagcacccacgtgccctacacctttggcggaggcaccaagctggaaatcaagcggctcgagatccagaaccctgatcctgccgtgtaccagctgcgggatagcaagagcagcgacaagagcgtgtgtctgttcaccgacttcgacagccagaccaacgtgtcccagagcaaggactccgacgtgtacatcaccgataagtgcgtgctggacatgcggagcatggacttcaagagcaactccgccgtggcctggtccaacaagtccgatttcgcctgcgccaacgccttcaacaacagcattatccccgaggacacattcttcccaagccccgagagcagcgactccaccgaccacgtgaagcccaaagagacagagaacaccaagcagcccagcaagagctgccacaagcccaaggccatcgtgcacaccgagaaagtgaacatgatgagcctgaccgtgctgggcctgcggatgctgttcgccaaaaccgtggccgtgaacttcctgctgaccgccaagctgttcttcctcctcaccgcccgcgccaagagaagcggatctggcgtgaagcagaccctgaatttcgacctgctgaagctggctggcgacgtggaatccaacccaggccctactagtatggactggatttggcgcatccttttccttgtcggcgctgctaccggcgcgcattccttcgaagaagtgcggctgcagcagtctggccccgacctgattaagcctggggccagcgtgaagatgagctgcaaggccagcggctacaccttcaccggctacgtgatgcactgggtcaagcagaggccaggccagggcctggaatggatcggcttcatcaacccctacaacgacgacatccagagcaacgagcggttccggggcaaggccaccctgaccagcgataagagcagcaccaccgcctacatggaactgagcagcctgacctccgaggacagcgccgtgtactactgtgctaggggagccggctacaacttcgacggggcctacagattcttcgacttttggggccagggcaccacactgaccgtgtcctctacgcgtgaggacctgaagaacgtgttcccacctgaggtggccgtgttcgagcctagcgaggccgagatcagccacacccagaaagccaccctcgtgtgcctggctaccggcttctaccccgaccatgtggaactgtcttggtgggtcaacggcaaagaggtgcacagcggcgtgtgtaccgacccccagccactgaaagaacagcccgccctgaacgacagccggtactgcctgagcagcagactgagagtgtccgccaccttctggcagaacccccggaaccacttcagatgccaggtgcagttctacggcctgagcgagaacgacgagtggacccaggacagagccaagcccgtgacccagatcgtgtctgccgaagcctggggcagagccgatgatgtgattaagatccactggcaggaaaagaagtccaacaccatcctgggcagccaggaaggcaacaccatgaagaccaacgacacctacatgaagttcagctggctgaccgtgcccgagaagtccctggacaaagaacacagatgcatcgtgcggcacgaaaacaacaagaacggcgtggaccaggaaatcatcttcccacccatcaagaccgatgtgattacaatggaccccaaggacaactgctccaaggacgccaacgataccctgctgctccagctgaccaacaccagcgcctactacatgtacttgttgctgctgctgaagtccgtggtgtacttcgccatcatcacatgctgcctgctgatggctatggtcaagcggaaggacagccgggga

SEQ ID NO: 6250 - DNA, 2190 bp, synthetic construct
  source 1..2190: mol_type = other DNA
atggccttaccagtgaccgccttgctcctgccgctggccttgctgctccacgccgccaggccggacagctacgagctgacccagcctcctagcgtgtccgtgtctcctggacagaccgccaccatctcttgcagcggcgatcaactgggcgggaagtacggccactggtatcagaagaagcccggccagagccccgtgctggtgctgtaccaggacagaaaacggcctgccggcatccccgagagattcagcggaagcagcagcggcaacaccatcaccctgaccatcagcggcacccaggccgtggatgaggccgactactactgccaggcttgggacaccaatctgggcggcgtgttcggcggaggcaccaaagtgacagtgctgggacagctcgagatccagaaccctgatcctgccgtgtaccagctgcgggatagcaagagcagcgacaagagcgtgtgtctgttcaccgacttcgacagccagaccaacgtgtcccagagcaaggactccgacgtgtacatcaccgataagtgcgtgctggacatgcggagcatggacttcaagagcaactccgccgtggcctggtccaacaagtccgatttcgcctgcgccaacgccttcaacaacagcattatccccgaggacacattcttcccaagccccgagagcagcgactccaccgaccacgtgaagcccaaagagacagagaacaccaagcagcccagcaagagctgccacaagcccaaggccatcgtgcacaccgagaaagtgaacatgatgagcctgaccgtgctgggcctgcggatgctgttcgccaaaaccgtggccgtgaacttcctgctgaccgccaagctgttcttcctcctcaccgcccgcgccaagagaagcggatctggcgtgaagcagaccctgaatttcgacctgctgaagctggctggcgacgtggaatccaacccaggccctactagtatggactggatttggcgcatccttttccttgtcggcgctgctaccggcgcgcattccttcgaacaggtgcaactggtggaaagcggagccgaagtgaagaaacctggggccagcgtgaaggtgtcctgcaaggccagcggctacacctttaccggctactacatgcactgggtgcgccaggctccaggccagggactggaatggatgggccggatcaaccccaatagcggcggcaccaactacgcccagaaattccagggcagagtgaccatgaccagagacaccagcatcagcaccgcctacatggaactgagccggctgagaagcgacgacaccgccgtgtactactgcgccagccctagaggcagaggcagcgccttcgatatttggggccagggcacactcgtgaccgtgtcctctacgcgtgaggacctgaagaacgtgttcccacctgaggtggccgtgttcgagcctagcgaggccgagatcagccacacccagaaagccaccctcgtgtgcctggctaccggcttctaccccgaccatgtggaactgtcttggtgggtcaacggcaaagaggtgcacagcggcgtgtgtaccgacccccagccactgaaagaacagcccgccctgaacgacagccggtactgcctgagcagcagactgagagtgtccgccaccttctggcagaacccccggaaccacttcagatgccaggtgcagttctacggcctgagcgagaacgacgagtggacccaggacagagccaagcccgtgacccagatcgtgtctgccgaagcctggggcagagccgatgatgtgattaagatccactggcaggaaaagaagtccaacaccatcctgggcagccaggaaggcaacaccatgaagaccaacgacacctacatgaagttcagctggctgaccgtgcccgagaagtccctggacaaagaacacagatgcatcgtgcggcacgaaaacaacaagaacggcgtggaccaggaaatcatcttcccacccatcaagaccgatgtgattacaatggaccccaaggacaactgctccaaggacgccaacgataccctgctgctccagctgaccaacaccagcgcctactacatgtacttgttgctgctgctgaagtccgtggtgtacttcgccatcatcacatgctgcctgctgatggctatggtcaagcggaaggacagccgggga

SEQ ID NO: 6251 - DNA, 2199 bp, synthetic construct
  source 1..2199: mol_type = other DNA
atggccttaccagtgaccgccttgctcctgccgctggccttgctgctccacgccgccaggccggacaacttcatgctgacccagccccacagcgtgtccgagagccctggcaagaccgtgaccatctcctgcaccagaagcagcggctctatcgccagcaaatacgtgcagtggtatcagcagaggcccggcagcagccctaccaccgtgatctacgaggacaaccagaggcctagcggcgtgcccgatagattcagcggcagcatcgacaccagcagcaacagcgccagcctgaccatcagcggcctgagaacagaggacgaggccgactactactgccacagctacgacagcaacaaccactccgtgttcggcggaggcaccaaagtgacagtgctgggacagctcgagatccagaaccctgatcctgccgtgtaccagctgcgggatagcaagagcagcgacaagagcgtgtgtctgttcaccgacttcgacagccagaccaacgtgtcccagagcaaggactccgacgtgtacatcaccgataagtgcgtgctggacatgcggagcatggacttcaagagcaactccgccgtggcctggtccaacaagtccgatttcgcctgcgccaacgccttcaacaacagcattatccccgaggacacattcttcccaagccccgagagcagcgactccaccgaccacgtgaagcccaaagagacagagaacaccaagcagcccagcaagagctgccacaagcccaaggccatcgtgcacaccgagaaagtgaacatgatgagcctgaccgtgctgggcctgcggatgctgttcgccaaaaccgtggccgtgaacttcctgctgaccgccaagctgttcttcctcctcaccgcccgcgccaagagaagcggatctggcgtgaagcagaccctgaatttcgacctgctgaagctggctggcgacgtggaatccaacccaggccctactagtatggactggatttggcgcatccttttccttgtcggcgctgctaccggcgcgcattccttcgaagaagtgcaactggtggaaagcgggggaggcgtggtgcagccaggcggatctctgagactgagctgtgccgccagcggcttcaccttcagcagctacgccatgagctgggtgcgccaggcccctggaaaaggcctggaatgggtgtccgccatctctggctctggcggcagcacctactacgccgatagcgtgaagggccggttcagcatcagccgggacaacagcaagaacaccctgtacctccagatgaacagcctgcgggccgaggacaccgccgtgtactactgtgccagaaccagaagctccggggccttcgacatctggggccagggaacactcgtgaccgtgtcctctacgcgtgaggacctgaagaacgtgttcccacctgaggtggccgtgttcgagcctagcgaggccgagatcagccacacccagaaagccaccctcgtgtgcctggctaccggcttctaccccgaccatgtggaactgtcttggtgggtcaacggcaaagaggtgcacagcggcgtgtgtaccgacccccagccactgaaagaacagcccgccctgaacgacagccggtactgcctgagcagcagactgagagtgtccgccaccttctggcagaacccccggaaccacttcagatgccaggtgcagttctacggcctgagcgagaacgacgagtggacccaggacagagccaagcccgtgacccagatcgtgtctgccgaagcctggggcagagccgatgatgtgattaagatccactggcaggaaaagaagtccaacaccatcctgggcagccaggaaggcaacaccatgaagaccaacgacacctacatgaagttcagctggctgaccgtgcccgagaagtccctggacaaagaacacagatgcatcgtgcggcacgaaaacaacaagaacggcgtggaccaggaaatcatcttcccacccatcaagaccgatgtgattacaatggaccccaaggacaactgctccaaggacgccaacgataccctgctgctccagctgaccaacaccagcgcctactacatgtacttgttgctgctgctgaagtccgtggtgtacttcgccatcatcacatgctgcctgctgatggctatggtcaagcggaaggacagccgggga

SEQ ID NO: 6252 - DNA, 2184 bp, synthetic construct
  source 1..2184: mol_type = other DNA
atggccttaccagtgaccgccttgctcctgccgctggccttgctgctccacgccgccaggccggacatccagatgaaccagagccccagcagcctgagcgccagcctgggcgataccatcaccatcacctgtcacgccagccagaacatcaacgtgtggctgagctggtatcagcagaagcccggcaacatccccaagctgctgatctacaaggccagcaacctgcacaccggcgtgcccagcagattttctggcagcggctctggcaccggcttcaccattaccatcagctccctccagcccgaggacattgccacctactactgccagcagggccagagctacccctggacatttggcggaggcaccaagctggaaatcaagagactcgagatccagaaccctgatcctgccgtgtaccagctgcgggatagcaagagcagcgacaagagcgtgtgtctgttcaccgacttcgacagccagaccaacgtgtcccagagcaaggactccgacgtgtacatcaccgataagtgcgtgctggacatgcggagcatggacttcaagagcaactccgccgtggcctggtccaacaagtccgatttcgcctgcgccaacgccttcaacaacagcattatccccgaggacacattcttcccaagccccgagagcagcgactccaccgaccacgtgaagcccaaagagacagagaacaccaagcagcccagcaagagctgccacaagcccaaggccatcgtgcacaccgagaaagtgaacatgatgagcctgaccgtgctgggcctgcggatgctgttcgccaaaaccgtggccgtgaacttcctgctgaccgccaagctgttcttcctcctcaccgcccgcgccaagagaagcggatctggcgtgaagcagaccctgaatttcgacctgctgaagctggctggcgacgtggaatccaacccaggccctactagtatggactggatttggcgcatccttttccttgtcggcgctgctaccggcgcgcattccttcgaagaagtgcaactccagcagagcggcccagagcttgtgaagcctggcgcttccgtgaagattagctgcaaagccagcggctacagcttcaccggctacttcatgaactgggtcaagcagagccacggcaagagcctggagtacatcggcagattcaacccctacaacggcgagacactgtacaaccagaagttcaagggcaaggccaccctgaccgtggacaagagcagcagcaccgtgcacatggaactgctgagcgtgaccagcgaggacagcgccgtgtactactgtggcagaagcggcaacgacgacgctatggactattggggccagggcaccagcgtgaccgtgtctagtgctacgcgtgaggacctgaagaacgtgttcccacctgaggtggccgtgttcgagcctagcgaggccgagatcagccacacccagaaagccaccctcgtgtgcctggctaccggcttctaccccgaccatgtggaactgtcttggtgggtcaacggcaaagaggtgcacagcggcgtgtgtaccgacccccagccactgaaagaacagcccgccctgaacgacagccggtactgcctgagcagcagactgagagtgtccgccaccttctggcagaacccccggaaccacttcagatgccaggtgcagttctacggcctgagcgagaacgacgagtggacccaggacagagccaagcccgtgacccagatcgtgtctgccgaagcctggggcagagccgatgatgtgattaagatccactggcaggaaaagaagtccaacaccatcctgggcagccaggaaggcaacaccatgaagaccaacgacacctacatgaagttcagctggctgaccgtgcccgagaagtccctggacaaagaacacagatgcatcgtgcggcacgaaaacaacaagaacggcgtggaccaggaaatcatcttcccacccatcaagaccgatgtgattacaatggaccccaaggacaactgctccaaggacgccaacgataccctgctgctccagctgaccaacaccagcgcctactacatgtacttgttgctgctgctgaagtccgtggtgtacttcgccatcatcacatgctgcctgctgatggctatggtcaagcggaaggacagccgggga

SEQ ID NO: 6253 - DNA, 2187 bp, synthetic construct
  source 1..2187: mol_type = other DNA
atggccttaccagtgaccgccttgctcctgccgctggccttgctgctccacgccgccaggccggagatcgtgctgacacagagccctgccaccctgtctctgagccctggcgaaagagccaccctgagctgtagagccagccagagcgtgcggagctacctggcctggtatcagcagaagcctggacaggcccccagactgctgatctacgacgccagcaatcgggccacaggcatccccgccagattttctggctctggcagcggcaccgacttcaccctgacaatcagcagcctggaacccgaggacttcgccgtgtactactgccagcagcggagcaactggccccctacctttggacagggcaccaaggtggaaatcaagctcgagatccagaaccctgatcctgccgtgtaccagctgcgggatagcaagagcagcgacaagagcgtgtgtctgttcaccgacttcgacagccagaccaacgtgtcccagagcaaggactccgacgtgtacatcaccgataagtgcgtgctggacatgcggagcatggacttcaagagcaactccgccgtggcctggtccaacaagtccgatttcgcctgcgccaacgccttcaacaacagcattatccccgaggacacattcttcccaagccccgagagcagcgactccaccgaccacgtgaagcccaaagagacagagaacaccaagcagcccagcaagagctgccacaagcccaaggccatcgtgcacaccgagaaagtgaacatgatgagcctgaccgtgctgggcctgcggatgctgttcgccaaaaccgtggccgtgaacttcctgctgaccgccaagctgttcttcctcctcaccgcccgcgccaagagaagcggatctggcgtgaagcagaccctgaatttcgacctgctgaagctggctggcgacgtggaatccaacccaggccctactagtatggactggatttggcgcatccttttccttgtcggcgctgctaccggcgcgcattccttcgaacaactccaggtgcaggaatctggccccggactcgtgaagcccagcgagacactgagcctgacctgtaccgtgtccggcggcagcatcagcaacagctacttctcctggggctggatcagacagccccctggcaagggcctggaatggatcggcagcttctactacggcgagaaaacctactacaaccccagcctgaagtccagagccaccatcagcatcgacaccagcaagagccagttctccctgaagctgagcagcgtgacagccgccgacaccgccgtgtattattgccccagaggccccaccatgatccggggcgtgatcgactcttggggccagggaacactcgtgaccgtgtcctctacgcgtgaggacctgaagaacgtgttcccacctgaggtggccgtgttcgagcctagcgaggccgagatcagccacacccagaaagccaccctcgtgtgcctggctaccggcttctaccccgaccatgtggaactgtcttggtgggtcaacggcaaagaggtgcacagcggcgtgtgtaccgacccccagccactgaaagaacagcccgccctgaacgacagccggtactgcctgagcagcagactgagagtgtccgccaccttctggcagaacccccggaaccacttcagatgccaggtgcagttctacggcctgagcgagaacgacgagtggacccaggacagagccaagcccgtgacccagatcgtgtctgccgaagcctggggcagagccgatgatgtgattaagatccactggcaggaaaagaagtccaacaccatcctgggcagccaggaaggcaacaccatgaagaccaacgacacctacatgaagttcagctggctgaccgtgcccgagaagtccctggacaaagaacacagatgcatcgtgcggcacgaaaacaacaagaacggcgtggaccaggaaatcatcttcccacccatcaagaccgatgtgattacaatggaccccaaggacaactgctccaaggacgccaacgataccctgctgctccagctgaccaacaccagcgcctactacatgtacttgttgctgctgctgaagtccgtggtgtacttcgccatcatcacatgctgcctgctgatggctatggtcaagcggaaggacagccgggga

SEQ ID NO: 6254 - DNA, 2214 bp, synthetic construct
  source 1..2214: mol_type = other DNA
atggccttaccagtgaccgccttgctcctgccgctggccttgctgctccacgccgccaggccggacatcgtgatgacccagacccccctgagcctgcctgtgacacctggcgagcctgccagcatctcctgcagaagcagcagaagcctgctggacagcgacgacggcaacacctacctggactggtatctgcagaaacccggccagagcccccaactgctgatctacaccctgagctacagagccagcggcgtgcccgatagattttccggctctggcagcggcaccgacttcaccctgaagatcagccgggtggaagccgaggacgtgggcgtgtactactgtatgcagcgggtggaatttcccatcaccttcggccagggcaccagactggaaatcaagagactcgagatccagaaccctgatcctgccgtgtaccagctgcgggatagcaagagcagcgacaagagcgtgtgtctgttcaccgacttcgacagccagaccaacgtgtcccagagcaaggactccgacgtgtacatcaccgataagtgcgtgctggacatgcggagcatggacttcaagagcaactccgccgtggcctggtccaacaagtccgatttcgcctgcgccaacgccttcaacaacagcattatccccgaggacacattcttcccaagccccgagagcagcgactccaccgaccacgtgaagcccaaagagacagagaacaccaagcagcccagcaagagctgccacaagcccaaggccatcgtgcacaccgagaaagtgaacatgatgagcctgaccgtgctgggcctgcggatgctgttcgccaaaaccgtggccgtgaacttcctgctgaccgccaagctgttcttcctcctcaccgcccgcgccaagagaagcggatctggcgtgaagcagaccctgaatttcgacctgctgaagctggctggcgacgtggaatccaacccaggccctactagtatggactggatttggcgcatccttttccttgtcggcgctgctaccggcgcgcattccttcgaacaggtgcaactggtggaatctggcgggggagtggtgcagcctggcagatccctgagactgagctgtgccgccagcggcttcatcttcagcagatacggaatgcactgggtgcgccaggcccctggcaagggactgaaatgggtggccgtgatttggtacgacggcagcaacaagctgtacgccgacagcgtgaagggccggttcaccatcagcagagacaacagcaagaacaccctgtacctgcagatgaacagcctgcgggccgaggacaccgccgtgtactattgcgccagagactactacgacaacagccggcaccactggggcttcgactattggggccagggaacccttgtgaccgtgtcctctacgcgtgaggacctgaagaacgtgttcccacctgaggtggccgtgttcgagcctagcgaggccgagatcagccacacccagaaagccaccctcgtgtgcctggctaccggcttctaccccgaccatgtggaactgtcttggtgggtcaacggcaaagaggtgcacagcggcgtgtgtaccgacccccagccactgaaagaacagcccgccctgaacgacagccggtactgcctgagcagcagactgagagtgtccgccaccttctggcagaacccccggaaccacttcagatgccaggtgcagttctacggcctgagcgagaacgacgagtggacccaggacagagccaagcccgtgacccagatcgtgtctgccgaagcctggggcagagccgatgatgtgattaagatccactggcaggaaaagaagtccaacaccatcctgggcagccaggaaggcaacaccatgaagaccaacgacacctacatgaagttcagctggctgaccgtgcccgagaagtccctggacaaagaacacagatgcatcgtgcggcacgaaaacaacaagaacggcgtggaccaggaaatcatcttcccacccatcaagaccgatgtgattacaatggaccccaaggacaactgctccaaggacgccaacgataccctgctgctccagctgaccaacaccagcgcctactacatgtacttgttgctgctgctgaagtccgtggtgtacttcgccatcatcacatgctgcctgctgatggctatggtcaagcggaaggacagccgggga

SEQ ID NO: 6255 - DNA, 2184 bp, synthetic construct
  source 1..2184: mol_type = other DNA
atggccttaccagtgaccgccttgctcctgccgctggccttgctgctccacgccgccaggccggagatccagatgacccagagccccagcagcatgtctgccagcctgggcgacaccatcaccatcacatgccaggccacccaggacatcttcaagaacctgaactggtatcagcagaagcccggcaagccccccagcctgctgatctactatgccaccgaactggccgagggcgtgcccagcagattttctggcagcggcagcggctccgactacagcctgaccatcagcaacctggaaagcgaggacttcgccgcctactactgcctccagttcttcgagttcccattcaccttcggctccggcaccaagctggaaatgaagctcgagatccagaaccctgatcctgccgtgtaccagctgcgggatagcaagagcagcgacaagagcgtgtgtctgttcaccgacttcgacagccagaccaacgtgtcccagagcaaggactccgacgtgtacatcaccgataagtgcgtgctggacatgcggagcatggacttcaagagcaactccgccgtggcctggtccaacaagtccgatttcgcctgcgccaacgccttcaacaacagcattatccccgaggacacattcttcccaagccccgagagcagcgactccaccgaccacgtgaagcccaaagagacagagaacaccaagcagcccagcaagagctgccacaagcccaaggccatcgtgcacaccgagaaagtgaacatgatgagcctgaccgtgctgggcctgcggatgctgttcgccaaaaccgtggccgtgaacttcctgctgaccgccaagctgttcttcctcctcaccgcccgcgccaagagaagcggatctggcgtgaagcagaccctgaatttcgacctgctgaagctggctggcgacgtggaatccaacccaggccctactagtatggactggatttggcgcatccttttccttgtcggcgctgctaccggcgcgcattccttcgaacaggtgcaactccagcagtctggcgctgagcttgtgcggcctggcacctctgtgaaggtgtcctgtaaagccagcggctacgtgttcaccaactactggatcgagtggatcaagcagcggccaggccagggcctggaatggatcggcgtgatgaatccaggcagcggcgagacaacctacaacgagaagttcaagggcaaggccaccctgaccgccgacaagagcagcagcacagcctacatgcaactgtcctccctgaccagcgtggacagcgccgtgtacttctgcgccagggaccacgaccgggactactacgctatggactactggggccagggcaccagcgtgaccgtgtcatctacgcgtgaggacctgaagaacgtgttcccacctgaggtggccgtgttcgagcctagcgaggccgagatcagccacacccagaaagccaccctcgtgtgcctggctaccggcttctaccccgaccatgtggaactgtcttggtgggtcaacggcaaagaggtgcacagcggcgtgtgtaccgacccccagccactgaaagaacagcccgccctgaacgacagccggtactgcctgagcagcagactgagagtgtccgccaccttctggcagaacccccggaaccacttcagatgccaggtgcagttctacggcctgagcgagaacgacgagtggacccaggacagagccaagcccgtgacccagatcgtgtctgccgaagcctggggcagagccgatgatgtgattaagatccactggcaggaaaagaagtccaacaccatcctgggcagccaggaaggcaacaccatgaagaccaacgacacctacatgaagttcagctggctgaccgtgcccgagaagtccctggacaaagaacacagatgcatcgtgcggcacgaaaacaacaagaacggcgtggaccaggaaatcatcttcccacccatcaagaccgatgtgattacaatggaccccaaggacaactgctccaaggacgccaacgataccctgctgctccagctgaccaacaccagcgcctactacatgtacttgttgctgctgctgaagtccgtggtgtacttcgccatcatcacatgctgcctgctgatggctatggtcaagcggaaggacagccgggga

SEQ ID NO: 6256 - DNA, 2175 bp, synthetic construct
  source 1..2175: mol_type = other DNA
atggccttaccagtgaccgccttgctcctgccgctggccttgctgctccacgccgccaggccggacatcctgctgacacagagccccgccatcctgtccgtgtctccaggcgagagagtgtcctttagctgccgggccagccagaacatcggcaccagcatccactggtatcagcagcggaccaacggcagccccagactgctgattaagtacgccagcgagtccgtgtccggcatccccagcagattttctggcagcggctccggcaccgacttcaccctgagcatcaacagcgtggaaagcgaggacattgccgactactactgccagcacaccaatagctggcccaccacctttggcggaggcaccaagctggaaatcaagagactcgagatccagaaccctgatcctgccgtgtaccagctgcgggatagcaagagcagcgacaagagcgtgtgtctgttcaccgacttcgacagccagaccaacgtgtcccagagcaaggactccgacgtgtacatcaccgataagtgcgtgctggacatgcggagcatggacttcaagagcaactccgccgtggcctggtccaacaagtccgatttcgcctgcgccaacgccttcaacaacagcattatccccgaggacacattcttcccaagccccgagagcagcgactccaccgaccacgtgaagcccaaagagacagagaacaccaagcagcccagcaagagctgccacaagcccaaggccatcgtgcacaccgagaaagtgaacatgatgagcctgaccgtgctgggcctgcggatgctgttcgccaaaaccgtggccgtgaacttcctgctgaccgccaagctgttcttcctcctcaccgcccgcgccaagagaagcggatctggcgtgaagcagaccctgaatttcgacctgctgaagctggctggcgacgtggaatccaacccaggccctactagtatggactggatttggcgcatccttttccttgtcggcgctgctaccggcgcgcattccttcgaacaggtgcaactccagcagtccgacgccgagcttgtgaagcctggcgcttccgtgaagattagctgcaaggccagcggctacaccttcaccgaccacgccattcactgggtcaagcagaagcccgagcagggcctggaatggatcggctacttcagccccggcaacggcgacatcaagtacaacgagaagttcaagggcaaggccaccctgaccgccgacaagagcagcagcacagcctacatgcaactgaacagcctgaccagcgaggactccgccgtgtacttctgcaagcggagctacggcaactacgactactggggccagggcaccacactgaccgtgtctagtacgcgtgaggacctgaagaacgtgttcccacctgaggtggccgtgttcgagcctagcgaggccgagatcagccacacccagaaagccaccctcgtgtgcctggctaccggcttctaccccgaccatgtggaactgtcttggtgggtcaacggcaaagaggtgcacagcggcgtgtgtaccgacccccagccactgaaagaacagcccgccctgaacgacagccggtactgcctgagcagcagactgagagtgtccgccaccttctggcagaacccccggaaccacttcagatgccaggtgcagttctacggcctgagcgagaacgacgagtggacccaggacagagccaagcccgtgacccagatcgtgtctgccgaagcctggggcagagccgatgatgtgattaagatccactggcaggaaaagaagtccaacaccatcctgggcagccaggaaggcaacaccatgaagaccaacgacacctacatgaagttcagctggctgaccgtgcccgagaagtccctggacaaagaacacagatgcatcgtgcggcacgaaaacaacaagaacggcgtggaccaggaaatcatcttcccacccatcaagaccgatgtgattacaatggaccccaaggacaactgctccaaggacgccaacgataccctgctgctccagctgaccaacaccagcgcctactacatgtacttgttgctgctgctgaagtccgtggtgtacttcgccatcatcacatgctgcctgctgatggctatggtcaagcggaaggacagccgggga

SEQ ID NO: 6257 - DNA, 2190 bp, synthetic construct
  source 1..2190: mol_type = other DNA
atggccttaccagtgaccgccttgctcctgccgctggccttgctgctccacgccgccaggccggacatcgtgatgacccagagccccgatagcctggccgtgtctctgggagagagagccaccatcaactgcaagagcagccagagcctgctgaacagcggcgaccagaagaactacctgacctggtatcagcagaagcccggccagccccccaagctgctgatctactgggccagcaccagagaaagcggcgtgcccgatagattcagcggcagcggaagtggcaccgacttcaccctgaccatcagttctcttcaggccgaggacgtggccgtgtactactgccagaacgactacagctaccccctgaccttcggccagggcaccaaggtggaaatcaagctcgagatccagaaccctgatcctgccgtgtaccagctgcgggatagcaagagcagcgacaagagcgtgtgtctgttcaccgacttcgacagccagaccaacgtgtcccagagcaaggactccgacgtgtacatcaccgataagtgcgtgctggacatgcggagcatggacttcaagagcaactccgccgtggcctggtccaacaagtccgatttcgcctgcgccaacgccttcaacaacagcattatccccgaggacacattcttcccaagccccgagagcagcgactccaccgaccacgtgaagcccaaagagacagagaacaccaagcagcccagcaagagctgccacaagcccaaggccatcgtgcacaccgagaaagtgaacatgatgagcctgaccgtgctgggcctgcggatgctgttcgccaaaaccgtggccgtgaacttcctgctgaccgccaagctgttcttcctcctcaccgcccgcgccaagagaagcggatctggcgtgaagcagaccctgaatttcgacctgctgaagctggctggcgacgtggaatccaacccaggccctactagtatggactggatttggcgcatccttttccttgtcggcgctgctaccggcgcgcattccttcgaacaggtgcagctggtgcagtctggggccgaagtgaagaaaaccggcagcagcgtgaaggtgtcctgcaaggccagcggctacacctttaccgaccacgccattcacgtgtggcggcaggctccaggacaggccctggaatggatgggccacttcagccccggcaacaccgacatcaagtacaacgacaagttcaagggcagagtgaccctgaccgtggaccgcagcatgagcaccgcctacatggaactgagcagcctgcggagcgaggacaccgccatgtactattgcaagaccagcaccttctttttcgactactggggccagggaacaatggtcaccgtgtccagcacgcgtgaggacctgaagaacgtgttcccacctgaggtggccgtgttcgagcctagcgaggccgagatcagccacacccagaaagccaccctcgtgtgcctggctaccggcttctaccccgaccatgtggaactgtcttggtgggtcaacggcaaagaggtgcacagcggcgtgtgtaccgacccccagccactgaaagaacagcccgccctgaacgacagccggtactgcctgagcagcagactgagagtgtccgccaccttctggcagaacccccggaaccacttcagatgccaggtgcagttctacggcctgagcgagaacgacgagtggacccaggacagagccaagcccgtgacccagatcgtgtctgccgaagcctggggcagagccgatgatgtgattaagatccactggcaggaaaagaagtccaacaccatcctgggcagccaggaaggcaacaccatgaagaccaacgacacctacatgaagttcagctggctgaccgtgcccgagaagtccctggacaaagaacacagatgcatcgtgcggcacgaaaacaacaagaacggcgtggaccaggaaatcatcttcccacccatcaagaccgatgtgattacaatggaccccaaggacaactgctccaaggacgccaacgataccctgctgctccagctgaccaacaccagcgcctactacatgtacttgttgctgctgctgaagtccgtggtgtacttcgccatcatcacatgctgcctgctgatggctatggtcaagcggaaggacagccgggga

SEQ ID NO: 6258 - DNA, 2187 bp, synthetic construct
  source 1..2187: mol_type = other DNA
atggccttaccagtgaccgccttgctcctgccgctggccttgctgctccacgccgccaggccggacatccagatgacccagagccccagcagcctgtctgccagcgtgggcgacagagtgaccatcacatgcaaggccagccaggacgtgtccattgccgtggcctggtatcagcagaagcccggcaaggcccccaaggtgctgatctacagcgccagctacagatacaccggcgtgcccgacagattcagcggctctggcagcggcaccgacttcaccttcaccatcagctccctccagcccgaggatattgccgtgtactactgccagcagcactacatcacccccctgacctttggcggaggcaccaaggtggaaatcaagctcgagatccagaaccctgatcctgccgtgtaccagctgcgggatagcaagagcagcgacaagagcgtgtgtctgttcaccgacttcgacagccagaccaacgtgtcccagagcaaggactccgacgtgtacatcaccgataagtgcgtgctggacatgcggagcatggacttcaagagcaactccgccgtggcctggtccaacaagtccgatttcgcctgcgccaacgccttcaacaacagcattatccccgaggacacattcttcccaagccccgagagcagcgactccaccgaccacgtgaagcccaaagagacagagaacaccaagcagcccagcaagagctgccacaagcccaaggccatcgtgcacaccgagaaagtgaacatgatgagcctgaccgtgctgggcctgcggatgctgttcgccaaaaccgtggccgtgaacttcctgctgaccgccaagctgttcttcctcctcaccgcccgcgccaagagaagcggatctggcgtgaagcagaccctgaatttcgacctgctgaagctggctggcgacgtggaatccaacccaggccctactagtatggactggatttggcgcatccttttccttgtcggcgctgctaccggcgcgcattccttcgaacagatccaactggtgcagagcggccacgaagtgaagaaacctggggccagcgtgaaggtgtcctgcaaagccagcggctacacctttaccaactacggcatgaactgggtgcgccaggcccctggacagggcctggaatggatgggctggatcaacaccaagaccggcgagcccacctacgccgaagagttcaagggcagattcgtgttcagcctggaaaccagcgcctccaccgcctacctccagatcagctctctgaaggccgaggacaccgccatgtacttttgcggcagaggcggctacggcagcagctactggtacttcgatgtgtggggccagggcaccaccgtgaccgtgtcatctacgcgtgaggacctgaagaacgtgttcccacctgaggtggccgtgttcgagcctagcgaggccgagatcagccacacccagaaagccaccctcgtgtgcctggctaccggcttctaccccgaccatgtggaactgtcttggtgggtcaacggcaaagaggtgcacagcggcgtgtgtaccgacccccagccactgaaagaacagcccgccctgaacgacagccggtactgcctgagcagcagactgagagtgtccgccaccttctggcagaacccccggaaccacttcagatgccaggtgcagttctacggcctgagcgagaacgacgagtggacccaggacagagccaagcccgtgacccagatcgtgtctgccgaagcctggggcagagccgatgatgtgattaagatccactggcaggaaaagaagtccaacaccatcctgggcagccaggaaggcaacaccatgaagaccaacgacacctacatgaagttcagctggctgaccgtgcccgagaagtccctggacaaagaacacagatgcatcgtgcggcacgaaaacaacaagaacggcgtggaccaggaaatcatcttcccacccatcaagaccgatgtgattacaatggaccccaaggacaactgctccaaggacgccaacgataccctgctgctccagctgaccaacaccagcgcctactacatgtacttgttgctgctgctgaagtccgtggtgtacttcgccatcatcacatgctgcctgctgatggctatggtcaagcggaaggacagccgggga

SEQ ID NO: 6259 - DNA, 2193 bp, synthetic construct
  source 1..2193: mol_type = other DNA
atggccttaccagtgaccgccttgctcctgccgctggccttgctgctccacgccgccaggccggacatcgtgatgacccagagccccgatagcctggccgtgtctctgggagagagagccaccatcaactgccgggccagcaagagcgtgtccaccagcggctacagctacatgcactggtatcagcagaagcccggccagccccccaagctgctgatctacctggcctccaacctggaaagcggcgtgcccgatagattcagcggcagcggctctggcaccgacttcaccctgaccatcagttctcttcaggccgaggacgtggccgtgtactactgccagcacagcagagagctgccctacaccttcggccagggcaccaagctggaaatcaagctcgagatccagaaccctgatcctgccgtgtaccagctgcgggatagcaagagcagcgacaagagcgtgtgtctgttcaccgacttcgacagccagaccaacgtgtcccagagcaaggactccgacgtgtacatcaccgataagtgcgtgctggacatgcggagcatggacttcaagagcaactccgccgtggcctggtccaacaagtccgatttcgcctgcgccaacgccttcaacaacagcattatccccgaggacacattcttcccaagccccgagagcagcgactccaccgaccacgtgaagcccaaagagacagagaacaccaagcagcccagcaagagctgccacaagcccaaggccatcgtgcacaccgagaaagtgaacatgatgagcctgaccgtgctgggcctgcggatgctgttcgccaaaaccgtggccgtgaacttcctgctgaccgccaagctgttcttcctcctcaccgcccgcgccaagagaagcggatctggcgtgaagcagaccctgaatttcgacctgctgaagctggctggcgacgtggaatccaacccaggccctactagtatggactggatttggcgcatccttttccttgtcggcgctgctaccggcgcgcattccttcgaacaggtgcaactccaggaatctggccctggccttgtgaagcccagcgagacactgagcctgacctgtaccgtgtccggcggcagcatcagctcttacggcgtgcactggattcggcagcctccaggcaagggcctggaatggatcggcgtgatctggacctccggcgtgaccgactacaacagcgccctgatgggcagagtgaccatctccgtggacaccagcaagaaccagttcagcctgaagctgagcagcgtgacagccgccgataccgccgtgtattattgcgccagagatggcgactacgaccgctacacaatggactactggggccagggaacccttgtgaccgtgtcctctacgcgtgaggacctgaagaacgtgttcccacctgaggtggccgtgttcgagcctagcgaggccgagatcagccacacccagaaagccaccctcgtgtgcctggctaccggcttctaccccgaccatgtggaactgtcttggtgggtcaacggcaaagaggtgcacagcggcgtgtgtaccgacccccagccactgaaagaacagcccgccctgaacgacagccggtactgcctgagcagcagactgagagtgtccgccaccttctggcagaacccccggaaccacttcagatgccaggtgcagttctacggcctgagcgagaacgacgagtggacccaggacagagccaagcccgtgacccagatcgtgtctgccgaagcctggggcagagccgatgatgtgattaagatccactggcaggaaaagaagtccaacaccatcctgggcagccaggaaggcaacaccatgaagaccaacgacacctacatgaagttcagctggctgaccgtgcccgagaagtccctggacaaagaacacagatgcatcgtgcggcacgaaaacaacaagaacggcgtggaccaggaaatcatcttcccacccatcaagaccgatgtgattacaatggaccccaaggacaactgctccaaggacgccaacgataccctgctgctccagctgaccaacaccagcgcctactacatgtacttgttgctgctgctgaagtccgtggtgtacttcgccatcatcacatgctgcctgctgatggctatggtcaagcggaaggacagccgggga

SEQ ID NO: 6260 - DNA, 2193 bp, synthetic construct
  source 1..2193: mol_type = other DNA
atggccttaccagtgaccgccttgctcctgccgctggccttgctgctccacgccgccaggccggacatccagatgacccagagccccagcagcctgtctgccagcgtgggcgacagagtgaccatcacctgtagagccagccagagcatcggcaccagcctgcactggtatcagcagaagcctggcaaggcccccaagctgctgattaagttcgccagcagactgcagagcggcgtgcccagcagattttctggcagcggctccggcaccgacttcaccctgacaatcagctccctgcagcccgaggacttcgccacctactactgccagcagagccccggcttccctccaacctttggacagggcaccaagctggaaatcaagcggctcgagatccagaaccctgatcctgccgtgtaccagctgcgggatagcaagagcagcgacaagagcgtgtgtctgttcaccgacttcgacagccagaccaacgtgtcccagagcaaggactccgacgtgtacatcaccgataagtgcgtgctggacatgcggagcatggacttcaagagcaactccgccgtggcctggtccaacaagtccgatttcgcctgcgccaacgccttcaacaacagcattatccccgaggacacattcttcccaagccccgagagcagcgactccaccgaccacgtgaagcccaaagagacagagaacaccaagcagcccagcaagagctgccacaagcccaaggccatcgtgcacaccgagaaagtgaacatgatgagcctgaccgtgctgggcctgcggatgctgttcgccaaaaccgtggccgtgaacttcctgctgaccgccaagctgttcttcctcctcaccgcccgcgccaagagaagcggatctggcgtgaagcagaccctgaatttcgacctgctgaagctggctggcgacgtggaatccaacccaggccctactagtatggactggatttggcgcatccttttccttgtcggcgctgctaccggcgcgcattccttcgaacaggtgcaactggtggaatctggcggcggacttgtgaagccaggcggcagcctgagactgagctgtgccgccagcggcttcagcatcaccaccagcggctactactggacctggatcagacagttccccggcaagggcctggaatggatgggctacatcggctacaacagcaagacctactacaaccccgccctgaagtcccggatcaccatcagcagagacaacgccaagaacagcctgtacctgcagatgaactccctgagagccgaggataccgccgtgtactactgcgccagatccctgtacggcggctacaaggacgccttcgatagctggggccagggaacccttgtgaccgtgtctagcacgcgtgaggacctgaagaacgtgttcccacctgaggtggccgtgttcgagcctagcgaggccgagatcagccacacccagaaagccaccctcgtgtgcctggctaccggcttctaccccgaccatgtggaactgtcttggtgggtcaacggcaaagaggtgcacagcggcgtgtgtaccgacccccagccactgaaagaacagcccgccctgaacgacagccggtactgcctgagcagcagactgagagtgtccgccaccttctggcagaacccccggaaccacttcagatgccaggtgcagttctacggcctgagcgagaacgacgagtggacccaggacagagccaagcccgtgacccagatcgtgtctgccgaagcctggggcagagccgatgatgtgattaagatccactggcaggaaaagaagtccaacaccatcctgggcagccaggaaggcaacaccatgaagaccaacgacacctacatgaagttcagctggctgaccgtgcccgagaagtccctggacaaagaacacagatgcatcgtgcggcacgaaaacaacaagaacggcgtggaccaggaaatcatcttcccacccatcaagaccgatgtgattacaatggaccccaaggacaactgctccaaggacgccaacgataccctgctgctccagctgaccaacaccagcgcctactacatgtacttgttgctgctgctgaagtccgtggtgtacttcgccatcatcacatgctgcctgctgatggctatggtcaagcggaaggacagccgggga

SEQ ID NO: 6261 - DNA, 2208 bp, synthetic construct
  source 1..2208: mol_type = other DNA
atggccttaccagtgaccgccttgctcctgccgctggccttgctgctccacgccgccaggccggacgagatcgtgctgacccagagccctctgagcctgcctgtgacacctggcgagcctgccagcatctcctgtagaagcagccagagcctgctgcacagcatcggctacaactacctggactggtatctccagaagcccggccagagcccccaactgctgatctacctgggcagcaacagagccagcggcgtgcccgatagattttccggcagcggctccggcaccgacttcaccctgaagatcagccgggtggaagccgaggacgtgggcgtgtactactgtatgcaggccctccagacccccctgacctttggcggaggcaccaaggtggaaatcaagcggctcgagatccagaaccctgatcctgccgtgtaccagctgcgggatagcaagagcagcgacaagagcgtgtgtctgttcaccgacttcgacagccagaccaacgtgtcccagagcaaggactccgacgtgtacatcaccgataagtgcgtgctggacatgcggagcatggacttcaagagcaactccgccgtggcctggtccaacaagtccgatttcgcctgcgccaacgccttcaacaacagcattatccccgaggacacattcttcccaagccccgagagcagcgactccaccgaccacgtgaagcccaaagagacagagaacaccaagcagcccagcaagagctgccacaagcccaaggccatcgtgcacaccgagaaagtgaacatgatgagcctgaccgtgctgggcctgcggatgctgttcgccaaaaccgtggccgtgaacttcctgctgaccgccaagctgttcttcctcctcaccgcccgcgccaagagaagcggatctggcgtgaagcagaccctgaatttcgacctgctgaagctggctggcgacgtggaatccaacccaggccctactagtatggactggatttggcgcatccttttccttgtcggcgctgctaccggcgcgcattccttcgaagaagtgcaactggtggaaagcggaggcggcgtggtgcagcctggaagaagcctgagactgagctgtgccgccagcggcttcaccttccggtcctacggaatgcactgggtgcgccaggcccctggcaaaggactggaatgggtggccgtgatctcctacgacggctccaacaagtactacaccgacagcgtgaacggcagattcaccatcagcagagacaacagcaagaacaccctgtacctccagatgaacagcctgcgggccgaggacaccgccgtgtactattgtgctagaggcggaggctactacgagacaagcggccctgattactggggccagggcacactcgtgaccgtgtctagtacgcgtgaggacctgaagaacgtgttcccacctgaggtggccgtgttcgagcctagcgaggccgagatcagccacacccagaaagccaccctcgtgtgcctggctaccggcttctaccccgaccatgtggaactgtcttggtgggtcaacggcaaagaggtgcacagcggcgtgtgtaccgacccccagccactgaaagaacagcccgccctgaacgacagccggtactgcctgagcagcagactgagagtgtccgccaccttctggcagaacccccggaaccacttcagatgccaggtgcagttctacggcctgagcgagaacgacgagtggacccaggacagagccaagcccgtgacccagatcgtgtctgccgaagcctggggcagagccgatgatgtgattaagatccactggcaggaaaagaagtccaacaccatcctgggcagccaggaaggcaacaccatgaagaccaacgacacctacatgaagttcagctggctgaccgtgcccgagaagtccctggacaaagaacacagatgcatcgtgcggcacgaaaacaacaagaacggcgtggaccaggaaatcatcttcccacccatcaagaccgatgtgattacaatggaccccaaggacaactgctccaaggacgccaacgataccctgctgctccagctgaccaacaccagcgcctactacatgtacttgttgctgctgctgaagtccgtggtgtacttcgccatcatcacatgctgcctgctgatggctatggtcaagcggaaggacagccgggga

SEQ ID NO: 6262 - DNA, 2202 bp, synthetic construct
  source 1..2202: mol_type = other DNA
atggccttaccagtgaccgccttgctcctgccgctggccttgctgctccacgccgccaggccggacgacgtcgtgatgacccagagccctctgagcctgcctgtgacacctggcgagcctgccagcatctcctgtagaagcagccagagcctgctgcacagcatcggctacaactacctgcactggtttctccagaagcccggccagagcccccaactgctgatctacctgggcagcaacagagccagcggcgtgcccgatagattttccggcagcggctccggcaccgacttcaccctgaagatcagccgggtggaagccgaggacgtgggcgtgtactactgtatgcaggccctccagacccctcccacctttggacagggcaccagactggaaatcaagcggctcgagatccagaaccctgatcctgccgtgtaccagctgcgggatagcaagagcagcgacaagagcgtgtgtctgttcaccgacttcgacagccagaccaacgtgtcccagagcaaggactccgacgtgtacatcaccgataagtgcgtgctggacatgcggagcatggacttcaagagcaactccgccgtggcctggtccaacaagtccgatttcgcctgcgccaacgccttcaacaacagcattatccccgaggacacattcttcccaagccccgagagcagcgactccaccgaccacgtgaagcccaaagagacagagaacaccaagcagcccagcaagagctgccacaagcccaaggccatcgtgcacaccgagaaagtgaacatgatgagcctgaccgtgctgggcctgcggatgctgttcgccaaaaccgtggccgtgaacttcctgctgaccgccaagctgttcttcctcctcaccgcccgcgccaagagaagcggatctggcgtgaagcagaccctgaatttcgacctgctgaagctggctggcgacgtggaatccaacccaggccctactagtatggactggatttggcgcatccttttccttgtcggcgctgctaccggcgcgcattccttcgaacaactccaactccaggaaagcggccctggcctcgtgaagcctagcggcacactgagcctgacatgtgccgtgtctggcggcagcatcagcagcagcaactggtggtcttgggtgcgccagcctcctggcaagggcctggaatggatcggcgaaatctaccacagcggcagcaccaactacaaccccagcctgaagtccagagtgaccatcagcgtggacaagagcaagaaccagttctccctgaagctgagcagcgtgacagccgccgataccgccgtgtactattgcgtgggcagcccctacggcgactacgtgctggattattggggccagggcaccctcgtgaccgtgtctagtacgcgtgaggacctgaagaacgtgttcccacctgaggtggccgtgttcgagcctagcgaggccgagatcagccacacccagaaagccaccctcgtgtgcctggctaccggcttctaccccgaccatgtggaactgtcttggtgggtcaacggcaaagaggtgcacagcggcgtgtgtaccgacccccagccactgaaagaacagcccgccctgaacgacagccggtactgcctgagcagcagactgagagtgtccgccaccttctggcagaacccccggaaccacttcagatgccaggtgcagttctacggcctgagcgagaacgacgagtggacccaggacagagccaagcccgtgacccagatcgtgtctgccgaagcctggggcagagccgatgatgtgattaagatccactggcaggaaaagaagtccaacaccatcctgggcagccaggaaggcaacaccatgaagaccaacgacacctacatgaagttcagctggctgaccgtgcccgagaagtccctggacaaagaacacagatgcatcgtgcggcacgaaaacaacaagaacggcgtggaccaggaaatcatcttcccacccatcaagaccgatgtgattacaatggaccccaaggacaactgctccaaggacgccaacgataccctgctgctccagctgaccaacaccagcgcctactacatgtacttgttgctgctgctgaagtccgtggtgtacttcgccatcatcacatgctgcctgctgatggctatggtcaagcggaaggacagccgggga

SEQ ID NO: 6263 - DNA, 2196 bp, synthetic construct
  source 1..2196: mol_type = other DNA
atggccttaccagtgaccgccttgctcctgccgctggccttgctgctccacgccgccaggccggacgagatcgtgctgacacagagccctggcaccctgagcctgtctctgggagagagagccacactgagctgtcgggccagccagtctatcagcagcagcttcctggcctggtatcagcagaagcccggccaggcccctaagctgctgatctacgccgccagcacaagagccaccggcatccccgatagattcagcggctctggcagcggcaccgacttcaccctgaccatcagcagactggaacccgaggacttcgccgtgtactactgccagcagtacggcagaagcctgagcttcggcggaggcaccaaggtggaagtgaagctcgagatccagaaccctgatcctgccgtgtaccagctgcgggatagcaagagcagcgacaagagcgtgtgtctgttcaccgacttcgacagccagaccaacgtgtcccagagcaaggactccgacgtgtacatcaccgataagtgcgtgctggacatgcggagcatggacttcaagagcaactccgccgtggcctggtccaacaagtccgatttcgcctgcgccaacgccttcaacaacagcattatccccgaggacacattcttcccaagccccgagagcagcgactccaccgaccacgtgaagcccaaagagacagagaacaccaagcagcccagcaagagctgccacaagcccaaggccatcgtgcacaccgagaaagtgaacatgatgagcctgaccgtgctgggcctgcggatgctgttcgccaaaaccgtggccgtgaacttcctgctgaccgccaagctgttcttcctcctcaccgcccgcgccaagagaagcggatctggcgtgaagcagaccctgaatttcgacctgctgaagctggctggcgacgtggaatccaacccaggccctactagtatggactggatttggcgcatccttttccttgtcggcgctgctaccggcgcgcattccttcgaacaggtgcaactccagcagtctggccccggactcgtgaagcctagccagacactgagcctgacctgcgccatcagcggcgatagcgtgtccggcaatagcgccacctggaactggatcagacagagcccatctcggggcctggaatggctgggccggacctactaccgcagcaagtggaaccacgactacgccgagagcgtgaagtcccggatcaccatcaaccccgacaccagcaagaaccagttctccttgcaactgaacagcgtgacccccgaggacacagccgtgtattattgcgccagaggcgacagcagctcttggtacgccttcgactattggggccagggcaccctcgtgaccgtgtctagtacgcgtgaggacctgaagaacgtgttcccacctgaggtggccgtgttcgagcctagcgaggccgagatcagccacacccagaaagccaccctcgtgtgcctggctaccggcttctaccccgaccatgtggaactgtcttggtgggtcaacggcaaagaggtgcacagcggcgtgtgtaccgacccccagccactgaaagaacagcccgccctgaacgacagccggtactgcctgagcagcagactgagagtgtccgccaccttctggcagaacccccggaaccacttcagatgccaggtgcagttctacggcctgagcgagaacgacgagtggacccaggacagagccaagcccgtgacccagatcgtgtctgccgaagcctggggcagagccgatgatgtgattaagatccactggcaggaaaagaagtccaacaccatcctgggcagccaggaaggcaacaccatgaagaccaacgacacctacatgaagttcagctggctgaccgtgcccgagaagtccctggacaaagaacacagatgcatcgtgcggcacgaaaacaacaagaacggcgtggaccaggaaatcatcttcccacccatcaagaccgatgtgattacaatggaccccaaggacaactgctccaaggacgccaacgataccctgctgctccagctgaccaacaccagcgcctactacatgtacttgttgctgctgctgaagtccgtggtgtacttcgccatcatcacatgctgcctgctgatggctatggtcaagcggaaggacagccgggga

SEQ ID NO: 6264 - DNA, 2193 bp, synthetic construct
  source 1..2193: mol_type = other DNA
atggccttaccagtgaccgccttgctcctgccgctggccttgctgctccacgccgccaggccggaccagagcgtcgtgacacagcctcctagcgtgtcagtggcccctggcaagaccgccagaatcacctgtggccggaacaacatcggcagcaagagcgtgcactggtatcagcagaagcccggccaggctcctgtgctggtggtgtacgacgacagcgacagacccagcggcatccccgagagattcagcggcagcaactccggcaataccgccaccctgaccatcagcagagtggaagccggcgacgaggccgactactactgccaagtgtgggacagcagcagcgatcacgtggtgtttggcggaggcaccaagctgacagtgctgggtctcgagatccagaaccctgatcctgccgtgtaccagctgcgggatagcaagagcagcgacaagagcgtgtgtctgttcaccgacttcgacagccagaccaacgtgtcccagagcaaggactccgacgtgtacatcaccgataagtgcgtgctggacatgcggagcatggacttcaagagcaactccgccgtggcctggtccaacaagtccgatttcgcctgcgccaacgccttcaacaacagcattatccccgaggacacattcttcccaagccccgagagcagcgactccaccgaccacgtgaagcccaaagagacagagaacaccaagcagcccagcaagagctgccacaagcccaaggccatcgtgcacaccgagaaagtgaacatgatgagcctgaccgtgctgggcctgcggatgctgttcgccaaaaccgtggccgtgaacttcctgctgaccgccaagctgttcttcctcctcaccgcccgcgccaagagaagcggatctggcgtgaagcagaccctgaatttcgacctgctgaagctggctggcgacgtggaatccaacccaggccctactagtatggactggatttggcgcatccttttccttgtcggcgctgctaccggcgcgcattccttcgaagtgcaactggtgcagtctggcggaggggtcatgcggcctggcggatctctgagactgtcttgtgccgccagcggcttcaccttcgacgactacggcatgagctgggtgcgccaggcccctggaaaaggcctggaatgggtgtccggcatcaactggaatggcggcagcaccggctacgccgattctgtgcggggcagattcaccatcagccgggacaacgccaagaacagcctgtacctgcagatgaactccctgcgggccgaggacaccgccctgtactattgcgccagagagcggggctacggctaccacgaccctcacgattattggggccagggcacccttgttaccgtgtcctctacgcgtgaggacctgaagaacgtgttcccacctgaggtggccgtgttcgagcctagcgaggccgagatcagccacacccagaaagccaccctcgtgtgcctggctaccggcttctaccccgaccatgtggaactgtcttggtgggtcaacggcaaagaggtgcacagcggcgtgtgtaccgacccccagccactgaaagaacagcccgccctgaacgacagccggtactgcctgagcagcagactgagagtgtccgccaccttctggcagaacccccggaaccacttcagatgccaggtgcagttctacggcctgagcgagaacgacgagtggacccaggacagagccaagcccgtgacccagatcgtgtctgccgaagcctggggcagagccgatgatgtgattaagatccactggcaggaaaagaagtccaacaccatcctgggcagccaggaaggcaacaccatgaagaccaacgacacctacatgaagttcagctggctgaccgtgcccgagaagtccctggacaaagaacacagatgcatcgtgcggcacgaaaacaacaagaacggcgtggaccaggaaatcatcttcccacccatcaagaccgatgtgattacaatggaccccaaggacaactgctccaaggacgccaacgataccctgctgctccagctgaccaacaccagcgcctactacatgtacttgttgctgctgctgaagtccgtggtgtacttcgccatcatcacatgctgcctgctgatggctatggtcaagcggaaggacagccgggga

SEQ ID NO: 6265 - DNA, 2232 bp, synthetic construct
  source 1..2232: mol_type = other DNA
atggccttaccagtgaccgccttgctcctgccgctggccttgctgctccacgccgccaggccggaacagaaactcatcagtgaagaagacctggaattccaggctgtcgtgacacagcctcctagcgcctctggcacaccaggccagagagtgaccatctcctgtagcggcagcagcagcaacatcggcagcaacaccgtgaactggtatcagcaggtgcccggcaccgctcccaagctgctgatctacagcaacaaccagcggcccagcggcgtgcccgatagattttctggcagcaagagcggcaccagcgccagcctggctatctctggactccagtccgaggacgaggccgactactattgcgccgcctgggacgatagcctgaacggctgggtgttcggcggaggcaccaagctgacagtgctgctcgagatccagaaccctgatcctgccgtgtaccagctgcgggatagcaagagcagcgacaagagcgtgtgtctgttcaccgacttcgacagccagaccaacgtgtcccagagcaaggactccgacgtgtacatcaccgataagtgcgtgctggacatgcggagcatggacttcaagagcaactccgccgtggcctggtccaacaagtccgatttcgcctgcgccaacgccttcaacaacagcattatccccgaggacacattcttcccaagccccgagagcagcgactccaccgaccacgtgaagcccaaagagacagagaacaccaagcagcccagcaagagctgccacaagcccaaggccatcgtgcacaccgagaaagtgaacatgatgagcctgaccgtgctgggcctgcggatgctgttcgccaaaaccgtggccgtgaacttcctgctgaccgccaagctgttcttcctcctcaccgcccgcgccaagagaagcggatctggcgtgaagcagaccctgaatttcgacctgctgaagctggctggcgacgtggaatccaacccaggccctactagtatggactggatttggcgcatccttttccttgtcggcgctgctaccggcgcgcattccttcgaacagatgcaactggtgcagagcggagccgaagtgaaagagcctggcgagagcctgcggatctcctgcaagggcagcggctacagcttcaccaatttctggatctcttgggtgcgccagatgcccggcaagggcctggaatggatgggcagagtggaccccggctactcctacagcacctacagccctagcttccagggccacgtgaccatcagcgccgacaagagcaccagcaccgcctacctccagtggaacagcctgaaggccagcgacaccgccatgtactactgcgccagagtgcagtacagcggctattacgattggttcgacccctggggccagggcacactcgtgacagtgtcaagcacgcgtgaggacctgaagaacgtgttcccacctgaggtggccgtgttcgagcctagcgaggccgagatcagccacacccagaaagccaccctcgtgtgcctggctaccggcttctaccccgaccatgtggaactgtcttggtgggtcaacggcaaagaggtgcacagcggcgtgtgtaccgacccccagccactgaaagaacagcccgccctgaacgacagccggtactgcctgagcagcagactgagagtgtccgccaccttctggcagaacccccggaaccacttcagatgccaggtgcagttctacggcctgagcgagaacgacgagtggacccaggacagagccaagcccgtgacccagatcgtgtctgccgaagcctggggcagagccgatgatgtgattaagatccactggcaggaaaagaagtccaacaccatcctgggcagccaggaaggcaacaccatgaagaccaacgacacctacatgaagttcagctggctgaccgtgcccgagaagtccctggacaaagaacacagatgcatcgtgcggcacgaaaacaacaagaacggcgtggaccaggaaatcatcttcccacccatcaagaccgatgtgattacaatggaccccaaggacaactgctccaaggacgccaacgataccctgctgctccagctgaccaacaccagcgcctactacatgtacttgttgctgctgctgaagtccgtggtgtacttcgccatcatcacatgctgcctgctgatggctatggtcaagcggaaggacagccgggga

SEQ ID NO: 6266 - DNA, 2214 bp, synthetic construct
  source 1..2214: mol_type = other DNA
atggccttaccagtgaccgccttgctcctgccgctggccttgctgctccacgccgccaggccggaacagaaactcatcagtgaagaagacctggaattcgacatccagatgacccagagccccagcacactgagcgccagcgtgggcgacagagtgaccatcacctgtcgggccagccagaacatcaacaagtggctggcctggtatcagcagaggcccggaaaagccccccagctgctgatctacaaggccagcagcctggaaagcggcgtgcccagcagattttctggcagcggctctggcaccgagtacaccctgaccatcagctccctccagcccgacgacttcgccacctactactgccagcagtacaacagctacgccaccttcggccagggcaccaaggtggaaatcaagagactcgagatccagaaccctgatcctgccgtgtaccagctgcgggatagcaagagcagcgacaagagcgtgtgtctgttcaccgacttcgacagccagaccaacgtgtcccagagcaaggactccgacgtgtacatcaccgataagtgcgtgctggacatgcggagcatggacttcaagagcaactccgccgtggcctggtccaacaagtccgatttcgcctgcgccaacgccttcaacaacagcattatccccgaggacacattcttcccaagccccgagagcagcgactccaccgaccacgtgaagcccaaagagacagagaacaccaagcagcccagcaagagctgccacaagcccaaggccatcgtgcacaccgagaaagtgaacatgatgagcctgaccgtgctgggcctgcggatgctgttcgccaaaaccgtggccgtgaacttcctgctgaccgccaagctgttcttcctcctcaccgcccgcgccaagagaagcggatctggcgtgaagcagaccctgaatttcgacctgctgaagctggctggcgacgtggaatccaacccaggccctactagtatggactggatttggcgcatccttttccttgtcggcgctgctaccggcgcgcattccttcgaacaggtgcagctggtgcagtctggggccgaagtgaagaagcctggcgagagcctgaagatcagctgcaagggctccggctacaacttctctaacaagtggatcggctgggtgcgccagctgcctggcagaggactggaatggatcgccatcatctaccccggctacagcgacatcacctacagccccagcttccagggccgcgtgacaatcagcgccgacaccagcatcaacaccgcctacctgcactggcacagcctgaaggccagcgacaccgccatgtactactgcgtgcggcatacagccctggctggcttcgattattggggcctgggcaccctcgtgaccgtgtctagtacgcgtgaggacctgaagaacgtgttcccacctgaggtggccgtgttcgagcctagcgaggccgagatcagccacacccagaaagccaccctcgtgtgcctggctaccggcttctaccccgaccatgtggaactgtcttggtgggtcaacggcaaagaggtgcacagcggcgtgtgtaccgacccccagccactgaaagaacagcccgccctgaacgacagccggtactgcctgagcagcagactgagagtgtccgccaccttctggcagaacccccggaaccacttcagatgccaggtgcagttctacggcctgagcgagaacgacgagtggacccaggacagagccaagcccgtgacccagatcgtgtctgccgaagcctggggcagagccgatgatgtgattaagatccactggcaggaaaagaagtccaacaccatcctgggcagccaggaaggcaacaccatgaagaccaacgacacctacatgaagttcagctggctgaccgtgcccgagaagtccctggacaaagaacacagatgcatcgtgcggcacgaaaacaacaagaacggcgtggaccaggaaatcatcttcccacccatcaagaccgatgtgattacaatggaccccaaggacaactgctccaaggacgccaacgataccctgctgctccagctgaccaacaccagcgcctactacatgtacttgttgctgctgctgaagtccgtggtgtacttcgccatcatcacatgctgcctgctgatggctatggtcaagcggaaggacagccgggga

SEQ ID NO: 6267 - DNA, 2190 bp, synthetic construct
  source 1..2190: mol_type = other DNA
atggccttaccagtgaccgccttgctcctgccgctggccttgctgctccacgccgccaggccggacatcgtgctgacacagagccctgcttctctggccgtgtctctgggacagagagccaccatcagctgtagagccagcgagagcgtggacaactacggcaacaccttcatgcactggtatcagcagaagcccggccagcctcctaagctgctgatctacagagccagcaacctggaaagcggcatccccgccagattttctggcagcggcagcagaaccgacttcaccctgaccatcaatcccgtggaagccgacgacgtggcaacctactactgccagcagagcaacgaggaccctcctacatttggagccggcaccaagctggaactgaaactcgagatccagaaccctgatcctgccgtgtaccagctgcgggatagcaagagcagcgacaagagcgtgtgtctgttcaccgacttcgacagccagaccaacgtgtcccagagcaaggactccgacgtgtacatcaccgataagtgcgtgctggacatgcggagcatggacttcaagagcaactccgccgtggcctggtccaacaagtccgatttcgcctgcgccaacgccttcaacaacagcattatccccgaggacacattcttcccaagccccgagagcagcgactccaccgaccacgtgaagcccaaagagacagagaacaccaagcagcccagcaagagctgccacaagcccaaggccatcgtgcacaccgagaaagtgaacatgatgagcctgaccgtgctgggcctgcggatgctgttcgccaaaaccgtggccgtgaacttcctgctgaccgccaagctgttcttcctcctcaccgcccgcgccaagagaagcggatctggcgtgaagcagaccctgaatttcgacctgctgaagctggctggcgacgtggaatccaacccaggccctactagtatggactggatttggcgcatccttttccttgtcggcgctgctaccggcgcgcattccttcgaacagattcagctggtgcagtctggccccgagctgaagaaacctggcgagacagtgaagatcagctgcaaggccagcggctacatcttcaccaattacggcatgaactgggtcaagcaggcccctggcaagagcttcaagtggatgggctggatcaacacctacaccggcgagagcacatacagcgccgacttcaagggcagattcgccttcagcctggaaaccagcgccagcacagcctacctgcacatcaacgacctgaagaacgaggacaccgccacctacttttgcgccagaagcggcggctacgaccctatggattattggggccagggcaccagcgtgaccgtttcttctacgcgtgaggacctgaagaacgtgttcccacctgaggtggccgtgttcgagcctagcgaggccgagatcagccacacccagaaagccaccctcgtgtgcctggctaccggcttctaccccgaccatgtggaactgtcttggtgggtcaacggcaaagaggtgcacagcggcgtgtgtaccgacccccagccactgaaagaacagcccgccctgaacgacagccggtactgcctgagcagcagactgagagtgtccgccaccttctggcagaacccccggaaccacttcagatgccaggtgcagttctacggcctgagcgagaacgacgagtggacccaggacagagccaagcccgtgacccagatcgtgtctgccgaagcctggggcagagccgatgatgtgattaagatccactggcaggaaaagaagtccaacaccatcctgggcagccaggaaggcaacaccatgaagaccaacgacacctacatgaagttcagctggctgaccgtgcccgagaagtccctggacaaagaacacagatgcatcgtgcggcacgaaaacaacaagaacggcgtggaccaggaaatcatcttcccacccatcaagaccgatgtgattacaatggaccccaaggacaactgctccaaggacgccaacgataccctgctgctccagctgaccaacaccagcgcctactacatgtacttgttgctgctgctgaagtccgtggtgtacttcgccatcatcacatgctgcctgctgatggctatggtcaagcggaaggacagccgggga

SEQ ID NO: 6268 - DNA, 2187 bp, synthetic construct
  source 1..2187: mol_type = other DNA
atggccttaccagtgaccgccttgctcctgccgctggccttgctgctccacgccgccaggccggacgagatcgtgctgacacagagccctggcaccctgagcctgtctccaggcgaaagagccacactgagctgtcgggccagccagagcgtgtccaatacctacctggcctggtatcaccagaggcccggacaggctccccggctgctgatctatggcgcttctagcagagccaccggcatccccgatagattcagcggctctggcagcggcaccgacttcgccctgacaatcagctccctggaacccgaggacttcgccgtgtactactgccagcagtacagcaactcctggaccttcggccagggcaccaaggtggaaatcaagagactcgagatccagaaccctgatcctgccgtgtaccagctgcgggatagcaagagcagcgacaagagcgtgtgtctgttcaccgacttcgacagccagaccaacgtgtcccagagcaaggactccgacgtgtacatcaccgataagtgcgtgctggacatgcggagcatggacttcaagagcaactccgccgtggcctggtccaacaagtccgatttcgcctgcgccaacgccttcaacaacagcattatccccgaggacacattcttcccaagccccgagagcagcgactccaccgaccacgtgaagcccaaagagacagagaacaccaagcagcccagcaagagctgccacaagcccaaggccatcgtgcacaccgagaaagtgaacatgatgagcctgaccgtgctgggcctgcggatgctgttcgccaaaaccgtggccgtgaacttcctgctgaccgccaagctgttcttcctcctcaccgcccgcgccaagagaagcggatctggcgtgaagcagaccctgaatttcgacctgctgaagctggctggcgacgtggaatccaacccaggccctactagtatggactggatttggcgcatccttttccttgtcggcgctgctaccggcgcgcattccttcgaacaggtgcaactggtggaatctggcgggggagtggtgcagcctggcagaagcctgagactgtcttgtgccgccagcggcttcaccttcagcagctacgacatgcactgggtgcgccaggcccctggcaaaggactggaatgggtggccgtgatctcctacgacggcaccaacgagtattacgccgacagcgtgaagggccggttcaccatctccagagacaccagcaagaacaccctgtacctccagatgaacagcctgcgggccgaggacacagccgtgtattattgcgccagagagcggtacttcgactggtccttcgactactggggccagggaaccctggtgtccgtgtctagtacgcgtgaggacctgaagaacgtgttcccacctgaggtggccgtgttcgagcctagcgaggccgagatcagccacacccagaaagccaccctcgtgtgcctggctaccggcttctaccccgaccatgtggaactgtcttggtgggtcaacggcaaagaggtgcacagcggcgtgtgtaccgacccccagccactgaaagaacagcccgccctgaacgacagccggtactgcctgagcagcagactgagagtgtccgccaccttctggcagaacccccggaaccacttcagatgccaggtgcagttctacggcctgagcgagaacgacgagtggacccaggacagagccaagcccgtgacccagatcgtgtctgccgaagcctggggcagagccgatgatgtgattaagatccactggcaggaaaagaagtccaacaccatcctgggcagccaggaaggcaacaccatgaagaccaacgacacctacatgaagttcagctggctgaccgtgcccgagaagtccctggacaaagaacacagatgcatcgtgcggcacgaaaacaacaagaacggcgtggaccaggaaatcatcttcccacccatcaagaccgatgtgattacaatggaccccaaggacaactgctccaaggacgccaacgataccctgctgctccagctgaccaacaccagcgcctactacatgtacttgttgctgctgctgaagtccgtggtgtacttcgccatcatcacatgctgcctgctgatggctatggtcaagcggaaggacagccgggga

SEQ ID NO: 6269 - DNA, 2184 bp, synthetic construct
  source 1..2184: mol_type = other DNA
atggccttaccagtgaccgccttgctcctgccgctggccttgctgctccacgccgccaggccggacgagctgacacaggaccctgctgtgtctgttgccctgggccagacagtgcggattacctgtcaaggcgacagcctgagaagcaactacgccaactggtatcagcagaagcccggacaggctcccgtgctggttatctacggccagaacaacagacccagcggcatccccgatagattcagcggctctagctctggcaataccgccagcctgacaatcactggcgctcaggctgccgatgaggccgactactactgcgatagcagagtgtccaccggcaatcacgtggtgtttggcggcggaacaaagctgacagtgctcggacaactcgagatccagaaccctgatcctgccgtgtaccagctgcgggatagcaagagcagcgacaagagcgtgtgtctgttcaccgacttcgacagccagaccaacgtgtcccagagcaaggactccgacgtgtacatcaccgataagtgcgtgctggacatgcggagcatggacttcaagagcaactccgccgtggcctggtccaacaagtccgatttcgcctgcgccaacgccttcaacaacagcattatccccgaggacacattcttcccaagccccgagagcagcgactccaccgaccacgtgaagcccaaagagacagagaacaccaagcagcccagcaagagctgccacaagcccaaggccatcgtgcacaccgagaaagtgaacatgatgagcctgaccgtgctgggcctgcggatgctgttcgccaaaaccgtggccgtgaacttcctgctgaccgccaagctgttcttcctcctcaccgcccgcgccaagagaagcggatctggcgtgaagcagaccctgaatttcgacctgctgaagctggctggcgacgtggaatccaacccaggccctactagtatggactggatttggcgcatccttttccttgtcggcgctgctaccggcgcgcattccttcgaagaagttcagctggtgcagagcggagccgaagtgaagaaacctggggcctctgtgaaggtgtcctgcaaggcttccggctacacctttaccagctacgccatgcactgggtccgacaggcacctggacaacggcttgaatggatgggctggatcaacgccggcaacggcaacaccaagtacagccagaaattccagggccgcgtgaccatcaccagagatacaagcgccagcaccgcctacatggaactgtctagcctgagatccgaggacaccgccgtgtactactgtgccagagacatcagctacggcagcttcgactattggggccagggcacactggtcaccgttagctctacgcgtgaggacctgaagaacgtgttcccacctgaggtggccgtgttcgagcctagcgaggccgagatcagccacacccagaaagccaccctcgtgtgcctggctaccggcttctaccccgaccatgtggaactgtcttggtgggtcaacggcaaagaggtgcacagcggcgtgtgtaccgacccccagccactgaaagaacagcccgccctgaacgacagccggtactgcctgagcagcagactgagagtgtccgccaccttctggcagaacccccggaaccacttcagatgccaggtgcagttctacggcctgagcgagaacgacgagtggacccaggacagagccaagcccgtgacccagatcgtgtctgccgaagcctggggcagagccgatgatgtgattaagatccactggcaggaaaagaagtccaacaccatcctgggcagccaggaaggcaacaccatgaagaccaacgacacctacatgaagttcagctggctgaccgtgcccgagaagtccctggacaaagaacacagatgcatcgtgcggcacgaaaacaacaagaacggcgtggaccaggaaatcatcttcccacccatcaagaccgatgtgattacaatggaccccaaggacaactgctccaaggacgccaacgataccctgctgctccagctgaccaacaccagcgcctactacatgtacttgttgctgctgctgaagtccgtggtgtacttcgccatcatcacatgctgcctgctgatggctatggtcaagcggaaggacagccgggga

SEQ ID NO: 6270 - DNA, 2190 bp, synthetic construct
  source 1..2190: mol_type = other DNA
atggccttaccagtgaccgccttgctcctgccgctggccttgctgctccacgccgccaggccggacgacatcgtgctgacacagacaccagccacactgagcgtgacacctggcgattctgtgtccctgagctgtagagccagccagagcatcagcaacaacctgcactggtatcagcagaagtcccacgagagccccagactgctgattaagaacgccagccagtctatcagcggcatccccagcaagtttagcggctctggcagcggcaccgacttcaccctgagaatcaacagcgtggaaaccgaggacttcgggatgtacttctgccagcagagcaatagctggccctacacatttggctccggcaccaagctggaaatcaaactcgagatccagaaccctgatcctgccgtgtaccagctgcgggatagcaagagcagcgacaagagcgtgtgtctgttcaccgacttcgacagccagaccaacgtgtcccagagcaaggactccgacgtgtacatcaccgataagtgcgtgctggacatgcggagcatggacttcaagagcaactccgccgtggcctggtccaacaagtccgatttcgcctgcgccaacgccttcaacaacagcattatccccgaggacacattcttcccaagccccgagagcagcgactccaccgaccacgtgaagcccaaagagacagagaacaccaagcagcccagcaagagctgccacaagcccaaggccatcgtgcacaccgagaaagtgaacatgatgagcctgaccgtgctgggcctgcggatgctgttcgccaaaaccgtggccgtgaacttcctgctgaccgccaagctgttcttcctcctcaccgcccgcgccaagagaagcggatctggcgtgaagcagaccctgaatttcgacctgctgaagctggctggcgacgtggaatccaacccaggccctactagtatggactggatttggcgcatccttttccttgtcggcgctgctaccggcgcgcattccttcgaacaagtgaagctgcaacagagcggacccgagctggttaagccaggcgcttccgtgaagattagctgcaaggccagcggctacagcttcaccggctactacatgcactgggtcaagcagagccacggcaacatcctggactggatcggctacatctacccctacaacggcgtgtccagctacaaccagaagttcaagggcaaagccactctgaccgtggacaagagcagcagcaccgcctacatggaactgagaagcctgaccagcgaggacagcgccgtgtactattgtgccagagagcggggcctgtaccagctcagagcaatggattattggggccagggcaccagcgtgaccgtttcttctacgcgtgaggacctgaagaacgtgttcccacctgaggtggccgtgttcgagcctagcgaggccgagatcagccacacccagaaagccaccctcgtgtgcctggctaccggcttctaccccgaccatgtggaactgtcttggtgggtcaacggcaaagaggtgcacagcggcgtgtgtaccgacccccagccactgaaagaacagcccgccctgaacgacagccggtactgcctgagcagcagactgagagtgtccgccaccttctggcagaacccccggaaccacttcagatgccaggtgcagttctacggcctgagcgagaacgacgagtggacccaggacagagccaagcccgtgacccagatcgtgtctgccgaagcctggggcagagccgatgatgtgattaagatccactggcaggaaaagaagtccaacaccatcctgggcagccaggaaggcaacaccatgaagaccaacgacacctacatgaagttcagctggctgaccgtgcccgagaagtccctggacaaagaacacagatgcatcgtgcggcacgaaaacaacaagaacggcgtggaccaggaaatcatcttcccacccatcaagaccgatgtgattacaatggaccccaaggacaactgctccaaggacgccaacgataccctgctgctccagctgaccaacaccagcgcctactacatgtacttgttgctgctgctgaagtccgtggtgtacttcgccatcatcacatgctgcctgctgatggctatggtcaagcggaaggacagccgggga

SEQ ID NO: 6271 - DNA, 2163 bp, synthetic construct
  source 1..2163: mol_type = other DNA
atggccttaccagtgaccgccttgctcctgccgctggccttgctgctccacgccgccaggccggacgacatcgtgatgacacagacccctgccatcatgagcgcctctccaggccagaaagtgaccatcacatgtagcgccagcagcagcgtgaactacatgcactggtatcagcagaagctgggcagcagccccaagctgtggatctacgataccagcaaactggcccctggcgtgccagccagattttctggttctggcagcggcaccagctacagcctgacaatcagcagcatggaagccgaggatgccgccagctacttctgccatcagtggtctagctacccctacacctttggctccggcaccaagctggaaatcaaactcgagatccagaaccctgatcctgccgtgtaccagctgcgggatagcaagagcagcgacaagagcgtgtgtctgttcaccgacttcgacagccagaccaacgtgtcccagagcaaggactccgacgtgtacatcaccgataagtgcgtgctggacatgcggagcatggacttcaagagcaactccgccgtggcctggtccaacaagtccgatttcgcctgcgccaacgccttcaacaacagcattatccccgaggacacattcttcccaagccccgagagcagcgactccaccgaccacgtgaagcccaaagagacagagaacaccaagcagcccagcaagagctgccacaagcccaaggccatcgtgcacaccgagaaagtgaacatgatgagcctgaccgtgctgggcctgcggatgctgttcgccaaaaccgtggccgtgaacttcctgctgaccgccaagctgttcttcctcctcaccgcccgcgccaagagaagcggatctggcgtgaagcagaccctgaatttcgacctgctgaagctggctggcgacgtggaatccaacccaggccctactagtatggactggatttggcgcatccttttccttgtcggcgctgctaccggcgcgcattccttcgaagaagttcagctccaagagtctggccccgacctggtcaagcctagccaaagcctgagcctgacctgtaccgtgaccggctacagcatcacaagcggctatggatggcactggatcagacagttccccggcaacaaactggaatggatgggctacatccactacagcggcagcaccacctacaatcccagcctgaagtcccggatcagcatcagcagagacaccagcaagaaccagttcttcctgcaactgaacagcgtgaccaccgaggacaccgccacctactattgtgctcggagcctgagatattggggccagggcacaaccctgaccgtgtcatctacgcgtgaggacctgaagaacgtgttcccacctgaggtggccgtgttcgagcctagcgaggccgagatcagccacacccagaaagccaccctcgtgtgcctggctaccggcttctaccccgaccatgtggaactgtcttggtgggtcaacggcaaagaggtgcacagcggcgtgtgtaccgacccccagccactgaaagaacagcccgccctgaacgacagccggtactgcctgagcagcagactgagagtgtccgccaccttctggcagaacccccggaaccacttcagatgccaggtgcagttctacggcctgagcgagaacgacgagtggacccaggacagagccaagcccgtgacccagatcgtgtctgccgaagcctggggcagagccgatgatgtgattaagatccactggcaggaaaagaagtccaacaccatcctgggcagccaggaaggcaacaccatgaagaccaacgacacctacatgaagttcagctggctgaccgtgcccgagaagtccctggacaaagaacacagatgcatcgtgcggcacgaaaacaacaagaacggcgtggaccaggaaatcatcttcccacccatcaagaccgatgtgattacaatggaccccaaggacaactgctccaaggacgccaacgataccctgctgctccagctgaccaacaccagcgcctactacatgtacttgttgctgctgctgaagtccgtggtgtacttcgccatcatcacatgctgcctgctgatggctatggtcaagcggaaggacagccgggga

SEQ ID NO: 6272 - DNA, 2172 bp, synthetic construct
  source 1..2172: mol_type = other DNA
atggccttaccagtgaccgccttgctcctgccgctggccttgctgctccacgccgccaggccggacgacatccagatgacacagagccctagcagcctgtctgccagcgtgggagacagagtgaccatcacctgtagcgccaccagcagcatcagctacatgcactggtatcagcagaagcccggcaaggcccctaaaggctggatctacgataccagcaaactggcccacggcgtgcccagcagattttctggttctggcagcggcaccgacttcaccctgacaatatctagcctccagcctgaggacttcgccacctactactgccaccagagaagaagctaccccttcaccttcggccagggcaccaaggtggaaatcaaactcgagatccagaaccctgatcctgccgtgtaccagctgcgggatagcaagagcagcgacaagagcgtgtgtctgttcaccgacttcgacagccagaccaacgtgtcccagagcaaggactccgacgtgtacatcaccgataagtgcgtgctggacatgcggagcatggacttcaagagcaactccgccgtggcctggtccaacaagtccgatttcgcctgcgccaacgccttcaacaacagcattatccccgaggacacattcttcccaagccccgagagcagcgactccaccgaccacgtgaagcccaaagagacagagaacaccaagcagcccagcaagagctgccacaagcccaaggccatcgtgcacaccgagaaagtgaacatgatgagcctgaccgtgctgggcctgcggatgctgttcgccaaaaccgtggccgtgaacttcctgctgaccgccaagctgttcttcctcctcaccgcccgcgccaagagaagcggatctggcgtgaagcagaccctgaatttcgacctgctgaagctggctggcgacgtggaatccaacccaggccctactagtatggactggatttggcgcatccttttccttgtcggcgctgctaccggcgcgcattccttcgaagaagtgcaactggttcagagcggagccgaagtgaagaaacctggggcctctgtgaaggtgtcctgcaaggcttccggctacacctttaccaatttctggattcactgggtccgacaggctccaggccaaggactggaatggatcggagagatcgaccccagcgacagctacaccaactacaaccagaaattcaaaggccgggtcaccatcaccagagacaccagcacaagcaccgcctacctggaactgagcagcctgagaagcgaggacaccgccgtgtactactgcgccagggaaatcaccaccgtggattattggggccagggaaccctggtcaccgtgtcatctacgcgtgaggacctgaagaacgtgttcccacctgaggtggccgtgttcgagcctagcgaggccgagatcagccacacccagaaagccaccctcgtgtgcctggctaccggcttctaccccgaccatgtggaactgtcttggtgggtcaacggcaaagaggtgcacagcggcgtgtgtaccgacccccagccactgaaagaacagcccgccctgaacgacagccggtactgcctgagcagcagactgagagtgtccgccaccttctggcagaacccccggaaccacttcagatgccaggtgcagttctacggcctgagcgagaacgacgagtggacccaggacagagccaagcccgtgacccagatcgtgtctgccgaagcctggggcagagccgatgatgtgattaagatccactggcaggaaaagaagtccaacaccatcctgggcagccaggaaggcaacaccatgaagaccaacgacacctacatgaagttcagctggctgaccgtgcccgagaagtccctggacaaagaacacagatgcatcgtgcggcacgaaaacaacaagaacggcgtggaccaggaaatcatcttcccacccatcaagaccgatgtgattacaatggaccccaaggacaactgctccaaggacgccaacgataccctgctgctccagctgaccaacaccagcgcctactacatgtacttgttgctgctgctgaagtccgtggtgtacttcgccatcatcacatgctgcctgctgatggctatggtcaagcggaaggacagccgggga

SEQ ID NO: 6273 - DNA, 2193 bp, synthetic construct
  source 1..2193: mol_type = other DNA
atggccttaccagtgaccgccttgctcctgccgctggccttgctgctccacgccgccaggccggacgacatccagatgacacagagccctagcagcctgtctgccagcgtgggagacagagtgaccatcacatgcaaggccagccagggcttcaacaaatacgtggcctggtatcagcagaagcccggcaaggctcctaagctgctgatctactacaccagcacactccagcctggcgtgcccagcagattttctggctctggcagcggcagagactacaccctgacaatatccagcctccagccagaggacttcgccacctactactgtctccagtacggcaacctgctgtacgcctttggacagggcaccaaggtggaaatcaagagactcgagatccagaaccctgatcctgccgtgtaccagctgcgggatagcaagagcagcgacaagagcgtgtgtctgttcaccgacttcgacagccagaccaacgtgtcccagagcaaggactccgacgtgtacatcaccgataagtgcgtgctggacatgcggagcatggacttcaagagcaactccgccgtggcctggtccaacaagtccgatttcgcctgcgccaacgccttcaacaacagcattatccccgaggacacattcttcccaagccccgagagcagcgactccaccgaccacgtgaagcccaaagagacagagaacaccaagcagcccagcaagagctgccacaagcccaaggccatcgtgcacaccgagaaagtgaacatgatgagcctgaccgtgctgggcctgcggatgctgttcgccaaaaccgtggccgtgaacttcctgctgaccgccaagctgttcttcctcctcaccgcccgcgccaagagaagcggatctggcgtgaagcagaccctgaatttcgacctgctgaagctggctggcgacgtggaatccaacccaggccctactagtatggactggatttggcgcatccttttccttgtcggcgctgctaccggcgcgcattccttcgaagaagttcagcttgtgcagagcggagccgaagtgaagaaacctggggcctctgtgaaggtgtcctgcaaagccagcggctacacctttaccagctactggatcggctgggtccgacaggctcctggacaaggactggaatggatcggcgacatctatcccggcggaggctacaccaactacaacgagaagttcaagggccgcgtgacaatcaccagagacacctctacaagcaccgcctacctggaactgagcagcctgagaagcgaggacaccgccgtgtactactgcgccagactggatggcagcagctacagaggcgctatggattcttggggccagggcacactggtcaccgtttcttctacgcgtgaggacctgaagaacgtgttcccacctgaggtggccgtgttcgagcctagcgaggccgagatcagccacacccagaaagccaccctcgtgtgcctggctaccggcttctaccccgaccatgtggaactgtcttggtgggtcaacggcaaagaggtgcacagcggcgtgtgtaccgacccccagccactgaaagaacagcccgccctgaacgacagccggtactgcctgagcagcagactgagagtgtccgccaccttctggcagaacccccggaaccacttcagatgccaggtgcagttctacggcctgagcgagaacgacgagtggacccaggacagagccaagcccgtgacccagatcgtgtctgccgaagcctggggcagagccgatgatgtgattaagatccactggcaggaaaagaagtccaacaccatcctgggcagccaggaaggcaacaccatgaagaccaacgacacctacatgaagttcagctggctgaccgtgcccgagaagtccctggacaaagaacacagatgcatcgtgcggcacgaaaacaacaagaacggcgtggaccaggaaatcatcttcccacccatcaagaccgatgtgattacaatggaccccaaggacaactgctccaaggacgccaacgataccctgctgctccagctgaccaacaccagcgcctactacatgtacttgttgctgctgctgaagtccgtggtgtacttcgccatcatcacatgctgcctgctgatggctatggtcaagcggaaggacagccgggga

SEQ ID NO: 6274 - DNA, 2181 bp, synthetic construct
  source 1..2181: mol_type = other DNA
atggccttaccagtgaccgccttgctcctgccgctggccttgctgctccacgccgccaggccggacgacatccagatgacacagagccctagcagcctgtctgccagcgtgggagacagagtgaccatcacctgtagagccagccaggacatccggtactacctgaactggtatcagcagaagcccggcaaggcccctaagctgctgatctatgtggcctccagcctccagagcggagtgccttctagattttctggcagcggctccggcaccgagtttaccctgacagtgtctagcttgcagcccgaggacttcgccacctactactgcctgcaagtgtacagcacccctcggacctttggacagggcaccaaggtggaaatcaaactcgagatccagaaccctgatcctgccgtgtaccagctgcgggatagcaagagcagcgacaagagcgtgtgtctgttcaccgacttcgacagccagaccaacgtgtcccagagcaaggactccgacgtgtacatcaccgataagtgcgtgctggacatgcggagcatggacttcaagagcaactccgccgtggcctggtccaacaagtccgatttcgcctgcgccaacgccttcaacaacagcattatccccgaggacacattcttcccaagccccgagagcagcgactccaccgaccacgtgaagcccaaagagacagagaacaccaagcagcccagcaagagctgccacaagcccaaggccatcgtgcacaccgagaaagtgaacatgatgagcctgaccgtgctgggcctgcggatgctgttcgccaaaaccgtggccgtgaacttcctgctgaccgccaagctgttcttcctcctcaccgcccgcgccaagagaagcggatctggcgtgaagcagaccctgaatttcgacctgctgaagctggctggcgacgtggaatccaacccaggccctactagtatggactggatttggcgcatccttttccttgtcggcgctgctaccggcgcgcattccttcgaagaagtgcagcttgttgaatctggcggcggactggctaagcctggcggatctctgagactgtcttgtgccgccagcggcttccggttcaccttcaacaactactacatggactgggtccgacaggcccctggacaaggacttgaatgggtgtccagaatcagcagcagcggcgaccctacttggtacgccgattctgtgaagggcagattcaccatcagcagagagaacgccaagaacaccctgttcctccagatgaactccctgagagccgaggacaccgccgtgtactattgtgcctctctgaccaccggcagcgattcttggggacagggcgtgctggttaccgtgtcatctacgcgtgaggacctgaagaacgtgttcccacctgaggtggccgtgttcgagcctagcgaggccgagatcagccacacccagaaagccaccctcgtgtgcctggctaccggcttctaccccgaccatgtggaactgtcttggtgggtcaacggcaaagaggtgcacagcggcgtgtgtaccgacccccagccactgaaagaacagcccgccctgaacgacagccggtactgcctgagcagcagactgagagtgtccgccaccttctggcagaacccccggaaccacttcagatgccaggtgcagttctacggcctgagcgagaacgacgagtggacccaggacagagccaagcccgtgacccagatcgtgtctgccgaagcctggggcagagccgatgatgtgattaagatccactggcaggaaaagaagtccaacaccatcctgggcagccaggaaggcaacaccatgaagaccaacgacacctacatgaagttcagctggctgaccgtgcccgagaagtccctggacaaagaacacagatgcatcgtgcggcacgaaaacaacaagaacggcgtggaccaggaaatcatcttcccacccatcaagaccgatgtgattacaatggaccccaaggacaactgctccaaggacgccaacgataccctgctgctccagctgaccaacaccagcgcctactacatgtacttgttgctgctgctgaagtccgtggtgtacttcgccatcatcacatgctgcctgctgatggctatggtcaagcggaaggacagccgggga

SEQ ID NO: 6275 - DNA, 2181 bp, synthetic construct
  source 1..2181: mol_type = other DNA
atggccttaccagtgaccgccttgctcctgccgctggccttgctgctccacgccgccaggccggagatcgtgatgacacagagccccgccacactgagtgtgtctccaggcgaaagagccacactgtcctgtagagccagccagagcgtgtccagaaacctggcctggtatcagcagaagcctggacaggctccccggctgttgatctacggcgcttctacaagagccaccggcattcccgccagattttctggctctggcagcggcaccgagttcaccctgacaatcggaagcctccagagcgaggacttcgccgtgtactactgccagcagtacaagacctggcctcggacctttggacagggcaccaacgtggaaatcaaactcgagatccagaaccctgatcctgccgtgtaccagctgcgggatagcaagagcagcgacaagagcgtgtgtctgttcaccgacttcgacagccagaccaacgtgtcccagagcaaggactccgacgtgtacatcaccgataagtgcgtgctggacatgcggagcatggacttcaagagcaactccgccgtggcctggtccaacaagtccgatttcgcctgcgccaacgccttcaacaacagcattatccccgaggacacattcttcccaagccccgagagcagcgactccaccgaccacgtgaagcccaaagagacagagaacaccaagcagcccagcaagagctgccacaagcccaaggccatcgtgcacaccgagaaagtgaacatgatgagcctgaccgtgctgggcctgcggatgctgttcgccaaaaccgtggccgtgaacttcctgctgaccgccaagctgttcttcctcctcaccgcccgcgccaagagaagcggatctggcgtgaagcagaccctgaatttcgacctgctgaagctggctggcgacgtggaatccaacccaggccctactagtatggactggatttggcgcatccttttccttgtcggcgctgctaccggcgcgcattccttcgaacaagttcagctgcaacaatggggagccggcctgctgaagcctagcgaaacactgtctctgacctgcgccgtgttcggcggctctttcagcggctactactggtcctggatcagacagcctcctggcaaaggactggaatggatcggcgagatcaaccaccggggcaacaccaacgacaaccccagcctgaaaagcagagtgaccatcagcgtggacaccagcaagaaccagttcgccctgaagctgagcagcgtgacagccgctgataccgccgtgtattattgcgccagagagcggggctacacctacggcaatttcgatcactggggccagggcaccctggtcacagtttcttctacgcgtgaggacctgaagaacgtgttcccacctgaggtggccgtgttcgagcctagcgaggccgagatcagccacacccagaaagccaccctcgtgtgcctggctaccggcttctaccccgaccatgtggaactgtcttggtgggtcaacggcaaagaggtgcacagcggcgtgtgtaccgacccccagccactgaaagaacagcccgccctgaacgacagccggtactgcctgagcagcagactgagagtgtccgccaccttctggcagaacccccggaaccacttcagatgccaggtgcagttctacggcctgagcgagaacgacgagtggacccaggacagagccaagcccgtgacccagatcgtgtctgccgaagcctggggcagagccgatgatgtgattaagatccactggcaggaaaagaagtccaacaccatcctgggcagccaggaaggcaacaccatgaagaccaacgacacctacatgaagttcagctggctgaccgtgcccgagaagtccctggacaaagaacacagatgcatcgtgcggcacgaaaacaacaagaacggcgtggaccaggaaatcatcttcccacccatcaagaccgatgtgattacaatggaccccaaggacaactgctccaaggacgccaacgataccctgctgctccagctgaccaacaccagcgcctactacatgtacttgttgctgctgctgaagtccgtggtgtacttcgccatcatcacatgctgcctgctgatggctatggtcaagcggaaggacagccgggga

SEQ ID NO: 6276 - DNA, 2184 bp, synthetic construct
  source 1..2184: mol_type = other DNA
atggccttaccagtgaccgccttgctcctgccgctggccttgctgctccacgccgccaggccggagatcgtgatgacccctagcagcgccacactgagtgtgtctccaggcgaaagagccacactgtcctgtagagccagccagagcgtgtccagaaacctggcctggtatcagcagaagcctggacaggctccccggctgttgatctacggcgcttctacaagagccaccggcattcccgccagattttctggctctggcagcggcaccgagttcaccctgacaatctctagcctccagagcgaggacttcgccgtgtactactgccaccagtacagcaactggatgtgcagcttcggccagggcaccaagctggaaatcaaactcgagatccagaaccctgatcctgccgtgtaccagctgcgggatagcaagagcagcgacaagagcgtgtgtctgttcaccgacttcgacagccagaccaacgtgtcccagagcaaggactccgacgtgtacatcaccgataagtgcgtgctggacatgcggagcatggacttcaagagcaactccgccgtggcctggtccaacaagtccgatttcgcctgcgccaacgccttcaacaacagcattatccccgaggacacattcttcccaagccccgagagcagcgactccaccgaccacgtgaagcccaaagagacagagaacaccaagcagcccagcaagagctgccacaagcccaaggccatcgtgcacaccgagaaagtgaacatgatgagcctgaccgtgctgggcctgcggatgctgttcgccaaaaccgtggccgtgaacttcctgctgaccgccaagctgttcttcctcctcaccgcccgcgccaagagaagcggatctggcgtgaagcagaccctgaatttcgacctgctgaagctggctggcgacgtggaatccaacccaggccctactagtatggactggatttggcgcatccttttccttgtcggcgctgctaccggcgcgcattccttcgaagaagttcagctccttgagtcaggtggcggcctggttcaacctggcggatctctgagactgagctgtgccgccagcggcttcacctttagcagatacgccatgaactgggtccgacaggcccctggcaaaggactggaatgggtgtccggcatctctggaagcggcggcagaacctactacgccgattctgtgaagggcagattcaccatcagccgggacaacagcaagaacaccctgtacctccagatgaacagcctgagagccgaggacacagccgtgtattattgcgccaaggaccgggacttttggagcggcccttttgactattggggccagggaaccctggtcaccgttagctctacgcgtgaggacctgaagaacgtgttcccacctgaggtggccgtgttcgagcctagcgaggccgagatcagccacacccagaaagccaccctcgtgtgcctggctaccggcttctaccccgaccatgtggaactgtcttggtgggtcaacggcaaagaggtgcacagcggcgtgtgtaccgacccccagccactgaaagaacagcccgccctgaacgacagccggtactgcctgagcagcagactgagagtgtccgccaccttctggcagaacccccggaaccacttcagatgccaggtgcagttctacggcctgagcgagaacgacgagtggacccaggacagagccaagcccgtgacccagatcgtgtctgccgaagcctggggcagagccgatgatgtgattaagatccactggcaggaaaagaagtccaacaccatcctgggcagccaggaaggcaacaccatgaagaccaacgacacctacatgaagttcagctggctgaccgtgcccgagaagtccctggacaaagaacacagatgcatcgtgcggcacgaaaacaacaagaacggcgtggaccaggaaatcatcttcccacccatcaagaccgatgtgattacaatggaccccaaggacaactgctccaaggacgccaacgataccctgctgctccagctgaccaacaccagcgcctactacatgtacttgttgctgctgctgaagtccgtggtgtacttcgccatcatcacatgctgcctgctgatggctatggtcaagcggaaggacagccgggga

SEQ ID NO: 6277 - DNA, 2199 bp, synthetic construct
  source 1..2199: mol_type = other DNA
atggccttaccagtgaccgccttgctcctgccgctggccttgctgctccacgccgccaggccggacatccagatgacccagagccccagcagcctgtctgccagcgtgggcgacagagtgaccatcacatgcaaggccagcaagaacatcagaagctacctggcctggtatcagcagaagcccggcaaggcccccaagctgctgatctacagcggcagcacactgcacagcggcgtgcccagcagattttccggctctggcagcggcaccgacttcaccctgaccatctctagcctccagcccgaggacttcgccacctactactgccagcagcaccacgagtaccccctgacattcggccagggcaccaaggtggaaatcaagagactcgagatccagaaccctgatcctgccgtgtaccagctgcgggatagcaagagcagcgacaagagcgtgtgtctgttcaccgacttcgacagccagaccaacgtgtcccagagcaaggactccgacgtgtacatcaccgataagtgcgtgctggacatgcggagcatggacttcaagagcaactccgccgtggcctggtccaacaagtccgatttcgcctgcgccaacgccttcaacaacagcattatccccgaggacacattcttcccaagccccgagagcagcgactccaccgaccacgtgaagcccaaagagacagagaacaccaagcagcccagcaagagctgccacaagcccaaggccatcgtgcacaccgagaaagtgaacatgatgagcctgaccgtgctgggcctgcggatgctgttcgccaaaaccgtggccgtgaacttcctgctgaccgccaagctgttcttcctcctcaccgcccgcgccaagagaagcggatctggcgtgaagcagaccctgaatttcgacctgctgaagctggctggcgacgtggaatccaacccaggccctactagtatggactggatttggcgcatccttttccttgtcggcgctgctaccggcgcgcattccttcgaacaggtgcaactccaggaatctggccccggactcgtgaagcccagcgagacactgagcctgacctgtaccgtgtccggctacaccatcaccagcggctacgactggtcctggatcagacagcctcctggcaagggcctggaatggatcggctacatcaactacggcggctccaccaactacaagcccagcctgggaagccgcgtgacaatcagcgtggacacctccaagaaccagttcagcctgaagctgagcagcgtgacagccgccgataccgccgtgtactactgcgcccggtacaacgagtacaagagctacatctacgattggtacttcgacttctggggccagggaaccctcgtgaccgtgtctagtacgcgtgaggacctgaagaacgtgttcccacctgaggtggccgtgttcgagcctagcgaggccgagatcagccacacccagaaagccaccctcgtgtgcctggctaccggcttctaccccgaccatgtggaactgtcttggtgggtcaacggcaaagaggtgcacagcggcgtgtgtaccgacccccagccactgaaagaacagcccgccctgaacgacagccggtactgcctgagcagcagactgagagtgtccgccaccttctggcagaacccccggaaccacttcagatgccaggtgcagttctacggcctgagcgagaacgacgagtggacccaggacagagccaagcccgtgacccagatcgtgtctgccgaagcctggggcagagccgatgatgtgattaagatccactggcaggaaaagaagtccaacaccatcctgggcagccaggaaggcaacaccatgaagaccaacgacacctacatgaagttcagctggctgaccgtgcccgagaagtccctggacaaagaacacagatgcatcgtgcggcacgaaaacaacaagaacggcgtggaccaggaaatcatcttcccacccatcaagaccgatgtgattacaatggaccccaaggacaactgctccaaggacgccaacgataccctgctgctccagctgaccaacaccagcgcctactacatgtacttgttgctgctgctgaagtccgtggtgtacttcgccatcatcacatgctgcctgctgatggctatggtcaagcggaaggacagccgggga

SEQ ID NO: 6278 - DNA, 2205 bp, synthetic construct
  source 1..2205: mol_type = other DNA
atggccttaccagtgaccgccttgctcctgccgctggccttgctgctccacgccgccaggccgcagtctgtggtcacacagcctccatccgtgtctgctgcccctggacagaaagtgaccatctcctgtagcggcagcagcagcaacatcggcaacaactacgtgtcctggtatcagcagctccccggcacagctcccaaactgctgatctacgacaacaacaagcggcccagcggcatccccgatagattttctggcagcaagagcggcaccagcgccacactgggaattaccggacttcagacaggcgacgaggccgactactactgtggcacatgggatggcagcctgtacaccatgcttttcggcggaggcaccaagctgacagtgcttctcgagatccagaaccctgatcctgccgtgtaccagctgcgggatagcaagagcagcgacaagagcgtgtgtctgttcaccgacttcgacagccagaccaacgtgtcccagagcaaggactccgacgtgtacatcaccgataagtgcgtgctggacatgcggagcatggacttcaagagcaactccgccgtggcctggtccaacaagtccgatttcgcctgcgccaacgccttcaacaacagcattatccccgaggacacattcttcccaagccccgagagcagcgactccaccgaccacgtgaagcccaaagagacagagaacaccaagcagcccagcaagagctgccacaagcccaaggccatcgtgcacaccgagaaagtgaacatgatgagcctgaccgtgctgggcctgcggatgctgttcgccaaaaccgtggccgtgaacttcctgctgaccgccaagctgttcttcctcctcaccgcccgcgccaagagaagcggatctggcgtgaagcagaccctgaatttcgacctgctgaagctggctggcgacgtggaatccaacccaggccctactagtatggactggatttggcgcatccttttccttgtcggcgctgctaccggcgcgcattccttcgaagaagtgcaactggtggaatctggcggcggactggttaagcctggcggatctctgagactgtcttgtgccgccagcggcttcaccttcagcaatgcctggatgagctgggttcgacaggcccctggaaaaggactggaatgggtcggattcatccggtccaaagcctacggcggcaccacagaatatgccgcctctgtgaagggcagattcaccatcagccgggacgacagcaagtctatcgcctacctccagatgaacaacctgaaaaccgaggacaccgccgtgtactactgcgccagagatggcctgtacagcagctcttggtacgacagcgattactggggccagggcacactggtcacagtgtcatctacgcgtgaggacctgaagaacgtgttcccacctgaggtggccgtgttcgagcctagcgaggccgagatcagccacacccagaaagccaccctcgtgtgcctggctaccggcttctaccccgaccatgtggaactgtcttggtgggtcaacggcaaagaggtgcacagcggcgtgtgtaccgacccccagccactgaaagaacagcccgccctgaacgacagccggtactgcctgagcagcagactgagagtgtccgccaccttctggcagaacccccggaaccacttcagatgccaggtgcagttctacggcctgagcgagaacgacgagtggacccaggacagagccaagcccgtgacccagatcgtgtctgccgaagcctggggcagagccgatgatgtgattaagatccactggcaggaaaagaagtccaacaccatcctgggcagccaggaaggcaacaccatgaagaccaacgacacctacatgaagttcagctggctgaccgtgcccgagaagtccctggacaaagaacacagatgcatcgtgcggcacgaaaacaacaagaacggcgtggaccaggaaatcatcttcccacccatcaagaccgatgtgattacaatggaccccaaggacaactgctccaaggacgccaacgataccctgctgctccagctgaccaacaccagcgcctactacatgtacttgttgctgctgctgaagtccgtggtgtacttcgccatcatcacatgctgcctgctgatggctatggtcaagcggaaggacagccgggga

SEQ ID NO: 6279 - DNA, 2220 bp, synthetic construct
  source 1..2220: mol_type = other DNA
atggccttaccagtgaccgccttgctcctgccgctggccttgctgctccacgccgccaggccgcagtctgtgctgacacagcctcctagtgtgtctggcgctcctggacagagagtgaccatctcttgtaccggcagcagcagcaatatcggagccggctatgacgtgcactggtatcagcagctccctggcacagcccctaaactgctgatcttcggcaacagcaacagacccagcggcgtgcccgatagattcagcggctttaagagcggcacaagcgccagcctggctatcactggactgcaagccgaggacgaggccgactacttctgccagagctacgatagcagcctgagcggcagcggagtgtttggcacaggcaccaaagtgacagtgcttggcctcgagatccagaaccctgatcctgccgtgtaccagctgcgggatagcaagagcagcgacaagagcgtgtgtctgttcaccgacttcgacagccagaccaacgtgtcccagagcaaggactccgacgtgtacatcaccgataagtgcgtgctggacatgcggagcatggacttcaagagcaactccgccgtggcctggtccaacaagtccgatttcgcctgcgccaacgccttcaacaacagcattatccccgaggacacattcttcccaagccccgagagcagcgactccaccgaccacgtgaagcccaaagagacagagaacaccaagcagcccagcaagagctgccacaagcccaaggccatcgtgcacaccgagaaagtgaacatgatgagcctgaccgtgctgggcctgcggatgctgttcgccaaaaccgtggccgtgaacttcctgctgaccgccaagctgttcttcctcctcaccgcccgcgccaagagaagcggatctggcgtgaagcagaccctgaatttcgacctgctgaagctggctggcgacgtggaatccaacccaggccctactagtatggactggatttggcgcatccttttccttgtcggcgctgctaccggcgcgcattccttcgaacaaatgcaactggttcaaagcggcggtggcctggtgcaacctggaagaagtctgagactgagctgtgccgccagcggcttcaccttcgatgattacgccatgcactgggtccgacaggcccctggaaaaggactggaatgggtgtccggcatctcctggaatagcggctctatcggctacgccgacagcgtgaagggcagattcaccatcagccgggacaacgccaagaacagcctgtacctccagatgaactccctgagagccgaggatacagccctgtactactgcgccaaggacatccacagcggcagctactacggcctgctgtactacgctatggacgtgtggggccagggcacaaccgtgacagtttcttctacgcgtgaggacctgaagaacgtgttcccacctgaggtggccgtgttcgagcctagcgaggccgagatcagccacacccagaaagccaccctcgtgtgcctggctaccggcttctaccccgaccatgtggaactgtcttggtgggtcaacggcaaagaggtgcacagcggcgtgtgtaccgacccccagccactgaaagaacagcccgccctgaacgacagccggtactgcctgagcagcagactgagagtgtccgccaccttctggcagaacccccggaaccacttcagatgccaggtgcagttctacggcctgagcgagaacgacgagtggacccaggacagagccaagcccgtgacccagatcgtgtctgccgaagcctggggcagagccgatgatgtgattaagatccactggcaggaaaagaagtccaacaccatcctgggcagccaggaaggcaacaccatgaagaccaacgacacctacatgaagttcagctggctgaccgtgcccgagaagtccctggacaaagaacacagatgcatcgtgcggcacgaaaacaacaagaacggcgtggaccaggaaatcatcttcccacccatcaagaccgatgtgattacaatggaccccaaggacaactgctccaaggacgccaacgataccctgctgctccagctgaccaacaccagcgcctactacatgtacttgttgctgctgctgaagtccgtggtgtacttcgccatcatcacatgctgcctgctgatggctatggtcaagcggaaggacagccgggga

SEQ ID NO: 6280 - DNA, 2220 bp, synthetic construct
  source 1..2220: mol_type = other DNA
atggccttaccagtgaccgccttgctcctgccgctggccttgctgctccacgccgccaggccgctgcctgttctgacacagcctccatctgcctctggcacacctggacagagagtgaccatcagctgtagcggcagaagcagcaacatcggcagcaacagcgtgaactggtacagacagcttcctggcgctgcccctaagctgctgatctacagcaacaaccagcggcctcctggcgtgccagtcagattttctggcagcaagagcggcacaagcgccagcctggctatttctggactccagtctgaggacgaggccacctactactgtgccacctgggacgacaacctgaacgtgcactacgtgttcggcaccggcaccaaagtgacagtgcttggaagtagactcgagatccagaaccctgatcctgccgtgtaccagctgcgggatagcaagagcagcgacaagagcgtgtgtctgttcaccgacttcgacagccagaccaacgtgtcccagagcaaggactccgacgtgtacatcaccgataagtgcgtgctggacatgcggagcatggacttcaagagcaactccgccgtggcctggtccaacaagtccgatttcgcctgcgccaacgccttcaacaacagcattatccccgaggacacattcttcccaagccccgagagcagcgactccaccgaccacgtgaagcccaaagagacagagaacaccaagcagcccagcaagagctgccacaagcccaaggccatcgtgcacaccgagaaagtgaacatgatgagcctgaccgtgctgggcctgcggatgctgttcgccaaaaccgtggccgtgaacttcctgctgaccgccaagctgttcttcctcctcaccgcccgcgccaagagaagcggatctggcgtgaagcagaccctgaatttcgacctgctgaagctggctggcgacgtggaatccaacccaggccctactagtatggactggatttggcgcatccttttccttgtcggcgctgctaccggcgcgcattccttcgaacttgaaatggctcaggtgcagctggtgcagagcggagccgaagtgaagaaacctggcagcagcgtgaaggtgtcctgcaaagcttctggcggcaccttcagcagctacgccatctcttgggttcgacaggcccctggacaaggactggaatggatgggcagaatcatccccatcctgggaatcgccaactacgcccagaaattccagggcagagtgacaatcaccgccgacaagagcaccagcaccgcctacatggaactgagcagcctgagaagcgaggacaccgccgtgtactattgtgcaagaggcggctactacagccacgacatgtggagcgaagattggggccagggcacactggtcacagtgtcatctacgcgtgaggacctgaagaacgtgttcccacctgaggtggccgtgttcgagcctagcgaggccgagatcagccacacccagaaagccaccctcgtgtgcctggctaccggcttctaccccgaccatgtggaactgtcttggtgggtcaacggcaaagaggtgcacagcggcgtgtgtaccgacccccagccactgaaagaacagcccgccctgaacgacagccggtactgcctgagcagcagactgagagtgtccgccaccttctggcagaacccccggaaccacttcagatgccaggtgcagttctacggcctgagcgagaacgacgagtggacccaggacagagccaagcccgtgacccagatcgtgtctgccgaagcctggggcagagccgatgatgtgattaagatccactggcaggaaaagaagtccaacaccatcctgggcagccaggaaggcaacaccatgaagaccaacgacacctacatgaagttcagctggctgaccgtgcccgagaagtccctggacaaagaacacagatgcatcgtgcggcacgaaaacaacaagaacggcgtggaccaggaaatcatcttcccacccatcaagaccgatgtgattacaatggaccccaaggacaactgctccaaggacgccaacgataccctgctgctccagctgaccaacaccagcgcctactacatgtacttgttgctgctgctgaagtccgtggtgtacttcgccatcatcacatgctgcctgctgatggctatggtcaagcggaaggacagccgggga

SEQ ID NO: 6281 - DNA, 2202 bp, synthetic construct
  source 1..2202: mol_type = other DNA
atggccttaccagtgaccgccttgctcctgccgctggccttgctgctccacgccgccaggccggacttcgtgatgacacagagccctgatagcctggccgtgtctctcggcgagcgagtgaccatgagctgcaagtctagccagagcctgctgaacagcggcaaccagaagaactacctgacctggtatcagcagaagcccggccagcctcctaagctgctgatctactgggccagcaccagagaaagcggcgtgcccgatagattttctggctctggcagcggcaccgacttcaccctgacaatttctagcctgcaagccgaggacgtggccgtgtactactgccagaacgactacagctacccctacaccttcggccagggcaccaagctggaaatcaaactcgagatccagaaccctgatcctgccgtgtaccagctgcgggatagcaagagcagcgacaagagcgtgtgtctgttcaccgacttcgacagccagaccaacgtgtcccagagcaaggactccgacgtgtacatcaccgataagtgcgtgctggacatgcggagcatggacttcaagagcaactccgccgtggcctggtccaacaagtccgatttcgcctgcgccaacgccttcaacaacagcattatccccgaggacacattcttcccaagccccgagagcagcgactccaccgaccacgtgaagcccaaagagacagagaacaccaagcagcccagcaagagctgccacaagcccaaggccatcgtgcacaccgagaaagtgaacatgatgagcctgaccgtgctgggcctgcggatgctgttcgccaaaaccgtggccgtgaacttcctgctgaccgccaagctgttcttcctcctcaccgcccgcgccaagagaagcggatctggcgtgaagcagaccctgaatttcgacctgctgaagctggctggcgacgtggaatccaacccaggccctactagtatggactggatttggcgcatccttttccttgtcggcgctgctaccggcgcgcattccttcgaagaagtgcaactggttcagagcggagccgagctgaagaaacctggggccagcgtgaaggtgtcctgtaaagccagcggctacacctttaccgactactacatgaaatgggtccgacaggccccaggccagggactcgaatggatcggcgatattatccccagcaacggggccaccttctacaaccagaaattcaagggccgcgtgaccatcaccgtggacaagagcacaagcaccgcctacatggaactgagcagcctgagaagcgaggacaccgccgtgtattattgcgccagaagccatctgctgcgggccagttggttcgcctattggggacagggaaccctggtcaccgttagctctacgcgtgaggacctgaagaacgtgttcccacctgaggtggccgtgttcgagcctagcgaggccgagatcagccacacccagaaagccaccctcgtgtgcctggctaccggcttctaccccgaccatgtggaactgtcttggtgggtcaacggcaaagaggtgcacagcggcgtgtgtaccgacccccagccactgaaagaacagcccgccctgaacgacagccggtactgcctgagcagcagactgagagtgtccgccaccttctggcagaacccccggaaccacttcagatgccaggtgcagttctacggcctgagcgagaacgacgagtggacccaggacagagccaagcccgtgacccagatcgtgtctgccgaagcctggggcagagccgatgatgtgattaagatccactggcaggaaaagaagtccaacaccatcctgggcagccaggaaggcaacaccatgaagaccaacgacacctacatgaagttcagctggctgaccgtgcccgagaagtccctggacaaagaacacagatgcatcgtgcggcacgaaaacaacaagaacggcgtggaccaggaaatcatcttcccacccatcaagaccgatgtgattacaatggaccccaaggacaactgctccaaggacgccaacgataccctgctgctccagctgaccaacaccagcgcctactacatgtacttgttgctgctgctgaagtccgtggtgtacttcgccatcatcacatgctgcctgctgatggctatggtcaagcggaaggacagccgggga

SEQ ID NO: 6282 - DNA, 2202 bp, synthetic construct
  source 1..2202: mol_type = other DNA
atggccttaccagtgaccgccttgctcctgccgctggccttgctgctccacgccgccaggccggacttcgtgatgacacagagccctgatagcctggccgtgtctctcggcgagcgagtgaccatgagctgcaagtctagccagagcctgctgaacagcggcaaccagaagaactacctgacctggtatcagcagaagcccggccagcctcctaagctgctgatctactgggccagcaccagagaaagcggcgtgcccgatagattttctggctctggcagcggcaccgacttcaccctgacaatttctagcctgcaagccgaggacgtggccgtgtactactgccagaacgactacagctacccctacaccttcggccagggcaccaagctggaaatcaaactcgagatccagaaccctgatcctgccgtgtaccagctgcgggatagcaagagcagcgacaagagcgtgtgtctgttcaccgacttcgacagccagaccaacgtgtcccagagcaaggactccgacgtgtacatcaccgataagtgcgtgctggacatgcggagcatggacttcaagagcaactccgccgtggcctggtccaacaagtccgatttcgcctgcgccaacgccttcaacaacagcattatccccgaggacacattcttcccaagccccgagagcagcgactccaccgaccacgtgaagcccaaagagacagagaacaccaagcagcccagcaagagctgccacaagcccaaggccatcgtgcacaccgagaaagtgaacatgatgagcctgaccgtgctgggcctgcggatgctgttcgccaaaaccgtggccgtgaacttcctgctgaccgccaagctgttcttcctcctcaccgcccgcgccaagagaagcggatctggcgtgaagcagaccctgaatttcgacctgctgaagctggctggcgacgtggaatccaacccaggccctactagtatggactggatttggcgcatccttttccttgtcggcgctgctaccggcgcgcattccttcgaacaagtgcaactggttcagagcggagccgagctgaagaaacctggggccagcgtgaaggtgtcctgtaaagccagcggctacacctttaccgactactacatgaaatgggtccgacaggccccaggccagggactcgaatggatcggcgatattatccccagcaacggggccaccttctacaaccagaaattcaagggccgcgtgaccatcaccgtggacaagagcacaagcaccgcctacatggaactgagcagcctgagaagcgaggacaccgccgtgtattattgcgccagaagccatctgctgcgggccagttggttcgcctattggggacagggaaccctggtcaccgttagctctacgcgtgaggacctgaagaacgtgttcccacctgaggtggccgtgttcgagcctagcgaggccgagatcagccacacccagaaagccaccctcgtgtgcctggctaccggcttctaccccgaccatgtggaactgtcttggtgggtcaacggcaaagaggtgcacagcggcgtgtgtaccgacccccagccactgaaagaacagcccgccctgaacgacagccggtactgcctgagcagcagactgagagtgtccgccaccttctggcagaacccccggaaccacttcagatgccaggtgcagttctacggcctgagcgagaacgacgagtggacccaggacagagccaagcccgtgacccagatcgtgtctgccgaagcctggggcagagccgatgatgtgattaagatccactggcaggaaaagaagtccaacaccatcctgggcagccaggaaggcaacaccatgaagaccaacgacacctacatgaagttcagctggctgaccgtgcccgagaagtccctggacaaagaacacagatgcatcgtgcggcacgaaaacaacaagaacggcgtggaccaggaaatcatcttcccacccatcaagaccgatgtgattacaatggaccccaaggacaactgctccaaggacgccaacgataccctgctgctccagctgaccaacaccagcgcctactacatgtacttgttgctgctgctgaagtccgtggtgtacttcgccatcatcacatgctgcctgctgatggctatggtcaagcggaaggacagccgggga

SEQ ID NO: 6283 - DNA, 2172 bp, synthetic construct
  source 1..2172: mol_type = other DNA
atggccttaccagtgaccgccttgctcctgccgctggccttgctgctccacgccgccaggccggacgtgcagatcacacagagccctagctacctggctgcctctcctggcgagacaatcaccatcaactgtcgggccagcaagagcatcagcaaggacctggcctggtatcaagagaagcccggcaagaccaacaagctgctgatctacagcggcagcacactccagtctggcatccccagcagattttccggctctggcagcggcaccgatttcaccctgaccataagcagcctggaacctgaggacttcgccatgtactactgccagcagcacaacaagtacccctacacctttggcggaggcaccaagctggaaatcaagagactcgagatccagaaccctgatcctgccgtgtaccagctgcgggatagcaagagcagcgacaagagcgtgtgtctgttcaccgacttcgacagccagaccaacgtgtcccagagcaaggactccgacgtgtacatcaccgataagtgcgtgctggacatgcggagcatggacttcaagagcaactccgccgtggcctggtccaacaagtccgatttcgcctgcgccaacgccttcaacaacagcattatccccgaggacacattcttcccaagccccgagagcagcgactccaccgaccacgtgaagcccaaagagacagagaacaccaagcagcccagcaagagctgccacaagcccaaggccatcgtgcacaccgagaaagtgaacatgatgagcctgaccgtgctgggcctgcggatgctgttcgccaaaaccgtggccgtgaacttcctgctgaccgccaagctgttcttcctcctcaccgcccgcgccaagagaagcggatctggcgtgaagcagaccctgaatttcgacctgctgaagctggctggcgacgtggaatccaacccaggccctactagtatggactggatttggcgcatccttttccttgtcggcgctgctaccggcgcgcattccttcgaacaagttcaactgcaacagcctggggccgagcttgttagacctggcgcttctgtgaagctgagctgcaaggccagcggctacaccttcaccagctactggatgaactgggtcaagcagcggcctgaccagggcctcgaatggatcggcagaatcgacccctacgacagcgagacacactacaaccagaagttcaaggacaaggccatcctgaccgtggacaagagcagctccaccgcctacatgcaactgagcagcctgacctctgaggatagcgccgtgtactattgcgccagaggcaactgggacgactattggggccagggcacaaccctgacagtgtctagtacgcgtgaggacctgaagaacgtgttcccacctgaggtggccgtgttcgagcctagcgaggccgagatcagccacacccagaaagccaccctcgtgtgcctggctaccggcttctaccccgaccatgtggaactgtcttggtgggtcaacggcaaagaggtgcacagcggcgtgtgtaccgacccccagccactgaaagaacagcccgccctgaacgacagccggtactgcctgagcagcagactgagagtgtccgccaccttctggcagaacccccggaaccacttcagatgccaggtgcagttctacggcctgagcgagaacgacgagtggacccaggacagagccaagcccgtgacccagatcgtgtctgccgaagcctggggcagagccgatgatgtgattaagatccactggcaggaaaagaagtccaacaccatcctgggcagccaggaaggcaacaccatgaagaccaacgacacctacatgaagttcagctggctgaccgtgcccgagaagtccctggacaaagaacacagatgcatcgtgcggcacgaaaacaacaagaacggcgtggaccaggaaatcatcttcccacccatcaagaccgatgtgattacaatggaccccaaggacaactgctccaaggacgccaacgataccctgctgctccagctgaccaacaccagcgcctactacatgtacttgttgctgctgctgaagtccgtggtgtacttcgccatcatcacatgctgcctgctgatggctatggtcaagcggaaggacagccgggga

SEQ ID NO: 6284 - DNA, 2178 bp, synthetic construct
  source 1..2178: mol_type = other DNA
atggccttaccagtgaccgccttgctcctgccgctggccttgctgctccacgccgccaggccggagatcgtgctgacacagagccctaccagcatgacagcctctccaggcgagcaagtgaccatcacctgtagagccagcagcagcatcaactacatgcactggtatcagcagaagcctggcgcaagccccagaccttggatctacgagacaagcaagctggcctccggcgtgcccgatagattttctggatctgccagcggcaccagctacagcctgaccatcaacaacatggaagccgaggacgccgccacctactactgccagcagtggaattacccctcctggacctttggcggaggcaccaagctggaacttaaactcgagatccagaaccctgatcctgccgtgtaccagctgcgggatagcaagagcagcgacaagagcgtgtgtctgttcaccgacttcgacagccagaccaacgtgtcccagagcaaggactccgacgtgtacatcaccgataagtgcgtgctggacatgcggagcatggacttcaagagcaactccgccgtggcctggtccaacaagtccgatttcgcctgcgccaacgccttcaacaacagcattatccccgaggacacattcttcccaagccccgagagcagcgactccaccgaccacgtgaagcccaaagagacagagaacaccaagcagcccagcaagagctgccacaagcccaaggccatcgtgcacaccgagaaagtgaacatgatgagcctgaccgtgctgggcctgcggatgctgttcgccaaaaccgtggccgtgaacttcctgctgaccgccaagctgttcttcctcctcaccgcccgcgccaagagaagcggatctggcgtgaagcagaccctgaatttcgacctgctgaagctggctggcgacgtggaatccaacccaggccctactagtatggactggatttggcgcatccttttccttgtcggcgctgctaccggcgcgcattccttcgaagaagtgcagctcgttgagtctggtggcggactggttcagcctggaagaagcctgaagctgagctgtgccgccagcggcttcaccttcagcgactacaatatggcctgggtccgacaggcccctaagaaaggactggaatgggtcgccaccatcctgtacgatggcggcagaacctactaccggggcagcgtgaagggcagattcaccatcagcagagacaacgccaagagcaccctgtacctgcggatggactctctgagaagcgaggataccgccacatattactgtgccacacacagccggggcaccgactactttgattattggggccagggcgtgatggttaccgtgtctagtacgcgtgaggacctgaagaacgtgttcccacctgaggtggccgtgttcgagcctagcgaggccgagatcagccacacccagaaagccaccctcgtgtgcctggctaccggcttctaccccgaccatgtggaactgtcttggtgggtcaacggcaaagaggtgcacagcggcgtgtgtaccgacccccagccactgaaagaacagcccgccctgaacgacagccggtactgcctgagcagcagactgagagtgtccgccaccttctggcagaacccccggaaccacttcagatgccaggtgcagttctacggcctgagcgagaacgacgagtggacccaggacagagccaagcccgtgacccagatcgtgtctgccgaagcctggggcagagccgatgatgtgattaagatccactggcaggaaaagaagtccaacaccatcctgggcagccaggaaggcaacaccatgaagaccaacgacacctacatgaagttcagctggctgaccgtgcccgagaagtccctggacaaagaacacagatgcatcgtgcggcacgaaaacaacaagaacggcgtggaccaggaaatcatcttcccacccatcaagaccgatgtgattacaatggaccccaaggacaactgctccaaggacgccaacgataccctgctgctccagctgaccaacaccagcgcctactacatgtacttgttgctgctgctgaagtccgtggtgtacttcgccatcatcacatgctgcctgctgatggctatggtcaagcggaaggacagccgggga

SEQ ID NO: 6285 - DNA, 2205 bp, synthetic construct
  source 1..2205: mol_type = other DNA
atggccttaccagtgaccgccttgctcctgccgctggccttgctgctccacgccgccaggccggacatcgtgatgacacagagcccttctagcctggccgtgtctgagggcgagacagtgaccatcaactgcaagagcagccagagcttcctgtctagcggcgacggcaagaattacgtggcctggtatcagtacaagcccggacagagccccaagctgctgatctactgggccagcacaagacagagcggcgtgcccgatagattcatcggctctggcagcggcaccgacttcaccctgacaatctctacagtgcaggccgaggacctggctatctactactgccagcagtattacgacacccctctgacctttggctccggcaccaagctggaaatcaaactcgagatccagaaccctgatcctgccgtgtaccagctgcgggatagcaagagcagcgacaagagcgtgtgtctgttcaccgacttcgacagccagaccaacgtgtcccagagcaaggactccgacgtgtacatcaccgataagtgcgtgctggacatgcggagcatggacttcaagagcaactccgccgtggcctggtccaacaagtccgatttcgcctgcgccaacgccttcaacaacagcattatccccgaggacacattcttcccaagccccgagagcagcgactccaccgaccacgtgaagcccaaagagacagagaacaccaagcagcccagcaagagctgccacaagcccaaggccatcgtgcacaccgagaaagtgaacatgatgagcctgaccgtgctgggcctgcggatgctgttcgccaaaaccgtggccgtgaacttcctgctgaccgccaagctgttcttcctcctcaccgcccgcgccaagagaagcggatctggcgtgaagcagaccctgaatttcgacctgctgaagctggctggcgacgtggaatccaacccaggccctactagtatggactggatttggcgcatccttttccttgtcggcgctgctaccggcgcgcattccttcgaagaagtgaagctgcaagagtctggccccagcctggtgcagagtagccaaacactgagcctgacctgtaccgtgtccggctttagcctgaccagctaccacatccactgggtccgacagacccctggcaaaggactggaatggatgggcgtgatgtggagcgacggcgacaccagctataacagcgccctgaagtcccggctgagcatcagcagagatacaagccagagccaggtgttcctgaagatgaacagcctccagaccgaggacaccgccacctactattgtgccagaggctactacagcagctacctgtacctttggttcgcctattggggccagggcaccctggttacagtcagctctacgcgtgaggacctgaagaacgtgttcccacctgaggtggccgtgttcgagcctagcgaggccgagatcagccacacccagaaagccaccctcgtgtgcctggctaccggcttctaccccgaccatgtggaactgtcttggtgggtcaacggcaaagaggtgcacagcggcgtgtgtaccgacccccagccactgaaagaacagcccgccctgaacgacagccggtactgcctgagcagcagactgagagtgtccgccaccttctggcagaacccccggaaccacttcagatgccaggtgcagttctacggcctgagcgagaacgacgagtggacccaggacagagccaagcccgtgacccagatcgtgtctgccgaagcctggggcagagccgatgatgtgattaagatccactggcaggaaaagaagtccaacaccatcctgggcagccaggaaggcaacaccatgaagaccaacgacacctacatgaagttcagctggctgaccgtgcccgagaagtccctggacaaagaacacagatgcatcgtgcggcacgaaaacaacaagaacggcgtggaccaggaaatcatcttcccacccatcaagaccgatgtgattacaatggaccccaaggacaactgctccaaggacgccaacgataccctgctgctccagctgaccaacaccagcgcctactacatgtacttgttgctgctgctgaagtccgtggtgtacttcgccatcatcacatgctgcctgctgatggctatggtcaagcggaaggacagccgggga

SEQ ID NO: 6286 - DNA, 2217 bp, synthetic construct
  source 1..2217: mol_type = other DNA
atggccttaccagtgaccgccttgctcctgccgctggccttgctgctccacgccgccaggccggacgtgctgatgacccagacacctgtgtctctgccagtgtctctcggaggccaggtgtccatctcctgtagaagcagccagagcctggtgcactccgacggcgatacctacctgcactggtatctccagaagcctggacagagccctcagctcctgatctaccgggtgtccaacagattcagcggcgtgcccgatagattttccggcagcggctctggcaccgacttcaccctgaagatcagcagagtggaacccgaggacctgggcctgtactactgtctccagaccacacacttcccaccttggacctttggcggaggcaccaagctggaaatgaaactcgagatccagaaccctgatcctgccgtgtaccagctgcgggatagcaagagcagcgacaagagcgtgtgtctgttcaccgacttcgacagccagaccaacgtgtcccagagcaaggactccgacgtgtacatcaccgataagtgcgtgctggacatgcggagcatggacttcaagagcaactccgccgtggcctggtccaacaagtccgatttcgcctgcgccaacgccttcaacaacagcattatccccgaggacacattcttcccaagccccgagagcagcgactccaccgaccacgtgaagcccaaagagacagagaacaccaagcagcccagcaagagctgccacaagcccaaggccatcgtgcacaccgagaaagtgaacatgatgagcctgaccgtgctgggcctgcggatgctgttcgccaaaaccgtggccgtgaacttcctgctgaccgccaagctgttcttcctcctcaccgcccgcgccaagagaagcggatctggcgtgaagcagaccctgaatttcgacctgctgaagctggctggcgacgtggaatccaacccaggccctactagtatggactggatttggcgcatccttttccttgtcggcgctgctaccggcgcgcattccttcgaacaggttcagctccagcagtctggacccgagcttagaaggccaggatctagcgtcagactgagctgcaaggccagcggctaccggatcaaggacttcctgatccactggattaagaacagacccgagcacggcctggaatggatcggatggattgaccctgaggacggcgagactaagtacgcccagaagttccagaccaaggccacactgaccgccgacacctctagcaacaccgcctacatgcaactgagcagcctgaccagcgaggacaccgccacctacttttgtgctagatggggcgacgtgtactacggcctgatgagaggccatgtgatggatgcctggggccagggaacaagcgtgacagtctcttctacgcgtgaggacctgaagaacgtgttcccacctgaggtggccgtgttcgagcctagcgaggccgagatcagccacacccagaaagccaccctcgtgtgcctggctaccggcttctaccccgaccatgtggaactgtcttggtgggtcaacggcaaagaggtgcacagcggcgtgtgtaccgacccccagccactgaaagaacagcccgccctgaacgacagccggtactgcctgagcagcagactgagagtgtccgccaccttctggcagaacccccggaaccacttcagatgccaggtgcagttctacggcctgagcgagaacgacgagtggacccaggacagagccaagcccgtgacccagatcgtgtctgccgaagcctggggcagagccgatgatgtgattaagatccactggcaggaaaagaagtccaacaccatcctgggcagccaggaaggcaacaccatgaagaccaacgacacctacatgaagttcagctggctgaccgtgcccgagaagtccctggacaaagaacacagatgcatcgtgcggcacgaaaacaacaagaacggcgtggaccaggaaatcatcttcccacccatcaagaccgatgtgattacaatggaccccaaggacaactgctccaaggacgccaacgataccctgctgctccagctgaccaacaccagcgcctactacatgtacttgttgctgctgctgaagtccgtggtgtacttcgccatcatcacatgctgcctgctgatggctatggtcaagcggaaggacagccgggga

SEQ ID NO: 6287 - DNA, 2202 bp, synthetic construct
  source 1..2202: mol_type = other DNA
atggccttaccagtgaccgccttgctcctgccgctggccttgctgctccacgccgccaggccggacatcgtgatgacacagagccccgccacactgtcactgtctccaggcgaaagagccacactgagctgtcggagcagcaagagcctccagaacgtgaacggcaacacctacctgtactggttccagcagaagcccggccagtctcctcagctcctgatctacagaatgagcaacctgaacagcggcgtgcccgacagattttctggcagcggaagcggcaccgagttcaccctgaccataagcagcctggaacctgaggacttcgccgtgtactactgtatgcagcacctggaataccccatcaccttcggagccggcaccaagctggaaatcaaactcgagatccagaaccctgatcctgccgtgtaccagctgcgggatagcaagagcagcgacaagagcgtgtgtctgttcaccgacttcgacagccagaccaacgtgtcccagagcaaggactccgacgtgtacatcaccgataagtgcgtgctggacatgcggagcatggacttcaagagcaactccgccgtggcctggtccaacaagtccgatttcgcctgcgccaacgccttcaacaacagcattatccccgaggacacattcttcccaagccccgagagcagcgactccaccgaccacgtgaagcccaaagagacagagaacaccaagcagcccagcaagagctgccacaagcccaaggccatcgtgcacaccgagaaagtgaacatgatgagcctgaccgtgctgggcctgcggatgctgttcgccaaaaccgtggccgtgaacttcctgctgaccgccaagctgttcttcctcctcaccgcccgcgccaagagaagcggatctggcgtgaagcagaccctgaatttcgacctgctgaagctggctggcgacgtggaatccaacccaggccctactagtatggactggatttggcgcatccttttccttgtcggcgctgctaccggcgcgcattccttcgaagaagtgcaactggttgaatctggcggcggactggttaagcctggcggatctctgaagctgagctgtgccgccagcggctacacctttaccagctacgtgatgcactgggtccgacaggcccctggcaaaggacttgagtggatcggctacatcaacccctacaacgatggcaccaagtacaacgagaagttccagggcagagtgaccatcagctccgacaagagcatcagcaccgcctacatggaactgagcagcctgagaagcgaggataccgccatgtactattgcgccagaggcacctactactacggcaccagagtgttcgactactggggccagggaaccctggtcacagtctcttctacgcgtgaggacctgaagaacgtgttcccacctgaggtggccgtgttcgagcctagcgaggccgagatcagccacacccagaaagccaccctcgtgtgcctggctaccggcttctaccccgaccatgtggaactgtcttggtgggtcaacggcaaagaggtgcacagcggcgtgtgtaccgacccccagccactgaaagaacagcccgccctgaacgacagccggtactgcctgagcagcagactgagagtgtccgccaccttctggcagaacccccggaaccacttcagatgccaggtgcagttctacggcctgagcgagaacgacgagtggacccaggacagagccaagcccgtgacccagatcgtgtctgccgaagcctggggcagagccgatgatgtgattaagatccactggcaggaaaagaagtccaacaccatcctgggcagccaggaaggcaacaccatgaagaccaacgacacctacatgaagttcagctggctgaccgtgcccgagaagtccctggacaaagaacacagatgcatcgtgcggcacgaaaacaacaagaacggcgtggaccaggaaatcatcttcccacccatcaagaccgatgtgattacaatggaccccaaggacaactgctccaaggacgccaacgataccctgctgctccagctgaccaacaccagcgcctactacatgtacttgttgctgctgctgaagtccgtggtgtacttcgccatcatcacatgctgcctgctgatggctatggtcaagcggaaggacagccgggga

SEQ ID NO: 6288 - DNA, 2190 bp, synthetic construct
  source 1..2190: mol_type = other DNA
atggccttaccagtgaccgccttgctcctgccgctggccttgctgctccacgccgccaggccggacatccagatgacacagagccctagcagcctgtctgccagcgtgggagacagagtgaccatcacatgcaaggccagcgaccacatcaacaactggctggcctggtatcagcagaagcctggacaggcccctaagctgctgatctacggcgctaccacactggaaacaggcgtgcccagcagattttctggcagcggctctggcaccgactacaccctgacaatatccagcctccagcctgaggacttcgccacctactactgtcagcagagctggaacaccccttggacattcggccagggcaccaagctggaaatcaagagactcgagatccagaaccctgatcctgccgtgtaccagctgcgggatagcaagagcagcgacaagagcgtgtgtctgttcaccgacttcgacagccagaccaacgtgtcccagagcaaggactccgacgtgtacatcaccgataagtgcgtgctggacatgcggagcatggacttcaagagcaactccgccgtggcctggtccaacaagtccgatttcgcctgcgccaacgccttcaacaacagcattatccccgaggacacattcttcccaagccccgagagcagcgactccaccgaccacgtgaagcccaaagagacagagaacaccaagcagcccagcaagagctgccacaagcccaaggccatcgtgcacaccgagaaagtgaacatgatgagcctgaccgtgctgggcctgcggatgctgttcgccaaaaccgtggccgtgaacttcctgctgaccgccaagctgttcttcctcctcaccgcccgcgccaagagaagcggatctggcgtgaagcagaccctgaatttcgacctgctgaagctggctggcgacgtggaatccaacccaggccctactagtatggactggatttggcgcatccttttccttgtcggcgctgctaccggcgcgcattccttcgaacaagttcagcttcaacagcctggcgctgagctggtcaaacctggcgcttctgtgaagatgagctgcaaagccagcggctacgccttcagcagctactggatcaactggatgaagcagaaacccggccagggactcgaatggatcggccaaatctatcccggcgacggcgacaccaactacaacggcaagttcaagggcagagccacactgaccgccgatacctctagcagcacagcctacatgcagctgagcagcctgaccagcgaagatagcgccgtgtacttctgtgcccggtccatcacaacagtcgtgggctgcgctatggactattggggccagggaacaagcgtgaccgtgtctagtacgcgtgaggacctgaagaacgtgttcccacctgaggtggccgtgttcgagcctagcgaggccgagatcagccacacccagaaagccaccctcgtgtgcctggctaccggcttctaccccgaccatgtggaactgtcttggtgggtcaacggcaaagaggtgcacagcggcgtgtgtaccgacccccagccactgaaagaacagcccgccctgaacgacagccggtactgcctgagcagcagactgagagtgtccgccaccttctggcagaacccccggaaccacttcagatgccaggtgcagttctacggcctgagcgagaacgacgagtggacccaggacagagccaagcccgtgacccagatcgtgtctgccgaagcctggggcagagccgatgatgtgattaagatccactggcaggaaaagaagtccaacaccatcctgggcagccaggaaggcaacaccatgaagaccaacgacacctacatgaagttcagctggctgaccgtgcccgagaagtccctggacaaagaacacagatgcatcgtgcggcacgaaaacaacaagaacggcgtggaccaggaaatcatcttcccacccatcaagaccgatgtgattacaatggaccccaaggacaactgctccaaggacgccaacgataccctgctgctccagctgaccaacaccagcgcctactacatgtacttgttgctgctgctgaagtccgtggtgtacttcgccatcatcacatgctgcctgctgatggctatggtcaagcggaaggacagccgggga

SEQ ID NO: 6289 - DNA, 2196 bp, synthetic construct
  source 1..2196: mol_type = other DNA
atggccttaccagtgaccgccttgctcctgccgctggccttgctgctccacgccgccaggccgcagatcgtgctgtctcagtctcctgccatcctgagcgcttccccaggcgagaaagtgaccatgacctgtagagccagcagcagcgtgtcctacatgcactggtatcagcagaagcccggcagcagccctaagccttggatctacgccaccagcaatctggcctctggcgtgccagccagattttctggctctggcagcggcaccagctacagcttcacaatcagcagagtggaagccgaggacgccgccacctactattgtcagcagtggaccttcaatcctcctaccttcggcggaggcacccggctggaaatcaaaagaacagtggctgctctcgagatccagaaccctgatcctgccgtgtaccagctgcgggatagcaagagcagcgacaagagcgtgtgtctgttcaccgacttcgacagccagaccaacgtgtcccagagcaaggactccgacgtgtacatcaccgataagtgcgtgctggacatgcggagcatggacttcaagagcaactccgccgtggcctggtccaacaagtccgatttcgcctgcgccaacgccttcaacaacagcattatccccgaggacacattcttcccaagccccgagagcagcgactccaccgaccacgtgaagcccaaagagacagagaacaccaagcagcccagcaagagctgccacaagcccaaggccatcgtgcacaccgagaaagtgaacatgatgagcctgaccgtgctgggcctgcggatgctgttcgccaaaaccgtggccgtgaacttcctgctgaccgccaagctgttcttcctcctcaccgcccgcgccaagagaagcggatctggcgtgaagcagaccctgaatttcgacctgctgaagctggctggcgacgtggaatccaacccaggccctactagtatggactggatttggcgcatccttttccttgtcggcgctgctaccggcgcgcattccttcgaacaggcttatctgcaacagagcggagccgaactcgtcagacctggcgcttctgtgaagatgagctgcaaggccagcggctacaccttcaccagctataatatgcactgggtcaagcagacccctcggcagggactcgaatggatcggcggaatctatcccggcaacggcgacacctcctacaaccagaagttcaagggcaaagccacactgaccgtgggcaagagcagcagcaccgcctatatgcagctcagcagcctgaccagcgaggacagcgccgtgtacttctgcgccagatacgactacaactacgctatggactactggggccagggcaccagcgtgacagttagctctgccagcacgcgtgaggacctgaagaacgtgttcccacctgaggtggccgtgttcgagcctagcgaggccgagatcagccacacccagaaagccaccctcgtgtgcctggctaccggcttctaccccgaccatgtggaactgtcttggtgggtcaacggcaaagaggtgcacagcggcgtgtgtaccgacccccagccactgaaagaacagcccgccctgaacgacagccggtactgcctgagcagcagactgagagtgtccgccaccttctggcagaacccccggaaccacttcagatgccaggtgcagttctacggcctgagcgagaacgacgagtggacccaggacagagccaagcccgtgacccagatcgtgtctgccgaagcctggggcagagccgatgatgtgattaagatccactggcaggaaaagaagtccaacaccatcctgggcagccaggaaggcaacaccatgaagaccaacgacacctacatgaagttcagctggctgaccgtgcccgagaagtccctggacaaagaacacagatgcatcgtgcggcacgaaaacaacaagaacggcgtggaccaggaaatcatcttcccacccatcaagaccgatgtgattacaatggaccccaaggacaactgctccaaggacgccaacgataccctgctgctccagctgaccaacaccagcgcctactacatgtacttgttgctgctgctgaagtccgtggtgtacttcgccatcatcacatgctgcctgctgatggctatggtcaagcggaaggacagccgggga

SEQ ID NO: 6290 - DNA, 2190 bp, synthetic construct
  source 1..2190: mol_type = other DNA
atggccttaccagtgaccgccttgctcctgccgctggccttgctgctccacgccgccaggccggagatcgtgctgacacagagccctgccaccctgtctctgagccctggcgaaagagccaccctgagctgtagagccagccagagcgtgtccagctacctggcctggtatcagcagaagcccggccaggctccccggctgctgatctacgatgccagcaatagagccaccggcatccccgccagattttccggctctggcagcggcaccgacttcaccctgaccatcagctccctggaacccgaggacttcgccgtgtactactgccagcagcggagcaactggcccatcacattcggccagggcacccggctggaaatcaaactcgagatccagaaccctgatcctgccgtgtaccagctgcgggatagcaagagcagcgacaagagcgtgtgtctgttcaccgacttcgacagccagaccaacgtgtcccagagcaaggactccgacgtgtacatcaccgataagtgcgtgctggacatgcggagcatggacttcaagagcaactccgccgtggcctggtccaacaagtccgatttcgcctgcgccaacgccttcaacaacagcattatccccgaggacacattcttcccaagccccgagagcagcgactccaccgaccacgtgaagcccaaagagacagagaacaccaagcagcccagcaagagctgccacaagcccaaggccatcgtgcacaccgagaaagtgaacatgatgagcctgaccgtgctgggcctgcggatgctgttcgccaaaaccgtggccgtgaacttcctgctgaccgccaagctgttcttcctcctcaccgcccgcgccaagagaagcggatctggcgtgaagcagaccctgaatttcgacctgctgaagctggctggcgacgtggaatccaacccaggccctactagtatggactggatttggcgcatccttttccttgtcggcgctgctaccggcgcgcattccttcgaagaggtgcagcttgttgagtctggcggaggactggtgcagcccgatagaagcctgagactgtcttgtgccgccagcggcttcaccttccacgattatgccatgcactgggtccgacaggcccctggcaaaggacttgaatgggtgtccaccatctcttggaacagcggcacaatcggctacgccgactctgtgaagggcagattcaccatcagccgggacaacgccaagaacagcctgtacctccagatgaactccctgagagccgaggacacagccctgtactactgcgccaaggacatccagtacggcaactactactacggcatggacgtgtggggccagggcacaacagtgacagtctcttctacgcgtgaggacctgaagaacgtgttcccacctgaggtggccgtgttcgagcctagcgaggccgagatcagccacacccagaaagccaccctcgtgtgcctggctaccggcttctaccccgaccatgtggaactgtcttggtgggtcaacggcaaagaggtgcacagcggcgtgtgtaccgacccccagccactgaaagaacagcccgccctgaacgacagccggtactgcctgagcagcagactgagagtgtccgccaccttctggcagaacccccggaaccacttcagatgccaggtgcagttctacggcctgagcgagaacgacgagtggacccaggacagagccaagcccgtgacccagatcgtgtctgccgaagcctggggcagagccgatgatgtgattaagatccactggcaggaaaagaagtccaacaccatcctgggcagccaggaaggcaacaccatgaagaccaacgacacctacatgaagttcagctggctgaccgtgcccgagaagtccctggacaaagaacacagatgcatcgtgcggcacgaaaacaacaagaacggcgtggaccaggaaatcatcttcccacccatcaagaccgatgtgattacaatggaccccaaggacaactgctccaaggacgccaacgataccctgctgctccagctgaccaacaccagcgcctactacatgtacttgttgctgctgctgaagtccgtggtgtacttcgccatcatcacatgctgcctgctgatggctatggtcaagcggaaggacagccgggga

SEQ ID NO: 6291 - DNA, 2175 bp, synthetic construct
  source 1..2175: mol_type = other DNA
atggccttaccagtgaccgccttgctcctgccgctggccttgctgctccacgccgccaggccggacatccagatgacacagagccctagcagcctgtctgccagcgtgggagatagagtgaccatcaactgcaaggccagccaggacatcaacagctacctgagctggttccagcagaagcctggcaaggcccctaagacactgatctaccgggccaacagactggtggatggcgtgccaagcagattttctggcagcggcagcggccaggattacaccctgacaatatccagcctccagcctgaggacttcgccacctactactgcctccagtacgacgagttccctctgacctttggcggaggcaccaaggtggaaatcaaactcgagatccagaaccctgatcctgccgtgtaccagctgcgggatagcaagagcagcgacaagagcgtgtgtctgttcaccgacttcgacagccagaccaacgtgtcccagagcaaggactccgacgtgtacatcaccgataagtgcgtgctggacatgcggagcatggacttcaagagcaactccgccgtggcctggtccaacaagtccgatttcgcctgcgccaacgccttcaacaacagcattatccccgaggacacattcttcccaagccccgagagcagcgactccaccgaccacgtgaagcccaaagagacagagaacaccaagcagcccagcaagagctgccacaagcccaaggccatcgtgcacaccgagaaagtgaacatgatgagcctgaccgtgctgggcctgcggatgctgttcgccaaaaccgtggccgtgaacttcctgctgaccgccaagctgttcttcctcctcaccgcccgcgccaagagaagcggatctggcgtgaagcagaccctgaatttcgacctgctgaagctggctggcgacgtggaatccaacccaggccctactagtatggactggatttggcgcatccttttccttgtcggcgctgctaccggcgcgcattccttcgaacaggtgcaactggtgcagtctggggccgaagtgaagaaacctggggcctctgtgaaggtgtcctgcaaagccagcggctacacctttaccaactacgacatcaactgggtccgacaggctccaggccaaggactggaatggatcggctggatctatcctggcgacggcagcaccaagtacaacgagaagttcaaggccaaggccacactgaccgccgataccagcacaagcaccgcctacatggaactgcggagcctgagaagcgacgacaccgccgtgtactattgtgcctccggctacgaggacgctatggactattggggccagggcaccaccgtgacagtgtctagtacgcgtgaggacctgaagaacgtgttcccacctgaggtggccgtgttcgagcctagcgaggccgagatcagccacacccagaaagccaccctcgtgtgcctggctaccggcttctaccccgaccatgtggaactgtcttggtgggtcaacggcaaagaggtgcacagcggcgtgtgtaccgacccccagccactgaaagaacagcccgccctgaacgacagccggtactgcctgagcagcagactgagagtgtccgccaccttctggcagaacccccggaaccacttcagatgccaggtgcagttctacggcctgagcgagaacgacgagtggacccaggacagagccaagcccgtgacccagatcgtgtctgccgaagcctggggcagagccgatgatgtgattaagatccactggcaggaaaagaagtccaacaccatcctgggcagccaggaaggcaacaccatgaagaccaacgacacctacatgaagttcagctggctgaccgtgcccgagaagtccctggacaaagaacacagatgcatcgtgcggcacgaaaacaacaagaacggcgtggaccaggaaatcatcttcccacccatcaagaccgatgtgattacaatggaccccaaggacaactgctccaaggacgccaacgataccctgctgctccagctgaccaacaccagcgcctactacatgtacttgttgctgctgctgaagtccgtggtgtacttcgccatcatcacatgctgcctgctgatggctatggtcaagcggaaggacagccgggga

SEQ ID NO: 6292 - DNA, 2181 bp, synthetic construct
  source 1..2181: mol_type = other DNA
atggccttaccagtgaccgccttgctcctgccgctggccttgctgctccacgccgccaggccggacatcgtgatgacccagacacctctgagcctgagcgtgacacctggacagcctgccagcattagctgcaagagcagccagtctctgctggacggcgacggcaagacctacctgaattggctgctccagaagcctggacagagccctcagcggctgatctacctggtgtccaagctggatagcggcgtgcccgatagattttctggcagcggctctggcaccgacttcaccctgaagatcagcagagtggaagccgaggacgtgggcgtgtactactgttggcagggcacacacttccccagaacattcggccagggcacaaagctggaaatcaaactcgagatccagaaccctgatcctgccgtgtaccagctgcgggatagcaagagcagcgacaagagcgtgtgtctgttcaccgacttcgacagccagaccaacgtgtcccagagcaaggactccgacgtgtacatcaccgataagtgcgtgctggacatgcggagcatggacttcaagagcaactccgccgtggcctggtccaacaagtccgatttcgcctgcgccaacgccttcaacaacagcattatccccgaggacacattcttcccaagccccgagagcagcgactccaccgaccacgtgaagcccaaagagacagagaacaccaagcagcccagcaagagctgccacaagcccaaggccatcgtgcacaccgagaaagtgaacatgatgagcctgaccgtgctgggcctgcggatgctgttcgccaaaaccgtggccgtgaacttcctgctgaccgccaagctgttcttcctcctcaccgcccgcgccaagagaagcggatctggcgtgaagcagaccctgaatttcgacctgctgaagctggctggcgacgtggaatccaacccaggccctactagtatggactggatttggcgcatccttttccttgtcggcgctgctaccggcgcgcattccttcgaacaagtgcaactggttcagagcggagccgaagtgaagaaacctggggcctctgtgaaggtgtcctgcaaggccagcggctacaccttcaaggacacctacatccactgggtccgacaggcccctggacaaggacttgagtggatgggcagaatcgaccccgccaacggcaacaccaaatacgaccccaagttccagggcagagtgaccatgaccagagacaccagcatcagcaccgcctacatggaactgagccggctgagatccgatgacaccgccgtgtactattgcgctagaagaggcggagtggattggggccagggaacactggttaccgtgtctagtacgcgtgaggacctgaagaacgtgttcccacctgaggtggccgtgttcgagcctagcgaggccgagatcagccacacccagaaagccaccctcgtgtgcctggctaccggcttctaccccgaccatgtggaactgtcttggtgggtcaacggcaaagaggtgcacagcggcgtgtgtaccgacccccagccactgaaagaacagcccgccctgaacgacagccggtactgcctgagcagcagactgagagtgtccgccaccttctggcagaacccccggaaccacttcagatgccaggtgcagttctacggcctgagcgagaacgacgagtggacccaggacagagccaagcccgtgacccagatcgtgtctgccgaagcctggggcagagccgatgatgtgattaagatccactggcaggaaaagaagtccaacaccatcctgggcagccaggaaggcaacaccatgaagaccaacgacacctacatgaagttcagctggctgaccgtgcccgagaagtccctggacaaagaacacagatgcatcgtgcggcacgaaaacaacaagaacggcgtggaccaggaaatcatcttcccacccatcaagaccgatgtgattacaatggaccccaaggacaactgctccaaggacgccaacgataccctgctgctccagctgaccaacaccagcgcctactacatgtacttgttgctgctgctgaagtccgtggtgtacttcgccatcatcacatgctgcctgctgatggctatggtcaagcggaaggacagccgggga

SEQ ID NO: 6293 - DNA, 2184 bp, synthetic construct
  source 1..2184: mol_type = other DNA
atggccttaccagtgaccgccttgctcctgccgctggccttgctgctccacgccgccaggccggacatccagatgacacagagccctagcagcctgtctgccagcgtgggagacagagtgaccatcacatgcaaggccagccaggatgtgtctacagccgtggcctggttccagcagaagcctggaaaagcccctaagctgctgatctacagccccagctacagatacaccggcgtgcccagcagattttctggcagcggctctggcaccgacttcaccctgacaatatccagcctccagcctgaggacttcacctactactgccagcagctctacagcaccccttacacattcggccagggcaccaaggtggaaatcaaactcgagatccagaaccctgatcctgccgtgtaccagctgcgggatagcaagagcagcgacaagagcgtgtgtctgttcaccgacttcgacagccagaccaacgtgtcccagagcaaggactccgacgtgtacatcaccgataagtgcgtgctggacatgcggagcatggacttcaagagcaactccgccgtggcctggtccaacaagtccgatttcgcctgcgccaacgccttcaacaacagcattatccccgaggacacattcttcccaagccccgagagcagcgactccaccgaccacgtgaagcccaaagagacagagaacaccaagcagcccagcaagagctgccacaagcccaaggccatcgtgcacaccgagaaagtgaacatgatgagcctgaccgtgctgggcctgcggatgctgttcgccaaaaccgtggccgtgaacttcctgctgaccgccaagctgttcttcctcctcaccgcccgcgccaagagaagcggatctggcgtgaagcagaccctgaatttcgacctgctgaagctggctggcgacgtggaatccaacccaggccctactagtatggactggatttggcgcatccttttccttgtcggcgctgctaccggcgcgcattccttcgaagaagtgcaactggttcagagcggagccgaagtgaagaaacctggggcctctgtgaaggtgtcctgcaaagccagcggctacacctttaccgactactacctggacgtggtcgtgcggcaagctcctggacaaggactggaatggatcggcagagtgaacccctacaacggcggcaccatctacaaccagaaattcaagggaagagtgaccctgaccagagacaccagcacctccacagcctacctggaactgagcagcctgagaagcgaagataccgccgtgtactactgcgccagggaccactacagatatgaccctctgctggactactggggccagggaaccctggttacagtgtctagtacgcgtgaggacctgaagaacgtgttcccacctgaggtggccgtgttcgagcctagcgaggccgagatcagccacacccagaaagccaccctcgtgtgcctggctaccggcttctaccccgaccatgtggaactgtcttggtgggtcaacggcaaagaggtgcacagcggcgtgtgtaccgacccccagccactgaaagaacagcccgccctgaacgacagccggtactgcctgagcagcagactgagagtgtccgccaccttctggcagaacccccggaaccacttcagatgccaggtgcagttctacggcctgagcgagaacgacgagtggacccaggacagagccaagcccgtgacccagatcgtgtctgccgaagcctggggcagagccgatgatgtgattaagatccactggcaggaaaagaagtccaacaccatcctgggcagccaggaaggcaacaccatgaagaccaacgacacctacatgaagttcagctggctgaccgtgcccgagaagtccctggacaaagaacacagatgcatcgtgcggcacgaaaacaacaagaacggcgtggaccaggaaatcatcttcccacccatcaagaccgatgtgattacaatggaccccaaggacaactgctccaaggacgccaacgataccctgctgctccagctgaccaacaccagcgcctactacatgtacttgttgctgctgctgaagtccgtggtgtacttcgccatcatcacatgctgcctgctgatggctatggtcaagcggaaggacagccgggga

SEQ ID NO: 6294 - DNA, 2202 bp, synthetic construct
  source 1..2202: mol_type = other DNA
atggccttaccagtgaccgccttgctcctgccgctggccttgctgctccacgccgccaggccggacatccagatgacacagagccctagcagcctgtctgccagcgtgggagacagagtgaccatcacctgtagagccagccagagcgtgtccaccagcagctacaactacatgcactggtatcagcagaagcccggcaagcctcctaagctgctgattaagtacgccagcaacctggaaagcggcgtgcccagcagattttctggcagcggctctggcaccgacttcaccctgacaatatccagcctccagcctgaggacttcgccacctactactgtcagcactcctgggagatccctctgacattcggccagggcaccaaggtggaaatcaaactcgagatccagaaccctgatcctgccgtgtaccagctgcgggatagcaagagcagcgacaagagcgtgtgtctgttcaccgacttcgacagccagaccaacgtgtcccagagcaaggactccgacgtgtacatcaccgataagtgcgtgctggacatgcggagcatggacttcaagagcaactccgccgtggcctggtccaacaagtccgatttcgcctgcgccaacgccttcaacaacagcattatccccgaggacacattcttcccaagccccgagagcagcgactccaccgaccacgtgaagcccaaagagacagagaacaccaagcagcccagcaagagctgccacaagcccaaggccatcgtgcacaccgagaaagtgaacatgatgagcctgaccgtgctgggcctgcggatgctgttcgccaaaaccgtggccgtgaacttcctgctgaccgccaagctgttcttcctcctcaccgcccgcgccaagagaagcggatctggcgtgaagcagaccctgaatttcgacctgctgaagctggctggcgacgtggaatccaacccaggccctactagtatggactggatttggcgcatccttttccttgtcggcgctgctaccggcgcgcattccttcgaagaagtgcaactggttcagagcggagccgaagtgaagaaacctggggcctctgtgaaggtgtcctgcaaggccagcggctacagcttcaccgactattatatgcactgggtccgacaggctccaggccagggacttgagtggatcggcagaatcaacccctacaacggcgctgccttctacagccagaacttcaaggatagagtgaccctgaccgtggacaccagcaccagcacagcctacctggaactgagcagcctgagaagcgaggacaccgccgtgtactactgcgccattgagagaggcgctgacctggaaggctacgctatggattattggggccagggaaccctggtcaccgtgtcatctacgcgtgaggacctgaagaacgtgttcccacctgaggtggccgtgttcgagcctagcgaggccgagatcagccacacccagaaagccaccctcgtgtgcctggctaccggcttctaccccgaccatgtggaactgtcttggtgggtcaacggcaaagaggtgcacagcggcgtgtgtaccgacccccagccactgaaagaacagcccgccctgaacgacagccggtactgcctgagcagcagactgagagtgtccgccaccttctggcagaacccccggaaccacttcagatgccaggtgcagttctacggcctgagcgagaacgacgagtggacccaggacagagccaagcccgtgacccagatcgtgtctgccgaagcctggggcagagccgatgatgtgattaagatccactggcaggaaaagaagtccaacaccatcctgggcagccaggaaggcaacaccatgaagaccaacgacacctacatgaagttcagctggctgaccgtgcccgagaagtccctggacaaagaacacagatgcatcgtgcggcacgaaaacaacaagaacggcgtggaccaggaaatcatcttcccacccatcaagaccgatgtgattacaatggaccccaaggacaactgctccaaggacgccaacgataccctgctgctccagctgaccaacaccagcgcctactacatgtacttgttgctgctgctgaagtccgtggtgtacttcgccatcatcacatgctgcctgctgatggctatggtcaagcggaaggacagccgggga

SEQ ID NO: 6295 - DNA, 2196 bp, synthetic construct
  source 1..2196: mol_type = other DNA
atggccttaccagtgaccgccttgctcctgccgctggccttgctgctccacgccgccaggccggagatcgtgctgacacagtctccagccacactgagcgcttctccaggcgagagagtgaccctgacctgtagagccagcagcaacgtgatctccagctacgtgcactggtatcagcagaagcctggcagcagccccagactgtttctgtacagcaccagcaatctggcctccggcgtgccaagcagattttctggctctggcagcggcaccgacttcacctttaccatctctagcctggaagccgaggacgccgccacctactactgtcagcagtacagcggctaccctctgaccttcggccagggcacaagactggaaatcaaactcgagatccagaaccctgatcctgccgtgtaccagctgcgggatagcaagagcagcgacaagagcgtgtgtctgttcaccgacttcgacagccagaccaacgtgtcccagagcaaggactccgacgtgtacatcaccgataagtgcgtgctggacatgcggagcatggacttcaagagcaactccgccgtggcctggtccaacaagtccgatttcgcctgcgccaacgccttcaacaacagcattatccccgaggacacattcttcccaagccccgagagcagcgactccaccgaccacgtgaagcccaaagagacagagaacaccaagcagcccagcaagagctgccacaagcccaaggccatcgtgcacaccgagaaagtgaacatgatgagcctgaccgtgctgggcctgcggatgctgttcgccaaaaccgtggccgtgaacttcctgctgaccgccaagctgttcttcctcctcaccgcccgcgccaagagaagcggatctggcgtgaagcagaccctgaatttcgacctgctgaagctggctggcgacgtggaatccaacccaggccctactagtatggactggatttggcgcatccttttccttgtcggcgctgctaccggcgcgcattccttcgaacaagttcagctgcaagagtctggccctggcctggtcaagcctagcgaaacactgagcctgacctgcgccgtgtctggctactctatcaccagcgcctactattggaactggatcagacagcctcctggcaaaggactggaatggatcggctacatcagctacgacggcagaaacaactacaaccccagcctgaagaaccggatcaccatcaatcccgacaccagcaagaaccagttcagcctccagctgaacagcgtgacccctgaggataccgccgtgtactactgtgccagagaaggcgactacgacgtgggcaactactacgctatggactactggggccagggaaccctggtcacagtctcttctacgcgtgaggacctgaagaacgtgttcccacctgaggtggccgtgttcgagcctagcgaggccgagatcagccacacccagaaagccaccctcgtgtgcctggctaccggcttctaccccgaccatgtggaactgtcttggtgggtcaacggcaaagaggtgcacagcggcgtgtgtaccgacccccagccactgaaagaacagcccgccctgaacgacagccggtactgcctgagcagcagactgagagtgtccgccaccttctggcagaacccccggaaccacttcagatgccaggtgcagttctacggcctgagcgagaacgacgagtggacccaggacagagccaagcccgtgacccagatcgtgtctgccgaagcctggggcagagccgatgatgtgattaagatccactggcaggaaaagaagtccaacaccatcctgggcagccaggaaggcaacaccatgaagaccaacgacacctacatgaagttcagctggctgaccgtgcccgagaagtccctggacaaagaacacagatgcatcgtgcggcacgaaaacaacaagaacggcgtggaccaggaaatcatcttcccacccatcaagaccgatgtgattacaatggaccccaaggacaactgctccaaggacgccaacgataccctgctgctccagctgaccaacaccagcgcctactacatgtacttgttgctgctgctgaagtccgtggtgtacttcgccatcatcacatgctgcctgctgatggctatggtcaagcggaaggacagccgggga

SEQ ID NO: 6296 - DNA, 2196 bp, synthetic construct
  source 1..2196: mol_type = other DNA
atggccttaccagtgaccgccttgctcctgccgctggccttgctgctccacgccgccaggccggagatcgtgctgacacagtctcccgccacactgtcactgtctccaggcgaaagagccacactgagctgtagagccagcagcaacgtgatctccagctacgtgcactggtatcagcagaagcctggacaggcccctcggctgctgatctacagcacaagcaatctggcctctggcatccccgccagattttctggctctggaagcggcaccgacttcaccctgaccataagcagcctggaacctgaggacttcgccgtgtactactgccagcagtatagcggctaccctctgaccttcggccagggcacaagactggaaatcaaactcgagatccagaaccctgatcctgccgtgtaccagctgcgggatagcaagagcagcgacaagagcgtgtgtctgttcaccgacttcgacagccagaccaacgtgtcccagagcaaggactccgacgtgtacatcaccgataagtgcgtgctggacatgcggagcatggacttcaagagcaactccgccgtggcctggtccaacaagtccgatttcgcctgcgccaacgccttcaacaacagcattatccccgaggacacattcttcccaagccccgagagcagcgactccaccgaccacgtgaagcccaaagagacagagaacaccaagcagcccagcaagagctgccacaagcccaaggccatcgtgcacaccgagaaagtgaacatgatgagcctgaccgtgctgggcctgcggatgctgttcgccaaaaccgtggccgtgaacttcctgctgaccgccaagctgttcttcctcctcaccgcccgcgccaagagaagcggatctggcgtgaagcagaccctgaatttcgacctgctgaagctggctggcgacgtggaatccaacccaggccctactagtatggactggatttggcgcatccttttccttgtcggcgctgctaccggcgcgcattccttcgaagaagtgcaactggtggaaagtggcggcggactggtgcaacctggaagaagcctgagactgtcctgtgccgccagcggctactctatcacaagcgcctactactggaactgggtccgacaggctcctggcaaaggactggaatgggtgtcctacatcagctacgacggcagaaacaactacaaccccagcctgaagaaccgcttcaccatcagccgggacaacgccaagaagtccctgtacctccagatgaacagcctgagagccgaggacacagccctgtactattgcgccaaagagggcgactacgacgtcggcaactactacgctatggactactggggccagggaaccaccgtgactgtctcttctacgcgtgaggacctgaagaacgtgttcccacctgaggtggccgtgttcgagcctagcgaggccgagatcagccacacccagaaagccaccctcgtgtgcctggctaccggcttctaccccgaccatgtggaactgtcttggtgggtcaacggcaaagaggtgcacagcggcgtgtgtaccgacccccagccactgaaagaacagcccgccctgaacgacagccggtactgcctgagcagcagactgagagtgtccgccaccttctggcagaacccccggaaccacttcagatgccaggtgcagttctacggcctgagcgagaacgacgagtggacccaggacagagccaagcccgtgacccagatcgtgtctgccgaagcctggggcagagccgatgatgtgattaagatccactggcaggaaaagaagtccaacaccatcctgggcagccaggaaggcaacaccatgaagaccaacgacacctacatgaagttcagctggctgaccgtgcccgagaagtccctggacaaagaacacagatgcatcgtgcggcacgaaaacaacaagaacggcgtggaccaggaaatcatcttcccacccatcaagaccgatgtgattacaatggaccccaaggacaactgctccaaggacgccaacgataccctgctgctccagctgaccaacaccagcgcctactacatgtacttgttgctgctgctgaagtccgtggtgtacttcgccatcatcacatgctgcctgctgatggctatggtcaagcggaaggacagccgggga

SEQ ID NO: 6297 - DNA, 2193 bp, synthetic construct
  source 1..2193: mol_type = other DNA
atggccttaccagtgaccgccttgctcctgccgctggccttgctgctccacgccgccaggccggacgtggtcatgacacagaccccactgagcctgcctgtgtctctgggagatcaggccagcatctcctgtagaagcagccagagcctggtgcacagcaacggcaacacctacctgcggtggtatctccagaagcctggacagagccccaaggtgctgatctacaaggtgtccaacagagtgtccggcgtgcccgatagattttctggcagcggctctggcaccgacttcaccctgaagatcaatagagtggaagccgaggacctgggcgtgtacttctgtagccagagcacccatgtgccttggacctttggcggaggcaccaagctggaaatcaagctcgagatccagaaccctgatcctgccgtgtaccagctgcgggatagcaagagcagcgacaagagcgtgtgtctgttcaccgacttcgacagccagaccaacgtgtcccagagcaaggactccgacgtgtacatcaccgataagtgcgtgctggacatgcggagcatggacttcaagagcaactccgccgtggcctggtccaacaagtccgatttcgcctgcgccaacgccttcaacaacagcattatccccgaggacacattcttcccaagccccgagagcagcgactccaccgaccacgtgaagcccaaagagacagagaacaccaagcagcccagcaagagctgccacaagcccaaggccatcgtgcacaccgagaaagtgaacatgatgagcctgaccgtgctgggcctgcggatgctgttcgccaaaaccgtggccgtgaacttcctgctgaccgccaagctgttcttcctcctcaccgcccgcgccaagagaagcggatctggcgtgaagcagaccctgaatttcgacctgctgaagctggctggcgacgtggaatccaacccaggccctactagtatggactggatttggcgcatccttttccttgtcggcgctgctaccggcgcgcattccttcgaaggcgtgaagctggacgagacaggcggaggacttgttcaacctggcggagccatgaagctgagctgtgtgaccagcggctttaccttcggccactactggatgaactgggtccgacagtcccctgagaaaggactggaatgggtcgcccagttcagaaacaagccctacaactacgaaacctactacagcgacagcgtgaagggcagattcaccatcagccgggacgacagcaagtccagcgtgtacctccagatgaacaacctgcgcgtggaagataccggcatctactactgtaccggggccagctacggcatggaatatctcggccagggcaccagcgtgaccgtgtctacaacgcgtgaggacctgaagaacgtgttcccacctgaggtggccgtgttcgagcctagcgaggccgagatcagccacacccagaaagccaccctcgtgtgcctggctaccggcttctaccccgaccatgtggaactgtcttggtgggtcaacggcaaagaggtgcacagcggcgtgtgtaccgacccccagccactgaaagaacagcccgccctgaacgacagccggtactgcctgagcagcagactgagagtgtccgccaccttctggcagaacccccggaaccacttcagatgccaggtgcagttctacggcctgagcgagaacgacgagtggacccaggacagagccaagcccgtgacccagatcgtgtctgccgaagcctggggcagagccgatgatgtgattaagatccactggcaggaaaagaagtccaacaccatcctgggcagccaggaaggcaacaccatgaagaccaacgacacctacatgaagttcagctggctgaccgtgcccgagaagtccctggacaaagaacacagatgcatcgtgcggcacgaaaacaacaagaacggcgtggaccaggaaatcatcttcccacccatcaagaccgatgtgattacaatggaccccaaggacaactgctccaaggacgccaacgataccctgctgctccagctgaccaacaccagcgcctactacatgtacttgttgctgctgctgaagtccgtggtgtacttcgccatcatcacatgctgcctgctgatggctatggtcaagcggaaggacagccgggga

SEQ ID NO: 6298 - DNA, 2211 bp, synthetic construct
  source 1..2211: mol_type = other DNA
atggccttaccagtgaccgccttgctcctgccgctggccttgctgctccacgccgccaggccgcaggtgcaactggtggaatctggcggcaatctggttcagcctggcggctctctgagactgtcttgtgccgccagcggcttcaccttcggcagcttttctatgagctgggtccgacaagctcctggcggaggacttgaatgggtggcaggactgtctgccagaagcagcctgacacactacgccgactctgtgaagggcagattcaccatcagccgggacaacgccaagaacagcgtgtacctccagatgaacagcctgagagtggaagataccgccgtgtactactgcgccagaagaagctacgacagcagcggctactggggccacttctacagctacatggatgtgtggggccagggcaccctggttacagtttctctcgagatccagaaccctgatcctgccgtgtaccagctgcgggatagcaagagcagcgacaagagcgtgtgtctgttcaccgacttcgacagccagaccaacgtgtcccagagcaaggactccgacgtgtacatcaccgataagtgcgtgctggacatgcggagcatggacttcaagagcaactccgccgtggcctggtccaacaagtccgatttcgcctgcgccaacgccttcaacaacagcattatccccgaggacacattcttcccaagccccgagagcagcgactccaccgaccacgtgaagcccaaagagacagagaacaccaagcagcccagcaagagctgccacaagcccaaggccatcgtgcacaccgagaaagtgaacatgatgagcctgaccgtgctgggcctgcggatgctgttcgccaaaaccgtggccgtgaacttcctgctgaccgccaagctgttcttcctcctcaccgcccgcgccaagagaagcggatctggcgtgaagcagaccctgaatttcgacctgctgaagctggctggcgacgtggaatccaacccaggccctactagtatggactggatttggcgcatccttttccttgtcggcgctgctaccggcgcgcattccttcgaatctgtgctgacccagcctagctccgtgtctgctgctcctggacagaaagtgaccatctcctgtagcggcagcaccagcaacatcggcaacaactacgtgtcctggtatcagcagcaccccggcaaggcccctaagctgatgatctacgacgtgtccaagaggcccagcggcgtgccagatagattttccggcagcaagagcggcaacagcgccagcctggatattagcggactccagtctgaggacgaggccgactactattgcgccgcctgggatgatagcctgagcgagtttctgtttggcaccggcaccaagctgacagtgcttggaacgcgtgaggacctgaagaacgtgttcccacctgaggtggccgtgttcgagcctagcgaggccgagatcagccacacccagaaagccaccctcgtgtgcctggctaccggcttctaccccgaccatgtggaactgtcttggtgggtcaacggcaaagaggtgcacagcggcgtgtgtaccgacccccagccactgaaagaacagcccgccctgaacgacagccggtactgcctgagcagcagactgagagtgtccgccaccttctggcagaacccccggaaccacttcagatgccaggtgcagttctacggcctgagcgagaacgacgagtggacccaggacagagccaagcccgtgacccagatcgtgtctgccgaagcctggggcagagccgatgatgtgattaagatccactggcaggaaaagaagtccaacaccatcctgggcagccaggaaggcaacaccatgaagaccaacgacacctacatgaagttcagctggctgaccgtgcccgagaagtccctggacaaagaacacagatgcatcgtgcggcacgaaaacaacaagaacggcgtggaccaggaaatcatcttcccacccatcaagaccgatgtgattacaatggaccccaaggacaactgctccaaggacgccaacgataccctgctgctccagctgaccaacaccagcgcctactacatgtacttgttgctgctgctgaagtccgtggtgtacttcgccatcatcacatgctgcctgctgatggctatggtcaagcggaaggacagccgggga

SEQ ID NO: 6299 - DNA, 2196 bp, synthetic construct
  source 1..2196: mol_type = other DNA
atggccttaccagtgaccgccttgctcctgccgctggccttgctgctccacgccgccaggccggacgtggtcatgacacagagcccttctagcctgtctgccagcgtgggcgacagagtgacaatcacctgtcagagcagcctggacatcagccactacctgaactggtatcagcagaagcccggcaaggcccctaagctgctgatctacgacgccagcaatctggaaaccggcgtgcccagcagattttctggcagcggaagcggcacccacttcaccttcacaatatccagcctccagcctgaggacttcgccacctactactgccagcagtacgacaacctgcctctgacctttggcggaggcaccaagctggaaatcaagagactcgagatccagaaccctgatcctgccgtgtaccagctgcgggatagcaagagcagcgacaagagcgtgtgtctgttcaccgacttcgacagccagaccaacgtgtcccagagcaaggactccgacgtgtacatcaccgataagtgcgtgctggacatgcggagcatggacttcaagagcaactccgccgtggcctggtccaacaagtccgatttcgcctgcgccaacgccttcaacaacagcattatccccgaggacacattcttcccaagccccgagagcagcgactccaccgaccacgtgaagcccaaagagacagagaacaccaagcagcccagcaagagctgccacaagcccaaggccatcgtgcacaccgagaaagtgaacatgatgagcctgaccgtgctgggcctgcggatgctgttcgccaaaaccgtggccgtgaacttcctgctgaccgccaagctgttcttcctcctcaccgcccgcgccaagagaagcggatctggcgtgaagcagaccctgaatttcgacctgctgaagctggctggcgacgtggaatccaacccaggccctactagtatggactggatttggcgcatccttttccttgtcggcgctgctaccggcgcgcattccttcgaacaagttcaactggttcaatcaggcggaggcgtggtgcaacctggtggctctctgagagtgtcttgtgctgcctctggcgtgaccctgagcgactatggaatgcactgggtccgacaggcccctggcaaaggacttgagtgggtcgccttcatcagaaacgacggcagcgacaagtattacgccgacagcgtgaagggcagattcaccatcagccgggacaacagcgagaaaaccgtgtctctccagatgtctagcctgagagccgaggacaccgccgtgtactactgtgccaagaatggcgagagcggccctctggactactggtatctggatctgtggggcagaggcaccctggtcacagtctcttctacgcgtgaggacctgaagaacgtgttcccacctgaggtggccgtgttcgagcctagcgaggccgagatcagccacacccagaaagccaccctcgtgtgcctggctaccggcttctaccccgaccatgtggaactgtcttggtgggtcaacggcaaagaggtgcacagcggcgtgtgtaccgacccccagccactgaaagaacagcccgccctgaacgacagccggtactgcctgagcagcagactgagagtgtccgccaccttctggcagaacccccggaaccacttcagatgccaggtgcagttctacggcctgagcgagaacgacgagtggacccaggacagagccaagcccgtgacccagatcgtgtctgccgaagcctggggcagagccgatgatgtgattaagatccactggcaggaaaagaagtccaacaccatcctgggcagccaggaaggcaacaccatgaagaccaacgacacctacatgaagttcagctggctgaccgtgcccgagaagtccctggacaaagaacacagatgcatcgtgcggcacgaaaacaacaagaacggcgtggaccaggaaatcatcttcccacccatcaagaccgatgtgattacaatggaccccaaggacaactgctccaaggacgccaacgataccctgctgctccagctgaccaacaccagcgcctactacatgtacttgttgctgctgctgaagtccgtggtgtacttcgccatcatcacatgctgcctgctgatggctatggtcaagcggaaggacagccgggga

SEQ ID NO: 6300 - DNA, 2208 bp, synthetic construct
  source 1..2208: mol_type = other DNA
atggccttaccagtgaccgccttgctcctgccgctggccttgctgctccacgccgccaggccgagctacgagctgacacagcctccatccgtgtctggcacacctggacagagagtggctatctcctgtagcggcagcagcagcaacatcggcaccagaatggtcacctggtatcagcacgtgccaggcacagcccctaagctgctgatcttcaacaacaaccagcggcctagcggcgtgcccgatagattttctgccagcaagagcggcacaagcgccagcctggctatcatcggactccagtctgacgacgaggccgactactactgtgccacctgggacgacaacgtgaagtcctacgtgttcggcaccggcaccaaagtgacagtgcttggaagtagactcgagatccagaaccctgatcctgccgtgtaccagctgcgggatagcaagagcagcgacaagagcgtgtgtctgttcaccgacttcgacagccagaccaacgtgtcccagagcaaggactccgacgtgtacatcaccgataagtgcgtgctggacatgcggagcatggacttcaagagcaactccgccgtggcctggtccaacaagtccgatttcgcctgcgccaacgccttcaacaacagcattatccccgaggacacattcttcccaagccccgagagcagcgactccaccgaccacgtgaagcccaaagagacagagaacaccaagcagcccagcaagagctgccacaagcccaaggccatcgtgcacaccgagaaagtgaacatgatgagcctgaccgtgctgggcctgcggatgctgttcgccaaaaccgtggccgtgaacttcctgctgaccgccaagctgttcttcctcctcaccgcccgcgccaagagaagcggatctggcgtgaagcagaccctgaatttcgacctgctgaagctggctggcgacgtggaatccaacccaggccctactagtatggactggatttggcgcatccttttccttgtcggcgctgctaccggcgcgcattccttcgaacttgaaatggcccaggttcagctccagcagtggggagctggactgctgaagcctagcgagacactgagcctgacctgtgctgtgtacggcggcagcttcagcggctactactggtcctggatcagacagcctcctggcaaaggactggaatggatcggcgagatcaaccacagcggctccaccaactacaaccccagcctgaagtccagagtgaccatcagcgtggacaccagcaagaaccagttctccctgaagctgagcagcgtgacagccgctgataccgccgtgtactattgcgctagagcccctcagtcttggtacgtgggagatgtgtggggccagggcacactggttacagtgtcatctacgcgtgaggacctgaagaacgtgttcccacctgaggtggccgtgttcgagcctagcgaggccgagatcagccacacccagaaagccaccctcgtgtgcctggctaccggcttctaccccgaccatgtggaactgtcttggtgggtcaacggcaaagaggtgcacagcggcgtgtgtaccgacccccagccactgaaagaacagcccgccctgaacgacagccggtactgcctgagcagcagactgagagtgtccgccaccttctggcagaacccccggaaccacttcagatgccaggtgcagttctacggcctgagcgagaacgacgagtggacccaggacagagccaagcccgtgacccagatcgtgtctgccgaagcctggggcagagccgatgatgtgattaagatccactggcaggaaaagaagtccaacaccatcctgggcagccaggaaggcaacaccatgaagaccaacgacacctacatgaagttcagctggctgaccgtgcccgagaagtccctggacaaagaacacagatgcatcgtgcggcacgaaaacaacaagaacggcgtggaccaggaaatcatcttcccacccatcaagaccgatgtgattacaatggaccccaaggacaactgctccaaggacgccaacgataccctgctgctccagctgaccaacaccagcgcctactacatgtacttgttgctgctgctgaagtccgtggtgtacttcgccatcatcacatgctgcctgctgatggctatggtcaagcggaaggacagccgggga

SEQ ID NO: 6301 - DNA, 2199 bp, synthetic construct
  source 1..2199: mol_type = other DNA
atggccttaccagtgaccgccttgctcctgccgctggccttgctgctccacgccgccaggccgcagtctgtgctgacacagcctcctagcctgtctgtggcccctggaaagacagccagcatcacatgcggcggcaacaacatcggcatgaagtccgtgcactggtatcagcagaggccaggacaggctcctgtgctggtcatctactacgacagcgacagaccctctggcatccccggcagattttccggcagcaactctggcaataccgccacactgaccatctccagagtggaagctggcgacgaggccgactactactgccaagtgtgggataccaccggcgatcaccctggctatgtgtttggcaccggcaccaaagtgacagtgcttctcgagatccagaaccctgatcctgccgtgtaccagctgcgggatagcaagagcagcgacaagagcgtgtgtctgttcaccgacttcgacagccagaccaacgtgtcccagagcaaggactccgacgtgtacatcaccgataagtgcgtgctggacatgcggagcatggacttcaagagcaactccgccgtggcctggtccaacaagtccgatttcgcctgcgccaacgccttcaacaacagcattatccccgaggacacattcttcccaagccccgagagcagcgactccaccgaccacgtgaagcccaaagagacagagaacaccaagcagcccagcaagagctgccacaagcccaaggccatcgtgcacaccgagaaagtgaacatgatgagcctgaccgtgctgggcctgcggatgctgttcgccaaaaccgtggccgtgaacttcctgctgaccgccaagctgttcttcctcctcaccgcccgcgccaagagaagcggatctggcgtgaagcagaccctgaatttcgacctgctgaagctggctggcgacgtggaatccaacccaggccctactagtatggactggatttggcgcatccttttccttgtcggcgctgctaccggcgcgcattccttcgaacaagttcaactggttcagagcggagccgaagtgaagaaacctggcagcagcgtgaaggtgtcctgcaaagcaagcggcggcacctttagcagctacgccatctcttgggtccgacaggcacctggacaaggactggaatggatgggcggcatcatccccatcttcggcacagccaattacgcccagaaattccagggcagagtgaccatcaccgccgacgagtctacaagcaccgcctacatggaactgagcagcctgagaagcgaggacaccgccgtgtactattgtgccagaggcgtgtacggctacagcggctctgccccttatgatgagtggggccagggaaccctggtcaccgtttcttctacgcgtgaggacctgaagaacgtgttcccacctgaggtggccgtgttcgagcctagcgaggccgagatcagccacacccagaaagccaccctcgtgtgcctggctaccggcttctaccccgaccatgtggaactgtcttggtgggtcaacggcaaagaggtgcacagcggcgtgtgtaccgacccccagccactgaaagaacagcccgccctgaacgacagccggtactgcctgagcagcagactgagagtgtccgccaccttctggcagaacccccggaaccacttcagatgccaggtgcagttctacggcctgagcgagaacgacgagtggacccaggacagagccaagcccgtgacccagatcgtgtctgccgaagcctggggcagagccgatgatgtgattaagatccactggcaggaaaagaagtccaacaccatcctgggcagccaggaaggcaacaccatgaagaccaacgacacctacatgaagttcagctggctgaccgtgcccgagaagtccctggacaaagaacacagatgcatcgtgcggcacgaaaacaacaagaacggcgtggaccaggaaatcatcttcccacccatcaagaccgatgtgattacaatggaccccaaggacaactgctccaaggacgccaacgataccctgctgctccagctgaccaacaccagcgcctactacatgtacttgttgctgctgctgaagtccgtggtgtacttcgccatcatcacatgctgcctgctgatggctatggtcaagcggaaggacagccgggga

SEQ ID NO: 6302 - DNA, 2193 bp, synthetic construct
  source 1..2193: mol_type = other DNA
atggccttaccagtgaccgccttgctcctgccgctggccttgctgctccacgccgccaggccggaggtgcaactggttgagtctggcggaggactggtgcagcctggaagaagcctgagactgtcttgtgccgccagcggcttcaccttcgacgattatgccatgcactgggtccgacaggcccctggcaaaggacttgaatgggtgtccggcatctcctggaacagcggctctatcggctacgccgattccgtgaagggcagattcaccatcagccgggacaacgccaagaacagcctgtacctccagatgaactccctgagagccgaggacacagccctgtactactgcgccaaagacaaaggcggaggctactacgacttttggagcggcagcgattattggggccagggcacactggtcacagtgtctagcctcgagatccagaaccctgatcctgccgtgtaccagctgcgggatagcaagagcagcgacaagagcgtgtgtctgttcaccgacttcgacagccagaccaacgtgtcccagagcaaggactccgacgtgtacatcaccgataagtgcgtgctggacatgcggagcatggacttcaagagcaactccgccgtggcctggtccaacaagtccgatttcgcctgcgccaacgccttcaacaacagcattatccccgaggacacattcttcccaagccccgagagcagcgactccaccgaccacgtgaagcccaaagagacagagaacaccaagcagcccagcaagagctgccacaagcccaaggccatcgtgcacaccgagaaagtgaacatgatgagcctgaccgtgctgggcctgcggatgctgttcgccaaaaccgtggccgtgaacttcctgctgaccgccaagctgttcttcctcctcaccgcccgcgccaagagaagcggatctggcgtgaagcagaccctgaatttcgacctgctgaagctggctggcgacgtggaatccaacccaggccctactagtatggactggatttggcgcatccttttccttgtcggcgctgctaccggcgcgcattccttcgaatcttctgagctgacacaggaccctgccgtgtctgttgctctgggccagacagtgcggattacctgtcagggcgatagcctgagaagctactacgcctcctggtatcagcagaagccaggccaggctcctgtgctggtcatctacggcaagaacaacagacccagcggcatccccgatagattcagcggaagcagctctggcaataccgccagcctgacaattactggcgctcaggccgaggacgaggccgactactactgcaacagcagagatagcagcggctgggttttcggcggaggcacaaaactgacagtgctgacgcgtgaggacctgaagaacgtgttcccacctgaggtggccgtgttcgagcctagcgaggccgagatcagccacacccagaaagccaccctcgtgtgcctggctaccggcttctaccccgaccatgtggaactgtcttggtgggtcaacggcaaagaggtgcacagcggcgtgtgtaccgacccccagccactgaaagaacagcccgccctgaacgacagccggtactgcctgagcagcagactgagagtgtccgccaccttctggcagaacccccggaaccacttcagatgccaggtgcagttctacggcctgagcgagaacgacgagtggacccaggacagagccaagcccgtgacccagatcgtgtctgccgaagcctggggcagagccgatgatgtgattaagatccactggcaggaaaagaagtccaacaccatcctgggcagccaggaaggcaacaccatgaagaccaacgacacctacatgaagttcagctggctgaccgtgcccgagaagtccctggacaaagaacacagatgcatcgtgcggcacgaaaacaacaagaacggcgtggaccaggaaatcatcttcccacccatcaagaccgatgtgattacaatggaccccaaggacaactgctccaaggacgccaacgataccctgctgctccagctgaccaacaccagcgcctactacatgtacttgttgctgctgctgaagtccgtggtgtacttcgccatcatcacatgctgcctgctgatggctatggtcaagcggaaggacagccgggga

SEQ ID NO: 6303 - DNA, 2220 bp, synthetic construct
  source 1..2220: mol_type = other DNA
atggccttaccagtgaccgccttgctcctgccgctggccttgctgctccacgccgccaggccggaagtgcagctccagcagtctggacctggcctggttaagcctagccagacactgagcctgacctgtgccatcagcggcgatagcgtgctgagcaacagcgacacctggaactggatcagacagagccctagcagaggactggaatggctgggcagaacctaccacagaagcacttggtacgacgactacgccagctctgtgcggggcagagtgtccatcaatgtggacaccagcaagaaccagtacagcctgcaactgaacgccgtgacacctgaggataccggcgtgtactactgcgccagagacagactccaggacggcaactcttggagcgacgcctttgatgtgtggggccagggcacaatggtcaccgtttctagcctcgagatccagaaccctgatcctgccgtgtaccagctgcgggatagcaagagcagcgacaagagcgtgtgtctgttcaccgacttcgacagccagaccaacgtgtcccagagcaaggactccgacgtgtacatcaccgataagtgcgtgctggacatgcggagcatggacttcaagagcaactccgccgtggcctggtccaacaagtccgatttcgcctgcgccaacgccttcaacaacagcattatccccgaggacacattcttcccaagccccgagagcagcgactccaccgaccacgtgaagcccaaagagacagagaacaccaagcagcccagcaagagctgccacaagcccaaggccatcgtgcacaccgagaaagtgaacatgatgagcctgaccgtgctgggcctgcggatgctgttcgccaaaaccgtggccgtgaacttcctgctgaccgccaagctgttcttcctcctcaccgcccgcgccaagagaagcggatctggcgtgaagcagaccctgaatttcgacctgctgaagctggctggcgacgtggaatccaacccaggccctactagtatggactggatttggcgcatccttttccttgtcggcgctgctaccggcgcgcattccttcgaacaatctgctctgacacagcctgccagcgtgtcaggatctcctggacagagcatcaccatctcttgcaccggcaccagctctgatgtcggcggctacaattacgtgtcctggtatcagcagcaccccggcaaggcccctaagctgatgatctacgacgtgtccaacagacccagcggcgtgtccaatagattctccggcagcaagagcggcaacaccgccagcctgacaatttctggactgcaagccgaggacgaggccgactactactgtagcagctacaccagcagcagcacactggtgtacgtgttcggcacaggcaccaaagtgaccgtgcttacgcgtgaggacctgaagaacgtgttcccacctgaggtggccgtgttcgagcctagcgaggccgagatcagccacacccagaaagccaccctcgtgtgcctggctaccggcttctaccccgaccatgtggaactgtcttggtgggtcaacggcaaagaggtgcacagcggcgtgtgtaccgacccccagccactgaaagaacagcccgccctgaacgacagccggtactgcctgagcagcagactgagagtgtccgccaccttctggcagaacccccggaaccacttcagatgccaggtgcagttctacggcctgagcgagaacgacgagtggacccaggacagagccaagcccgtgacccagatcgtgtctgccgaagcctggggcagagccgatgatgtgattaagatccactggcaggaaaagaagtccaacaccatcctgggcagccaggaaggcaacaccatgaagaccaacgacacctacatgaagttcagctggctgaccgtgcccgagaagtccctggacaaagaacacagatgcatcgtgcggcacgaaaacaacaagaacggcgtggaccaggaaatcatcttcccacccatcaagaccgatgtgattacaatggaccccaaggacaactgctccaaggacgccaacgataccctgctgctccagctgaccaacaccagcgcctactacatgtacttgttgctgctgctgaagtccgtggtgtacttcgccatcatcacatgctgcctgctgatggctatggtcaagcggaaggacagccgggga

SEQ ID NO: 6304 - DNA, 2154 bp, synthetic construct
  source 1..2154: mol_type = other DNA
atggccttaccagtgaccgccttgctcctgccgctggccttgctgctccacgccgccaggccgcaggtgcaactggttcagtctggggccgaagtgaagaaacctggggcctctgtgaaggtgtcctgcaaggcttccggctacacctttaccagctacgacatcaactgggtccgacaggccacaggccaaggactggaatggatgggctggatgaaccccaacagcggcaataccggctacgcccagaaattccagggcagagtgaccatgaccagaaacaccagcatcagcaccgcctacatggaactgagcagcctgagaagcgaggacaccgccgtgtactattgcgccagaggcgacagcaccaaggtggaaatcaaactcgagatccagaaccctgatcctgccgtgtaccagctgcgggatagcaagagcagcgacaagagcgtgtgtctgttcaccgacttcgacagccagaccaacgtgtcccagagcaaggactccgacgtgtacatcaccgataagtgcgtgctggacatgcggagcatggacttcaagagcaactccgccgtggcctggtccaacaagtccgatttcgcctgcgccaacgccttcaacaacagcattatccccgaggacacattcttcccaagccccgagagcagcgactccaccgaccacgtgaagcccaaagagacagagaacaccaagcagcccagcaagagctgccacaagcccaaggccatcgtgcacaccgagaaagtgaacatgatgagcctgaccgtgctgggcctgcggatgctgttcgccaaaaccgtggccgtgaacttcctgctgaccgccaagctgttcttcctcctcaccgcccgcgccaagagaagcggatctggcgtgaagcagaccctgaatttcgacctgctgaagctggctggcgacgtggaatccaacccaggccctactagtatggactggatttggcgcatccttttccttgtcggcgctgctaccggcgcgcattccttcgaacaatctgtgctgacccagcctagatccgtgtctggctctcctggacagagcgtgaccatctcttgtaccggcaccagctctgatgtcggcggctacaattacgtgtcctggtatcagcagcaccccggcgaagcccctaagctgattatctacgacgccgacaagcggcccagcggcatcagcaatagattcagctctggcaagagcggcaacaccgccagcctgacaatcagcggactccaggtggaagatgaggccgactactactgctgctcctatgccggcggaagcacctgggttttcggaggcggtacaaaagtgaccgtgctgacgcgtgaggacctgaagaacgtgttcccacctgaggtggccgtgttcgagcctagcgaggccgagatcagccacacccagaaagccaccctcgtgtgcctggctaccggcttctaccccgaccatgtggaactgtcttggtgggtcaacggcaaagaggtgcacagcggcgtgtgtaccgacccccagccactgaaagaacagcccgccctgaacgacagccggtactgcctgagcagcagactgagagtgtccgccaccttctggcagaacccccggaaccacttcagatgccaggtgcagttctacggcctgagcgagaacgacgagtggacccaggacagagccaagcccgtgacccagatcgtgtctgccgaagcctggggcagagccgatgatgtgattaagatccactggcaggaaaagaagtccaacaccatcctgggcagccaggaaggcaacaccatgaagaccaacgacacctacatgaagttcagctggctgaccgtgcccgagaagtccctggacaaagaacacagatgcatcgtgcggcacgaaaacaacaagaacggcgtggaccaggaaatcatcttcccacccatcaagaccgatgtgattacaatggaccccaaggacaactgctccaaggacgccaacgataccctgctgctccagctgaccaacaccagcgcctactacatgtacttgttgctgctgctgaagtccgtggtgtacttcgccatcatcacatgctgcctgctgatggctatggtcaagcggaaggacagccgggga

SEQ ID NO: 6305 - DNA, 2220 bp, synthetic construct
  source 1..2220: mol_type = other DNA
atggccttaccagtgaccgccttgctcctgccgctggccttgctgctccacgccgccaggccggaagtgcagctccagcagtctggacctggcctggttaagcctagccagacactgagcctgacctgtgccatcagcggcgatagcgtgtcctctaatagcgccgcctggaactggatcagacagagccctagcagaggactggaatggctgggcagaacctactaccgcagcaagtggtacagcgactacgccgtgtccgtgaagtcccggatcaccatcaatcccgacaccagcaagaaccagttcagcctgcaactgaacagcgtgacccctgaggataccgccgtgtactactgcgccagagatccctacgacttttggagcggctaccccgacgcctttgacatctggggacagggcacaatggtcaccgtttctagcctcgagatccagaaccctgatcctgccgtgtaccagctgcgggatagcaagagcagcgacaagagcgtgtgtctgttcaccgacttcgacagccagaccaacgtgtcccagagcaaggactccgacgtgtacatcaccgataagtgcgtgctggacatgcggagcatggacttcaagagcaactccgccgtggcctggtccaacaagtccgatttcgcctgcgccaacgccttcaacaacagcattatccccgaggacacattcttcccaagccccgagagcagcgactccaccgaccacgtgaagcccaaagagacagagaacaccaagcagcccagcaagagctgccacaagcccaaggccatcgtgcacaccgagaaagtgaacatgatgagcctgaccgtgctgggcctgcggatgctgttcgccaaaaccgtggccgtgaacttcctgctgaccgccaagctgttcttcctcctcaccgcccgcgccaagagaagcggatctggcgtgaagcagaccctgaatttcgacctgctgaagctggctggcgacgtggaatccaacccaggccctactagtatggactggatttggcgcatccttttccttgtcggcgctgctaccggcgcgcattccttcgaacaatctgctctgacacagcctgccagcgtgtcaggatctcctggacagagcatcaccatctcttgcaccggcaccagctctgatgtcggcggctacaattacgtgtcctggtatcagcagcaccccggcaaggcccctaaagtgattatcagcgaagtgaacaacagacccagcggcgtgtcccacagattcagcggctctaagtctggcaacaccgccagcctgacaatctctggactgcaagccgaggacgaggccgactacttctgtagcagctacaccagcggcagaaccctgtacgtgttcggcacaggcagcaaagtgacagtgctgggaacgcgtgaggacctgaagaacgtgttcccacctgaggtggccgtgttcgagcctagcgaggccgagatcagccacacccagaaagccaccctcgtgtgcctggctaccggcttctaccccgaccatgtggaactgtcttggtgggtcaacggcaaagaggtgcacagcggcgtgtgtaccgacccccagccactgaaagaacagcccgccctgaacgacagccggtactgcctgagcagcagactgagagtgtccgccaccttctggcagaacccccggaaccacttcagatgccaggtgcagttctacggcctgagcgagaacgacgagtggacccaggacagagccaagcccgtgacccagatcgtgtctgccgaagcctggggcagagccgatgatgtgattaagatccactggcaggaaaagaagtccaacaccatcctgggcagccaggaaggcaacaccatgaagaccaacgacacctacatgaagttcagctggctgaccgtgcccgagaagtccctggacaaagaacacagatgcatcgtgcggcacgaaaacaacaagaacggcgtggaccaggaaatcatcttcccacccatcaagaccgatgtgattacaatggaccccaaggacaactgctccaaggacgccaacgataccctgctgctccagctgaccaacaccagcgcctactacatgtacttgttgctgctgctgaagtccgtggtgtacttcgccatcatcacatgctgcctgctgatggctatggtcaagcggaaggacagccgggga

SEQ ID NO: 6306 - DNA, 2217 bp, synthetic construct
  source 1..2217: mol_type = other DNA
atggccttaccagtgaccgccttgctcctgccgctggccttgctgctccacgccgccaggccgcaatctgctctgacacagcctgccagcgcctctggatctcctggacagagcgtgaccatctcctgtaccggcacctcttctgatgtcggcggctacaactacgtgtcctggtatcagcagcaccccggcaaggcccctaagctgatgatctacgacgtgtccaacagacccagcggcgtgtccaatagattctccggcagcaagagcggcaacaccgccagcctgacaatttctggactgcaagccgaggacgaggccgactactactgtagcagctacaccagcagcagcacactgtacgtgttcggcacaggcacccagctcacagttcttctcgagatccagaaccctgatcctgccgtgtaccagctgcgggatagcaagagcagcgacaagagcgtgtgtctgttcaccgacttcgacagccagaccaacgtgtcccagagcaaggactccgacgtgtacatcaccgataagtgcgtgctggacatgcggagcatggacttcaagagcaactccgccgtggcctggtccaacaagtccgatttcgcctgcgccaacgccttcaacaacagcattatccccgaggacacattcttcccaagccccgagagcagcgactccaccgaccacgtgaagcccaaagagacagagaacaccaagcagcccagcaagagctgccacaagcccaaggccatcgtgcacaccgagaaagtgaacatgatgagcctgaccgtgctgggcctgcggatgctgttcgccaaaaccgtggccgtgaacttcctgctgaccgccaagctgttcttcctcctcaccgcccgcgccaagagaagcggatctggcgtgaagcagaccctgaatttcgacctgctgaagctggctggcgacgtggaatccaacccaggccctactagtatggactggatttggcgcatccttttccttgtcggcgctgctaccggcgcgcattccttcgaagaagtgcagctccagcagtctggacctggcctggttaagcctagccagacactgagcctgacctgtgccatcagcggcgattccatgctgagcaacagcgacacctggaactggatcagacagagccccagcagaggcctggaatggctgggcagaacataccacagaagcacttggtacgacgactacgccagctctgtgcggggcagagtgtccatcaatgtggacaccagcaagaaccagtacagcctgcaactgaacgccgtgacacctgaggataccggcgtgtactactgtgccagagtgcggctccaggacggcaattcttggagcgacgcctttgatgtgtggggccagggcacaatggtcaccgtttctagcacgcgtgaggacctgaagaacgtgttcccacctgaggtggccgtgttcgagcctagcgaggccgagatcagccacacccagaaagccaccctcgtgtgcctggctaccggcttctaccccgaccatgtggaactgtcttggtgggtcaacggcaaagaggtgcacagcggcgtgtgtaccgacccccagccactgaaagaacagcccgccctgaacgacagccggtactgcctgagcagcagactgagagtgtccgccaccttctggcagaacccccggaaccacttcagatgccaggtgcagttctacggcctgagcgagaacgacgagtggacccaggacagagccaagcccgtgacccagatcgtgtctgccgaagcctggggcagagccgatgatgtgattaagatccactggcaggaaaagaagtccaacaccatcctgggcagccaggaaggcaacaccatgaagaccaacgacacctacatgaagttcagctggctgaccgtgcccgagaagtccctggacaaagaacacagatgcatcgtgcggcacgaaaacaacaagaacggcgtggaccaggaaatcatcttcccacccatcaagaccgatgtgattacaatggaccccaaggacaactgctccaaggacgccaacgataccctgctgctccagctgaccaacaccagcgcctactacatgtacttgttgctgctgctgaagtccgtggtgtacttcgccatcatcacatgctgcctgctgatggctatggtcaagcggaaggacagccgggga

SEQ ID NO: 6307 - DNA, 2217 bp, synthetic construct
  source 1..2217: mol_type = other DNA
atggccttaccagtgaccgccttgctcctgccgctggccttgctgctccacgccgccaggccggacgtgatgctgacccagacaccactgagcctgcctgtgtctctgggcgatcaggccagcatctcctgtagaagcagccagagcatcctgcacagcaccggcgatacctacctggaatggtatctccagaagcctggacagagccccaagctgctgattaacaaggtgtccaaccggctgagcggcgtgcccgatagattttctggcagcggctctggcaccgacttcaccctgaagatcagcagagtggaagccgaggacctgggcgtgtactactgcttccaaggcagccatgttccttggacctttggcggaggcaccaagctggaaatcaagagagctgacgccgctcctaccgtgtccatctttcctctcgagatccagaaccctgatcctgccgtgtaccagctgcgggatagcaagagcagcgacaagagcgtgtgtctgttcaccgacttcgacagccagaccaacgtgtcccagagcaaggactccgacgtgtacatcaccgataagtgcgtgctggacatgcggagcatggacttcaagagcaactccgccgtggcctggtccaacaagtccgatttcgcctgcgccaacgccttcaacaacagcattatccccgaggacacattcttcccaagccccgagagcagcgactccaccgaccacgtgaagcccaaagagacagagaacaccaagcagcccagcaagagctgccacaagcccaaggccatcgtgcacaccgagaaagtgaacatgatgagcctgaccgtgctgggcctgcggatgctgttcgccaaaaccgtggccgtgaacttcctgctgaccgccaagctgttcttcctcctcaccgcccgcgccaagagaagcggatctggcgtgaagcagaccctgaatttcgacctgctgaagctggctggcgacgtggaatccaacccaggccctactagtatggactggatttggcgcatccttttccttgtcggcgctgctaccggcgcgcattccttcgaacaagtgaagctccagcagagcggccctagccttgtgaaacctggcgcttccgtgaagatgagctgcaaggccagcggctacaccttcaccgatttctacatgaaatgggtcaagcagagccacggcaagtctctggaatggatcggcgacatcaaccccaacatcggagacaccttctacaaccagaagttcaagggcaaagccacactgaccgtggacaagagcagcagcaccgcctacatgcagctcaacagcctgaccagcgaggacagcgccgtgtacttttgttccgtgggctacttcgacgtgtggggagccggaacaaccgtgacagtctcttctacgcgtgaggacctgaagaacgtgttcccacctgaggtggccgtgttcgagcctagcgaggccgagatcagccacacccagaaagccaccctcgtgtgcctggctaccggcttctaccccgaccatgtggaactgtcttggtgggtcaacggcaaagaggtgcacagcggcgtgtgtaccgacccccagccactgaaagaacagcccgccctgaacgacagccggtactgcctgagcagcagactgagagtgtccgccaccttctggcagaacccccggaaccacttcagatgccaggtgcagttctacggcctgagcgagaacgacgagtggacccaggacagagccaagcccgtgacccagatcgtgtctgccgaagcctggggcagagccgatgatgtgattaagatccactggcaggaaaagaagtccaacaccatcctgggcagccaggaaggcaacaccatgaagaccaacgacacctacatgaagttcagctggctgaccgtgcccgagaagtccctggacaaagaacacagatgcatcgtgcggcacgaaaacaacaagaacggcgtggaccaggaaatcatcttcccacccatcaagaccgatgtgattacaatggaccccaaggacaactgctccaaggacgccaacgataccctgctgctccagctgaccaacaccagcgcctactacatgtacttgttgctgctgctgaagtccgtggtgtacttcgccatcatcacatgctgcctgctgatggctatggtcaagcggaaggacagccgggga

SEQ ID NO: 6308 - DNA, 2205 bp, synthetic construct
  source 1..2205: mol_type = other DNA
atggccttaccagtgaccgccttgctcctgccgctggccttgctgctccacgccgccaggccggagatcgtgctgacacagtctcccgccacactgtcactgtctccaggcgaaagagccacactgagctgtagagccagccagagcgtgtccatctacctggcctggtatcagcagaagcctggacaggctccccggctgctgatctacgatgccagcaatagagccacaggcatccccgccagattttctggctctggcagcggcaccgatttcaccctgaccataagcagcctggaacctgaggacttcgccgtgtactactgccagcagagaagcaactggcctcctttcacattcggccctggcaccaaggtggacatcaaactcgagatccagaaccctgatcctgccgtgtaccagctgcgggatagcaagagcagcgacaagagcgtgtgtctgttcaccgacttcgacagccagaccaacgtgtcccagagcaaggactccgacgtgtacatcaccgataagtgcgtgctggacatgcggagcatggacttcaagagcaactccgccgtggcctggtccaacaagtccgatttcgcctgcgccaacgccttcaacaacagcattatccccgaggacacattcttcccaagccccgagagcagcgactccaccgaccacgtgaagcccaaagagacagagaacaccaagcagcccagcaagagctgccacaagcccaaggccatcgtgcacaccgagaaagtgaacatgatgagcctgaccgtgctgggcctgcggatgctgttcgccaaaaccgtggccgtgaacttcctgctgaccgccaagctgttcttcctcctcaccgcccgcgccaagagaagcggatctggcgtgaagcagaccctgaatttcgacctgctgaagctggctggcgacgtggaatccaacccaggccctactagtatggactggatttggcgcatccttttccttgtcggcgctgctaccggcgcgcattccttcgaacaggtgcagcttgttgaaagcggaggcggagttgtgcagcctggcagaagtctgagactgtcttgtgccgccagcggcttcaccttcagcagctatggaatgcactgggtccgacaggcccctggcaaaggacttgaatgggttgccgtgatctgggacgacggcagcaacaagtattacgtggacagcgtgaagggcagattcaccatcagccgggacaacagcaagaacaccctgtacctccagatgaacagcctgagagccgaggacacagccgtgtattattgcgccagagatgactactacggcagcggctccttcaacagctactatggcacagacgtgtggggccagggcacaacagttaccgttagctctacgcgtgaggacctgaagaacgtgttcccacctgaggtggccgtgttcgagcctagcgaggccgagatcagccacacccagaaagccaccctcgtgtgcctggctaccggcttctaccccgaccatgtggaactgtcttggtgggtcaacggcaaagaggtgcacagcggcgtgtgtaccgacccccagccactgaaagaacagcccgccctgaacgacagccggtactgcctgagcagcagactgagagtgtccgccaccttctggcagaacccccggaaccacttcagatgccaggtgcagttctacggcctgagcgagaacgacgagtggacccaggacagagccaagcccgtgacccagatcgtgtctgccgaagcctggggcagagccgatgatgtgattaagatccactggcaggaaaagaagtccaacaccatcctgggcagccaggaaggcaacaccatgaagaccaacgacacctacatgaagttcagctggctgaccgtgcccgagaagtccctggacaaagaacacagatgcatcgtgcggcacgaaaacaacaagaacggcgtggaccaggaaatcatcttcccacccatcaagaccgatgtgattacaatggaccccaaggacaactgctccaaggacgccaacgataccctgctgctccagctgaccaacaccagcgcctactacatgtacttgttgctgctgctgaagtccgtggtgtacttcgccatcatcacatgctgcctgctgatggctatggtcaagcggaaggacagccgggga

SEQ ID NO: 6309 - DNA, 2160 bp, synthetic construct
  source 1..2160: mol_type = other DNA
atggccttaccagtgaccgccttgctcctgccgctggccttgctgctccacgccgccaggccggacatccagatgacacagagccctagcagcctgtctgccagcgtgggagacagagtgaccatcacctgtagagccagccagggcatctcttcttggctggcctggtatcagcagaagcccgagaaggcccctaagagcctgatctatgccgccagctctctccagagcggagtgcctagcagattttctggcagcggctccggcaccgatttcaccctgacaatatccagcctccagcctgaggacttcgccacctactactgccagcagtacaacagctacccctacaccttcggccagggcaccaagctggaaatcaaactcgagatccagaaccctgatcctgccgtgtaccagctgcgggatagcaagagcagcgacaagagcgtgtgtctgttcaccgacttcgacagccagaccaacgtgtcccagagcaaggactccgacgtgtacatcaccgataagtgcgtgctggacatgcggagcatggacttcaagagcaactccgccgtggcctggtccaacaagtccgatttcgcctgcgccaacgccttcaacaacagcattatccccgaggacacattcttcccaagccccgagagcagcgactccaccgaccacgtgaagcccaaagagacagagaacaccaagcagcccagcaagagctgccacaagcccaaggccatcgtgcacaccgagaaagtgaacatgatgagcctgaccgtgctgggcctgcggatgctgttcgccaaaaccgtggccgtgaacttcctgctgaccgccaagctgttcttcctcctcaccgcccgcgccaagagaagcggatctggcgtgaagcagaccctgaatttcgacctgctgaagctggctggcgacgtggaatccaacccaggccctactagtatggactggatttggcgcatccttttccttgtcggcgctgctaccggcgcgcattccttcgaagaagtgcaactggttcaatctggcggcggactggttcatccaggcggttctctgagactgagctgtgccggctctggcttcaccttcagcacctacctgatgtactgggtccgacaggcccctggcaagacactggaatgggtgtccgctattggcagcggaggcgatacctactacgccgactctgtgaagggcagattcaccatcagccgggacaacgccaagaacagcctgtacctccagatgaactccctgagagccgaggacatggccgtgtactactgtgccagaggactcggctattggggccagggaacactggtcacagtgtcctctacgcgtgaggacctgaagaacgtgttcccacctgaggtggccgtgttcgagcctagcgaggccgagatcagccacacccagaaagccaccctcgtgtgcctggctaccggcttctaccccgaccatgtggaactgtcttggtgggtcaacggcaaagaggtgcacagcggcgtgtgtaccgacccccagccactgaaagaacagcccgccctgaacgacagccggtactgcctgagcagcagactgagagtgtccgccaccttctggcagaacccccggaaccacttcagatgccaggtgcagttctacggcctgagcgagaacgacgagtggacccaggacagagccaagcccgtgacccagatcgtgtctgccgaagcctggggcagagccgatgatgtgattaagatccactggcaggaaaagaagtccaacaccatcctgggcagccaggaaggcaacaccatgaagaccaacgacacctacatgaagttcagctggctgaccgtgcccgagaagtccctggacaaagaacacagatgcatcgtgcggcacgaaaacaacaagaacggcgtggaccaggaaatcatcttcccacccatcaagaccgatgtgattacaatggaccccaaggacaactgctccaaggacgccaacgataccctgctgctccagctgaccaacaccagcgcctactacatgtacttgttgctgctgctgaagtccgtggtgtacttcgccatcatcacatgctgcctgctgatggctatggtcaagcggaaggacagccgggga

SEQ ID NO: 6310 - DNA, 2217 bp, synthetic construct
  source 1..2217: mol_type = other DNA
atggccttaccagtgaccgccttgctcctgccgctggccttgctgctccacgccgccaggccgctgcctgttctgacacagcctccatccgtgtctgtggcccctggaaagaccgccagaatcacatgcggcggcaacaacatcggcagcaagagcgtgcactggtatcagcagaagcctggacaggctcctgtgctggtggtgtacgacgacagcgatagacctagcggcatccccgagagattcagcggcagcaattccggcaataccgccacactgaccatcagcagagtggaagctggcgacgaggccgactactactgccaagtgtgggacagcagcagcgactacgtggtgtttggcggcggaacaaagctgacagtgcttctcgagatccagaaccctgatcctgccgtgtaccagctgcgggatagcaagagcagcgacaagagcgtgtgtctgttcaccgacttcgacagccagaccaacgtgtcccagagcaaggactccgacgtgtacatcaccgataagtgcgtgctggacatgcggagcatggacttcaagagcaactccgccgtggcctggtccaacaagtccgatttcgcctgcgccaacgccttcaacaacagcattatccccgaggacacattcttcccaagccccgagagcagcgactccaccgaccacgtgaagcccaaagagacagagaacaccaagcagcccagcaagagctgccacaagcccaaggccatcgtgcacaccgagaaagtgaacatgatgagcctgaccgtgctgggcctgcggatgctgttcgccaaaaccgtggccgtgaacttcctgctgaccgccaagctgttcttcctcctcaccgcccgcgccaagagaagcggatctggcgtgaagcagaccctgaatttcgacctgctgaagctggctggcgacgtggaatccaacccaggccctactagtatggactggatttggcgcatccttttccttgtcggcgctgctaccggcgcgcattccttcgaagaagttcaactggtgcagagcggagccgaagtgaagaagccaggcgagagcctgaagattagctgcaaaggcagcggctacagcttcaccagctactggatcggctgggtccgacagatgcctggcaaaggactggaatggatgggcatcatctaccccggcgacagcgacaccagatacagccctagctttcagggccaagtgaccatctccgccgacaagagcatcagcacagcctacctccagtggtcctctctgaaggccagcgataccgccatgtactactgcgccagacaagtctggggatggcaaggcggcatgtaccccaggtctaactggtggtacaacctggactcttggggccagggcacactggtcacagtctcttctacgcgtgaggacctgaagaacgtgttcccacctgaggtggccgtgttcgagcctagcgaggccgagatcagccacacccagaaagccaccctcgtgtgcctggctaccggcttctaccccgaccatgtggaactgtcttggtgggtcaacggcaaagaggtgcacagcggcgtgtgtaccgacccccagccactgaaagaacagcccgccctgaacgacagccggtactgcctgagcagcagactgagagtgtccgccaccttctggcagaacccccggaaccacttcagatgccaggtgcagttctacggcctgagcgagaacgacgagtggacccaggacagagccaagcccgtgacccagatcgtgtctgccgaagcctggggcagagccgatgatgtgattaagatccactggcaggaaaagaagtccaacaccatcctgggcagccaggaaggcaacaccatgaagaccaacgacacctacatgaagttcagctggctgaccgtgcccgagaagtccctggacaaagaacacagatgcatcgtgcggcacgaaaacaacaagaacggcgtggaccaggaaatcatcttcccacccatcaagaccgatgtgattacaatggaccccaaggacaactgctccaaggacgccaacgataccctgctgctccagctgaccaacaccagcgcctactacatgtacttgttgctgctgctgaagtccgtggtgtacttcgccatcatcacatgctgcctgctgatggctatggtcaagcggaaggacagccgggga

SEQ ID NO: 6311 - DNA, 2196 bp, synthetic construct
  source 1..2196: mol_type = other DNA
atggccttaccagtgaccgccttgctcctgccgctggccttgctgctccacgccgccaggccggagctggtcatgacacagagccctgcttctctggccgtgtcactgggacagagagccaccatctcttgcagagccagcgagagcgtggacagctacggcaagagcttcatgcactggtatcagctcaagcccggccagcctcctaagctgctgatctacagagcctccaacctggaaagcggcgtgccagccagattttctggcagcggcagcagaaccgacttcaccctgaccattgatcccgtggaagccgatgatgccgccacctactactgccagcagaacaacgaggacccctggacatttggcggaggcaccaagctggaaatcaaactcgagatccagaaccctgatcctgccgtgtaccagctgcgggatagcaagagcagcgacaagagcgtgtgtctgttcaccgacttcgacagccagaccaacgtgtcccagagcaaggactccgacgtgtacatcaccgataagtgcgtgctggacatgcggagcatggacttcaagagcaactccgccgtggcctggtccaacaagtccgatttcgcctgcgccaacgccttcaacaacagcattatccccgaggacacattcttcccaagccccgagagcagcgactccaccgaccacgtgaagcccaaagagacagagaacaccaagcagcccagcaagagctgccacaagcccaaggccatcgtgcacaccgagaaagtgaacatgatgagcctgaccgtgctgggcctgcggatgctgttcgccaaaaccgtggccgtgaacttcctgctgaccgccaagctgttcttcctcctcaccgcccgcgccaagagaagcggatctggcgtgaagcagaccctgaatttcgacctgctgaagctggctggcgacgtggaatccaacccaggccctactagtatggactggatttggcgcatccttttccttgtcggcgctgctaccggcgcgcattccttcgaagaagtgcagctcgaacagtctggccccgagcttgtgaaacctggcgcttccgtgaagatgagctgcaaggccagcggctacaccttcaccaactactacatgaaatgggtcaagcagagccacggcaagtccctggaatggatcggcgatctgaaccccaacaacggcgacaccttctacaaccagaagttcaagggcaaagccacactgaccgtggacaagagcagcaacaccgcctacatgcagctcaactccctgaccagcgaggacagcgccgtgtactactgtgccagaaccggcagatacgaagagaacgctatggactactggggccagggcacaagcgtgacagtctcttctacgcgtgaggacctgaagaacgtgttcccacctgaggtggccgtgttcgagcctagcgaggccgagatcagccacacccagaaagccaccctcgtgtgcctggctaccggcttctaccccgaccatgtggaactgtcttggtgggtcaacggcaaagaggtgcacagcggcgtgtgtaccgacccccagccactgaaagaacagcccgccctgaacgacagccggtactgcctgagcagcagactgagagtgtccgccaccttctggcagaacccccggaaccacttcagatgccaggtgcagttctacggcctgagcgagaacgacgagtggacccaggacagagccaagcccgtgacccagatcgtgtctgccgaagcctggggcagagccgatgatgtgattaagatccactggcaggaaaagaagtccaacaccatcctgggcagccaggaaggcaacaccatgaagaccaacgacacctacatgaagttcagctggctgaccgtgcccgagaagtccctggacaaagaacacagatgcatcgtgcggcacgaaaacaacaagaacggcgtggaccaggaaatcatcttcccacccatcaagaccgatgtgattacaatggaccccaaggacaactgctccaaggacgccaacgataccctgctgctccagctgaccaacaccagcgcctactacatgtacttgttgctgctgctgaagtccgtggtgtacttcgccatcatcacatgctgcctgctgatggctatggtcaagcggaaggacagccgggga

SEQ ID NO: 6312 - DNA, 2178 bp, synthetic construct
  source 1..2178: mol_type = other DNA
atggccttaccagtgaccgccttgctcctgccgctggccttgctgctccacgccgccaggccggacgtggtcatgacacagagcccttctagcctgtctgccagcgtgggcgacagagtgaccatcacctgtatggcctccgaggacatctacatccggctggcctggtatcagcagaagcctggaaacgcccctaagctgctgatctacgccgccacctctctggaaacaggcgtgccaagcagattttccggcagcggctctggcaccgatttcaccctgacaatatccagcctccagcctgaggacttcgccacctactactgccagcagtattggagcagcccctggacatttggcggaggcaccaaggtggaaatcaaactcgagatccagaaccctgatcctgccgtgtaccagctgcgggatagcaagagcagcgacaagagcgtgtgtctgttcaccgacttcgacagccagaccaacgtgtcccagagcaaggactccgacgtgtacatcaccgataagtgcgtgctggacatgcggagcatggacttcaagagcaactccgccgtggcctggtccaacaagtccgatttcgcctgcgccaacgccttcaacaacagcattatccccgaggacacattcttcccaagccccgagagcagcgactccaccgaccacgtgaagcccaaagagacagagaacaccaagcagcccagcaagagctgccacaagcccaaggccatcgtgcacaccgagaaagtgaacatgatgagcctgaccgtgctgggcctgcggatgctgttcgccaaaaccgtggccgtgaacttcctgctgaccgccaagctgttcttcctcctcaccgcccgcgccaagagaagcggatctggcgtgaagcagaccctgaatttcgacctgctgaagctggctggcgacgtggaatccaacccaggccctactagtatggactggatttggcgcatccttttccttgtcggcgctgctaccggcgcgcattccttcgaacaggttcagctgcaagagtctggccccggactggtcaagcctagccaaacactgagcctgacctgtaccgtgtccggctacagcatcaccagcgactacacctggaactggatcagacagcctcctggcaacggactggaatggatcggctacatcacctacagcggcagcaccagctacaaccccagcctgaaaagccgggtgctgatctccgtggacaccagcaagaatcaggtgtccctgaagctgagcagcgtgacagccgctgataccgccgtgtactactgtgccagactggggagaagatacacaatggactactggggccagggcaccaccgtgacagtttcttctacgcgtgaggacctgaagaacgtgttcccacctgaggtggccgtgttcgagcctagcgaggccgagatcagccacacccagaaagccaccctcgtgtgcctggctaccggcttctaccccgaccatgtggaactgtcttggtgggtcaacggcaaagaggtgcacagcggcgtgtgtaccgacccccagccactgaaagaacagcccgccctgaacgacagccggtactgcctgagcagcagactgagagtgtccgccaccttctggcagaacccccggaaccacttcagatgccaggtgcagttctacggcctgagcgagaacgacgagtggacccaggacagagccaagcccgtgacccagatcgtgtctgccgaagcctggggcagagccgatgatgtgattaagatccactggcaggaaaagaagtccaacaccatcctgggcagccaggaaggcaacaccatgaagaccaacgacacctacatgaagttcagctggctgaccgtgcccgagaagtccctggacaaagaacacagatgcatcgtgcggcacgaaaacaacaagaacggcgtggaccaggaaatcatcttcccacccatcaagaccgatgtgattacaatggaccccaaggacaactgctccaaggacgccaacgataccctgctgctccagctgaccaacaccagcgcctactacatgtacttgttgctgctgctgaagtccgtggtgtacttcgccatcatcacatgctgcctgctgatggctatggtcaagcggaaggacagccgggga

SEQ ID NO: 6313 - DNA, 2190 bp, synthetic construct
  source 1..2190: mol_type = other DNA
atggccttaccagtgaccgccttgctcctgccgctggccttgctgctccacgccgccaggccggatattgtgctgactcagagccctgccactctgagccttagtccaggcgacagagctaccatctcctgtagggcctctgaatccgtgaccattctgggctctcatctcatatattggtatcaacaaaagccgggccagcctccacggctgctcattcaactggcctctaacgtgcagaccggcgtgccagctagattttctggctctggctcccggaccgactttacactgacaatcagctccgtggaacccgaagattttgccgtctattattgcctccagtccaggaccattcctcggacattcggccagggaacaaaactcgaaatcaagcggctcgagatccagaaccctgatcctgccgtgtaccagctgcgggatagcaagagcagcgacaagagcgtgtgtctgttcaccgacttcgacagccagaccaacgtgtcccagagcaaggactccgacgtgtacatcaccgataagtgcgtgctggacatgcggagcatggacttcaagagcaactccgccgtggcctggtccaacaagtccgatttcgcctgcgccaacgccttcaacaacagcattatccccgaggacacattcttcccaagccccgagagcagcgactccaccgaccacgtgaagcccaaagagacagagaacaccaagcagcccagcaagagctgccacaagcccaaggccatcgtgcacaccgagaaagtgaacatgatgagcctgaccgtgctgggcctgcggatgctgttcgccaaaaccgtggccgtgaacttcctgctgaccgccaagctgttcttcctcctcaccgcccgcgccaagagaagcggatctggcgtgaagcagaccctgaatttcgacctgctgaagctggctggcgacgtggaatccaacccaggccctactagtatggactggatttggcgcatccttttccttgtcggcgctgctaccggcgcgcattccttcgaacaggtgcagctcgttcagagtggccccgaagtgaaaaagccaggcgagtccgtgaagatttcctgcaaagcctccggctacacattccggcactactctatgaattgggtcaagcaggccccaggccagggccttaagtggatgggacgcatcaataccgagtccggcgtgccaatctacgccgatgacttcaaaggccggttcagcttcaccgtggatacctctgcctccaccgcctacctggaaatcagcagcctgaccagcgaggatacagctgtgtacttctgtagcaacgattacctctacagcctggatttctggggacagggaaccacactgaccgtgtctagcacgcgtgaggacctgaagaacgtgttcccacctgaggtggccgtgttcgagcctagcgaggccgagatcagccacacccagaaagccaccctcgtgtgcctggctaccggcttctaccccgaccatgtggaactgtcttggtgggtcaacggcaaagaggtgcacagcggcgtgtgtaccgacccccagccactgaaagaacagcccgccctgaacgacagccggtactgcctgagcagcagactgagagtgtccgccaccttctggcagaacccccggaaccacttcagatgccaggtgcagttctacggcctgagcgagaacgacgagtggacccaggacagagccaagcccgtgacccagatcgtgtctgccgaagcctggggcagagccgatgatgtgattaagatccactggcaggaaaagaagtccaacaccatcctgggcagccaggaaggcaacaccatgaagaccaacgacacctacatgaagttcagctggctgaccgtgcccgagaagtccctggacaaagaacacagatgcatcgtgcggcacgaaaacaacaagaacggcgtggaccaggaaatcatcttcccacccatcaagaccgatgtgattacaatggaccccaaggacaactgctccaaggacgccaacgataccctgctgctccagctgaccaacaccagcgcctactacatgtacttgttgctgctgctgaagtccgtggtgtacttcgccatcatcacatgctgcctgctgatggctatggtcaagcggaaggacagccgggga

SEQ ID NO: 6314 - DNA, 2190 bp, synthetic construct
  source 1..2190: mol_type = other DNA
atggccttaccagtgaccgccttgctcctgccgctggccttgctgctccacgccgccaggccggacatcgtgctgacacagtctcccgccacactgtcactgagccctggcgatagagccacactgagctgtagagccagcgagagcgtgacaatcctgggcagccacctgatctactggtatcagcagaagcccggacaggcccctagactgctgattcagctcgccagcaatgtgcagacaggcatccctgccagattttccggcagcggcagcagaaccgatttcaccctgaccataagcagcctggaacctgaggacttcgccgtgtactactgcctccagagccggacaatccccagaacctttggacagggcaccaagctggaaatcaagagactcgagatccagaaccctgatcctgccgtgtaccagctgcgggatagcaagagcagcgacaagagcgtgtgtctgttcaccgacttcgacagccagaccaacgtgtcccagagcaaggactccgacgtgtacatcaccgataagtgcgtgctggacatgcggagcatggacttcaagagcaactccgccgtggcctggtccaacaagtccgatttcgcctgcgccaacgccttcaacaacagcattatccccgaggacacattcttcccaagccccgagagcagcgactccaccgaccacgtgaagcccaaagagacagagaacaccaagcagcccagcaagagctgccacaagcccaaggccatcgtgcacaccgagaaagtgaacatgatgagcctgaccgtgctgggcctgcggatgctgttcgccaaaaccgtggccgtgaacttcctgctgaccgccaagctgttcttcctcctcaccgcccgcgccaagagaagcggatctggcgtgaagcagaccctgaatttcgacctgctgaagctggctggcgacgtggaatccaacccaggccctactagtatggactggatttggcgcatccttttccttgtcggcgctgctaccggcgcgcattccttcgaacaggttcagctggtgcagtctggcagcgagctgaagaaacctggcgagagcgtgaagatcagctgcaaggccagcggctacaccttcacacactacagcatgaactgggtccgacaggcccctggacaaggactggaatggatgggcagaatcaacaccgagacaggcgagcccctgtacgccgacgatttcaagggcagattcgtgttcagcctggacaccagcgccagcacagcctatctccagatcagctctctgaaggccgaggacaccgccgtgtactactgctccaacgactacctgtactccctggactattggggccagggcacactggtcacagtgtctagtacgcgtgaggacctgaagaacgtgttcccacctgaggtggccgtgttcgagcctagcgaggccgagatcagccacacccagaaagccaccctcgtgtgcctggctaccggcttctaccccgaccatgtggaactgtcttggtgggtcaacggcaaagaggtgcacagcggcgtgtgtaccgacccccagccactgaaagaacagcccgccctgaacgacagccggtactgcctgagcagcagactgagagtgtccgccaccttctggcagaacccccggaaccacttcagatgccaggtgcagttctacggcctgagcgagaacgacgagtggacccaggacagagccaagcccgtgacccagatcgtgtctgccgaagcctggggcagagccgatgatgtgattaagatccactggcaggaaaagaagtccaacaccatcctgggcagccaggaaggcaacaccatgaagaccaacgacacctacatgaagttcagctggctgaccgtgcccgagaagtccctggacaaagaacacagatgcatcgtgcggcacgaaaacaacaagaacggcgtggaccaggaaatcatcttcccacccatcaagaccgatgtgattacaatggaccccaaggacaactgctccaaggacgccaacgataccctgctgctccagctgaccaacaccagcgcctactacatgtacttgttgctgctgctgaagtccgtggtgtacttcgccatcatcacatgctgcctgctgatggctatggtcaagcggaaggacagccgggga

SEQ ID NO: 6315 - DNA, 2193 bp, synthetic construct
  source 1..2193: mol_type = other DNA
atggccttaccagtgaccgccttgctcctgccgctggccttgctgctccacgccgccaggccggacatccagctgactcagagccctagctttctgagcgccagcgtgggcgacagagtgaccattacatgtagagccagccagggcatcagcaccgacctgaactggtatcagcagaagcctggcaaggcccctaagctgctgatctacgccgccagcaatctggaaagcggcgtgccaagcagattttccggctctggcagcggcaccgagttcaccctgacaatatctagcctccagcctgaggacttcgccacctactactgccagcagagctacaactggccctacacctttggcggaggcaccaaggtggaaatcaagagactcgagatccagaaccctgatcctgccgtgtaccagctgcgggatagcaagagcagcgacaagagcgtgtgtctgttcaccgacttcgacagccagaccaacgtgtcccagagcaaggactccgacgtgtacatcaccgataagtgcgtgctggacatgcggagcatggacttcaagagcaactccgccgtggcctggtccaacaagtccgatttcgcctgcgccaacgccttcaacaacagcattatccccgaggacacattcttcccaagccccgagagcagcgactccaccgaccacgtgaagcccaaagagacagagaacaccaagcagcccagcaagagctgccacaagcccaaggccatcgtgcacaccgagaaagtgaacatgatgagcctgaccgtgctgggcctgcggatgctgttcgccaaaaccgtggccgtgaacttcctgctgaccgccaagctgttcttcctcctcaccgcccgcgccaagagaagcggatctggcgtgaagcagaccctgaatttcgacctgctgaagctggctggcgacgtggaatccaacccaggccctactagtatggactggatttggcgcatccttttccttgtcggcgctgctaccggcgcgcattccttcgaagaagttcagctggttgaatcaggcggaggactcgtgaaacctggcggctctctgagactgtcttgtgccgccagcggcttcaccttcagcaacttcgagatgaactgggtccgacaggccccaggcaaaggactggaatgggtgtccggcatcagctccaatggccggtacatcaactacgccgacagcgtgaagggcagattcaccatcagccgggacaacgccaagaacagcctgtacctccagatgaactccctgagagccgaggacaccgccgtgtactattgtgccagagtggtggacttcgaccaggactacaacggcttcgactattggggccagggcaccctggttaccgttagctctacgcgtgaggacctgaagaacgtgttcccacctgaggtggccgtgttcgagcctagcgaggccgagatcagccacacccagaaagccaccctcgtgtgcctggctaccggcttctaccccgaccatgtggaactgtcttggtgggtcaacggcaaagaggtgcacagcggcgtgtgtaccgacccccagccactgaaagaacagcccgccctgaacgacagccggtactgcctgagcagcagactgagagtgtccgccaccttctggcagaacccccggaaccacttcagatgccaggtgcagttctacggcctgagcgagaacgacgagtggacccaggacagagccaagcccgtgacccagatcgtgtctgccgaagcctggggcagagccgatgatgtgattaagatccactggcaggaaaagaagtccaacaccatcctgggcagccaggaaggcaacaccatgaagaccaacgacacctacatgaagttcagctggctgaccgtgcccgagaagtccctggacaaagaacacagatgcatcgtgcggcacgaaaacaacaagaacggcgtggaccaggaaatcatcttcccacccatcaagaccgatgtgattacaatggaccccaaggacaactgctccaaggacgccaacgataccctgctgctccagctgaccaacaccagcgcctactacatgtacttgttgctgctgctgaagtccgtggtgtacttcgccatcatcacatgctgcctgctgatggctatggtcaagcggaaggacagccgggga

SEQ ID NO: 6316 - DNA, 2187 bp, synthetic construct
  source 1..2187: mol_type = other DNA
atggccttaccagtgaccgccttgctcctgccgctggccttgctgctccacgccgccaggccggacatccaactgactcagagccccagctttctgagcgcctctgtgggcgacagagtgaccatcacatgtagtctcagcctgggcatcagcacatggcgggattggtttccgccgaggcttggcaggggccttgagccgctgacctacgccgccagcacactgcaaagcggagtgcctagcagattttccggcagcggctctggcaccgagttcaccctgacaatatccagcctccagcctgaggacttcgccacctactactgccagcagctcaacagctaccctctgacctttggcggaggcaccaaggtggaaatcaagagactcgagatccagaaccctgatcctgccgtgtaccagctgcgggatagcaagagcagcgacaagagcgtgtgtctgttcaccgacttcgacagccagaccaacgtgtcccagagcaaggactccgacgtgtacatcaccgataagtgcgtgctggacatgcggagcatggacttcaagagcaactccgccgtggcctggtccaacaagtccgatttcgcctgcgccaacgccttcaacaacagcattatccccgaggacacattcttcccaagccccgagagcagcgactccaccgaccacgtgaagcccaaagagacagagaacaccaagcagcccagcaagagctgccacaagcccaaggccatcgtgcacaccgagaaagtgaacatgatgagcctgaccgtgctgggcctgcggatgctgttcgccaaaaccgtggccgtgaacttcctgctgaccgccaagctgttcttcctcctcaccgcccgcgccaagagaagcggatctggcgtgaagcagaccctgaatttcgacctgctgaagctggctggcgacgtggaatccaacccaggccctactagtatggactggatttggcgcatccttttccttgtcggcgctgctaccggcgcgcattccttcgaagaagttcaactggttgagtctggtggcggcctggttaagcctggcggatctctgagactgagctgtgccgccagcggcttcacctttagcacatacggcatgagctgggtccgacaggcccctggaaaaggacttgagtgggtcgcctacatcaacaacggctccggctacatctactacgccgacagcgtgaagggcagattcaccatcagccgggacaacgccaagaacagcctgtacctccagatgaactccctgagagccgaggacaccgccgtgtactattgtgccagaggacagtggtggagcggcggagactttgattattggggccagggcaccctggtcaccgtttcttctacgcgtgaggacctgaagaacgtgttcccacctgaggtggccgtgttcgagcctagcgaggccgagatcagccacacccagaaagccaccctcgtgtgcctggctaccggcttctaccccgaccatgtggaactgtcttggtgggtcaacggcaaagaggtgcacagcggcgtgtgtaccgacccccagccactgaaagaacagcccgccctgaacgacagccggtactgcctgagcagcagactgagagtgtccgccaccttctggcagaacccccggaaccacttcagatgccaggtgcagttctacggcctgagcgagaacgacgagtggacccaggacagagccaagcccgtgacccagatcgtgtctgccgaagcctggggcagagccgatgatgtgattaagatccactggcaggaaaagaagtccaacaccatcctgggcagccaggaaggcaacaccatgaagaccaacgacacctacatgaagttcagctggctgaccgtgcccgagaagtccctggacaaagaacacagatgcatcgtgcggcacgaaaacaacaagaacggcgtggaccaggaaatcatcttcccacccatcaagaccgatgtgattacaatggaccccaaggacaactgctccaaggacgccaacgataccctgctgctccagctgaccaacaccagcgcctactacatgtacttgttgctgctgctgaagtccgtggtgtacttcgccatcatcacatgctgcctgctgatggctatggtcaagcggaaggacagccgggga

SEQ ID NO: 6317 - DNA, 2190 bp, synthetic construct
  source 1..2190: mol_type = other DNA
atggccttaccagtgaccgccttgctcctgccgctggccttgctgctccacgccgccaggccggagatcgtgctgacacagtctcccgccacactgtcactgtctccaggcgaaagagccacactgagctgtagcgccagcagcagcgtgtcctacatgtactggtatcagcagaagcccggacaggcccctagactgctgatctacagaaccagcaacctggcctctggcatccccgccagattttctggctctggcagcggcaccgatttcaccctgaccataagcagcctggaacctgaggacttcgccgtgtactactgccagcagtaccacagctaccccaccacctttggacagggcaccaaggtggaaatcaagcggacagttctcgagatccagaaccctgatcctgccgtgtaccagctgcgggatagcaagagcagcgacaagagcgtgtgtctgttcaccgacttcgacagccagaccaacgtgtcccagagcaaggactccgacgtgtacatcaccgataagtgcgtgctggacatgcggagcatggacttcaagagcaactccgccgtggcctggtccaacaagtccgatttcgcctgcgccaacgccttcaacaacagcattatccccgaggacacattcttcccaagccccgagagcagcgactccaccgaccacgtgaagcccaaagagacagagaacaccaagcagcccagcaagagctgccacaagcccaaggccatcgtgcacaccgagaaagtgaacatgatgagcctgaccgtgctgggcctgcggatgctgttcgccaaaaccgtggccgtgaacttcctgctgaccgccaagctgttcttcctcctcaccgcccgcgccaagagaagcggatctggcgtgaagcagaccctgaatttcgacctgctgaagctggctggcgacgtggaatccaacccaggccctactagtatggactggatttggcgcatccttttccttgtcggcgctgctaccggcgcgcattccttcgaagaagtgcagctggttgaatcaggtggcggcctggttcaacctggcggatctctgagactgtcttgtgccgccagcggcttcagcttcaacacctacgccatgaactgggtccgacaggctcctggcaaaggactggaatgggtgtcccacatcagaagcaagagcaacaacttcgccacctactacgccgacagcgtgaaggacagattcaccatcagccgggacaacgccaagaacagcctgtacctccagatgaactccctgagagccgaggacaccgccgtgtattattgcgccagacaaggcggcgacttccctatggattattggggccagggcaccctggtcaccgtttcttctacgcgtgaggacctgaagaacgtgttcccacctgaggtggccgtgttcgagcctagcgaggccgagatcagccacacccagaaagccaccctcgtgtgcctggctaccggcttctaccccgaccatgtggaactgtcttggtgggtcaacggcaaagaggtgcacagcggcgtgtgtaccgacccccagccactgaaagaacagcccgccctgaacgacagccggtactgcctgagcagcagactgagagtgtccgccaccttctggcagaacccccggaaccacttcagatgccaggtgcagttctacggcctgagcgagaacgacgagtggacccaggacagagccaagcccgtgacccagatcgtgtctgccgaagcctggggcagagccgatgatgtgattaagatccactggcaggaaaagaagtccaacaccatcctgggcagccaggaaggcaacaccatgaagaccaacgacacctacatgaagttcagctggctgaccgtgcccgagaagtccctggacaaagaacacagatgcatcgtgcggcacgaaaacaacaagaacggcgtggaccaggaaatcatcttcccacccatcaagaccgatgtgattacaatggaccccaaggacaactgctccaaggacgccaacgataccctgctgctccagctgaccaacaccagcgcctactacatgtacttgttgctgctgctgaagtccgtggtgtacttcgccatcatcacatgctgcctgctgatggctatggtcaagcggaaggacagccgggga

SEQ ID NO: 6318 - DNA, 2178 bp, synthetic construct
  source 1..2178: mol_type = other DNA
atggccttaccagtgaccgccttgctcctgccgctggccttgctgctccacgccgccaggccggacgtggtcatgacacagagcccttctagcctgtctgccagcgtgggcgacagagtgaccatcacctgtaaagccagcgaggacatctacatccggctggcctggtatcagcagaagcctggaaaggcccctaagctgctgatctacgccgccacctctctggaaacaggcgtgccaagcagattttccggcagcggctctggcaccgatttcaccctgacaatatccagcctccagcctgaggacttcgccacctactactgccagcagtattggaccacaccttggacctttggcggaggcaccaaggtggaaatcaaactcgagatccagaaccctgatcctgccgtgtaccagctgcgggatagcaagagcagcgacaagagcgtgtgtctgttcaccgacttcgacagccagaccaacgtgtcccagagcaaggactccgacgtgtacatcaccgataagtgcgtgctggacatgcggagcatggacttcaagagcaactccgccgtggcctggtccaacaagtccgatttcgcctgcgccaacgccttcaacaacagcattatccccgaggacacattcttcccaagccccgagagcagcgactccaccgaccacgtgaagcccaaagagacagagaacaccaagcagcccagcaagagctgccacaagcccaaggccatcgtgcacaccgagaaagtgaacatgatgagcctgaccgtgctgggcctgcggatgctgttcgccaaaaccgtggccgtgaacttcctgctgaccgccaagctgttcttcctcctcaccgcccgcgccaagagaagcggatctggcgtgaagcagaccctgaatttcgacctgctgaagctggctggcgacgtggaatccaacccaggccctactagtatggactggatttggcgcatccttttccttgtcggcgctgctaccggcgcgcattccttcgaacaggtgcagctccaagagtctggccctggactggtcaagcctagccagacactgagcctgacctgtaccgtgtccggctacagcatcaccatcgactacacctggaactggatcagacagcctcctggcaaaggactggaatggatcggctacatcacctacagcggcagcaccgactacaaccccagcctgaaaagccgggtgctgatctccgtggacaccagcaagaatcaggtgtccctgaagctgagcagcgtgacagccgctgataccgccgtgtactactgtgccagactgggcagaagatacgccctggattattggggccagggcaccaccgtgacagtgtcatctacgcgtgaggacctgaagaacgtgttcccacctgaggtggccgtgttcgagcctagcgaggccgagatcagccacacccagaaagccaccctcgtgtgcctggctaccggcttctaccccgaccatgtggaactgtcttggtgggtcaacggcaaagaggtgcacagcggcgtgtgtaccgacccccagccactgaaagaacagcccgccctgaacgacagccggtactgcctgagcagcagactgagagtgtccgccaccttctggcagaacccccggaaccacttcagatgccaggtgcagttctacggcctgagcgagaacgacgagtggacccaggacagagccaagcccgtgacccagatcgtgtctgccgaagcctggggcagagccgatgatgtgattaagatccactggcaggaaaagaagtccaacaccatcctgggcagccaggaaggcaacaccatgaagaccaacgacacctacatgaagttcagctggctgaccgtgcccgagaagtccctggacaaagaacacagatgcatcgtgcggcacgaaaacaacaagaacggcgtggaccaggaaatcatcttcccacccatcaagaccgatgtgattacaatggaccccaaggacaactgctccaaggacgccaacgataccctgctgctccagctgaccaacaccagcgcctactacatgtacttgttgctgctgctgaagtccgtggtgtacttcgccatcatcacatgctgcctgctgatggctatggtcaagcggaaggacagccgggga

SEQ ID NO: 6319 - DNA, 2190 bp, synthetic construct
  source 1..2190: mol_type = other DNA
atggccttaccagtgaccgccttgctcctgccgctggccttgctgctccacgccgccaggccggacatccagatgacccagaccacaagcagcctgtctgccagcctgggcgacagagtgaccatctcttgtagagccagccaggacatcagcaactacctgaactggtatcagcagaaacccgacggcaccgtgaagctgctgatctactacaccagcatcctgcacagcggcgtgcccagcagattttctggctctggcagcggcaccgactacagcctgaccatcagcaatctggaacaagaggacttcgctacctacttctgccagcaaggcaacaccctgccttggacatttggcggaggcaccaagctggaaatcaaagctctcgagatccagaaccctgatcctgccgtgtaccagctgcgggatagcaagagcagcgacaagagcgtgtgtctgttcaccgacttcgacagccagaccaacgtgtcccagagcaaggactccgacgtgtacatcaccgataagtgcgtgctggacatgcggagcatggacttcaagagcaactccgccgtggcctggtccaacaagtccgatttcgcctgcgccaacgccttcaacaacagcattatccccgaggacacattcttcccaagccccgagagcagcgactccaccgaccacgtgaagcccaaagagacagagaacaccaagcagcccagcaagagctgccacaagcccaaggccatcgtgcacaccgagaaagtgaacatgatgagcctgaccgtgctgggcctgcggatgctgttcgccaaaaccgtggccgtgaacttcctgctgaccgccaagctgttcttcctcctcaccgcccgcgccaagagaagcggatctggcgtgaagcagaccctgaatttcgacctgctgaagctggctggcgacgtggaatccaacccaggccctactagtatggactggatttggcgcatccttttccttgtcggcgctgctaccggcgcgcattccttcgaagtgcaactggttgaatctggcggcggactggttaagcctggcggatctctgaagctgagctgtgccgcctctggcttcgccttcagcatctacgatatgagctgggtccgacagacccctgagaagagactggaatgggtcgcctacatctctagcggcggagggacctactatcccgacacagtgaagggcagattcaccatctccagagacaacgccaagaacaccctgtacctccagatgagcagcctgaagtccgaggacaccgccatgtactactgcgccagacacagcggctatggcacacattggggagtgctgtttgcctactggggccagggaacactggtcacagtttctgctacgcgtgaggacctgaagaacgtgttcccacctgaggtggccgtgttcgagcctagcgaggccgagatcagccacacccagaaagccaccctcgtgtgcctggctaccggcttctaccccgaccatgtggaactgtcttggtgggtcaacggcaaagaggtgcacagcggcgtgtgtaccgacccccagccactgaaagaacagcccgccctgaacgacagccggtactgcctgagcagcagactgagagtgtccgccaccttctggcagaacccccggaaccacttcagatgccaggtgcagttctacggcctgagcgagaacgacgagtggacccaggacagagccaagcccgtgacccagatcgtgtctgccgaagcctggggcagagccgatgatgtgattaagatccactggcaggaaaagaagtccaacaccatcctgggcagccaggaaggcaacaccatgaagaccaacgacacctacatgaagttcagctggctgaccgtgcccgagaagtccctggacaaagaacacagatgcatcgtgcggcacgaaaacaacaagaacggcgtggaccaggaaatcatcttcccacccatcaagaccgatgtgattacaatggaccccaaggacaactgctccaaggacgccaacgataccctgctgctccagctgaccaacaccagcgcctactacatgtacttgttgctgctgctgaagtccgtggtgtacttcgccatcatcacatgctgcctgctgatggctatggtcaagcggaaggacagccgggga

SEQ ID NO: 6320 - DNA, 2223 bp, synthetic construct
  source 1..2223: mol_type = other DNA
atggccttaccagtgaccgccttgctcctgccgctggccttgctgctccacgccgccaggccggacatcgtgatgacacagagccctgatagcctggccgtgtctctgggagagagagccaccatcaactgcaagagcagccagagcctgctgtacagaagcaaccagaagaactacctggcctggtatcagcagaagcccggccagcctcctaagctgctgatctactgggccagcaccagagaaagcggcgtgcccgatagattttctggctctggcagcggcaccgacttcaccctgacaatttctagcctgcaagccgaggacgtggccgtgtactactgccagcagtattacaactaccccagaaccttcggccagggcaccaaggtggaaatcaagagaacagttctcgagatccagaaccctgatcctgccgtgtaccagctgcgggatagcaagagcagcgacaagagcgtgtgtctgttcaccgacttcgacagccagaccaacgtgtcccagagcaaggactccgacgtgtacatcaccgataagtgcgtgctggacatgcggagcatggacttcaagagcaactccgccgtggcctggtccaacaagtccgatttcgcctgcgccaacgccttcaacaacagcattatccccgaggacacattcttcccaagccccgagagcagcgactccaccgaccacgtgaagcccaaagagacagagaacaccaagcagcccagcaagagctgccacaagcccaaggccatcgtgcacaccgagaaagtgaacatgatgagcctgaccgtgctgggcctgcggatgctgttcgccaaaaccgtggccgtgaacttcctgctgaccgccaagctgttcttcctcctcaccgcccgcgccaagagaagcggatctggcgtgaagcagaccctgaatttcgacctgctgaagctggctggcgacgtggaatccaacccaggccctactagtatggactggatttggcgcatccttttccttgtcggcgctgctaccggcgcgcattccttcgaagaagttcagctgcttgaatcaggcggcggactggttcaacctggcggatctctgagactgagctgtgccgccagcggctacagcatcacaagcgactatgcctggaactgggtccgacaggcccctggcaaaggactggaatgggtgtcctacatcagcaacagcggcagcaccagctacaaccccagcctgaagtcccggttcaccatcagcagagacaacagcaagaacaccctgtacctccagatgaacagcctgagagctgaggacaccgccgtgtattattgcgccaaagagcggaactacgactacgacgattactactacgctatggactactggggccagggaaccctggtcacagtctcttctacgcgtgaggacctgaagaacgtgttcccacctgaggtggccgtgttcgagcctagcgaggccgagatcagccacacccagaaagccaccctcgtgtgcctggctaccggcttctaccccgaccatgtggaactgtcttggtgggtcaacggcaaagaggtgcacagcggcgtgtgtaccgacccccagccactgaaagaacagcccgccctgaacgacagccggtactgcctgagcagcagactgagagtgtccgccaccttctggcagaacccccggaaccacttcagatgccaggtgcagttctacggcctgagcgagaacgacgagtggacccaggacagagccaagcccgtgacccagatcgtgtctgccgaagcctggggcagagccgatgatgtgattaagatccactggcaggaaaagaagtccaacaccatcctgggcagccaggaaggcaacaccatgaagaccaacgacacctacatgaagttcagctggctgaccgtgcccgagaagtccctggacaaagaacacagatgcatcgtgcggcacgaaaacaacaagaacggcgtggaccaggaaatcatcttcccacccatcaagaccgatgtgattacaatggaccccaaggacaactgctccaaggacgccaacgataccctgctgctccagctgaccaacaccagcgcctactacatgtacttgttgctgctgctgaagtccgtggtgtacttcgccatcatcacatgctgcctgctgatggctatggtcaagcggaaggacagccgggga

SEQ ID NO: 6321 - DNA, 2202 bp, synthetic construct
  source 1..2202: mol_type = other DNA
atggccttaccagtgaccgccttgctcctgccgctggccttgctgctccacgccgccaggccggacgtggtcatgacacagagccctctgagcctgcctgtgacacttggacagcctgccagcatcagctgtagaagcagccagagcctgctgcacagcagcggcaatacctacctggaatggtatcagcagaggcccggacagagccccagacctctgatctacaagatcagcacccggttcagcggcgtgcccgatagattttctggctctggcagcggcaccgacttcaccctgaagattagcagagtggaagccgaggacgtgggcgtgtactactgcttccaaggcagccacgtgccatacacctttggcggcggaacaaaggtggaaatcaagagactcgagatccagaaccctgatcctgccgtgtaccagctgcgggatagcaagagcagcgacaagagcgtgtgtctgttcaccgacttcgacagccagaccaacgtgtcccagagcaaggactccgacgtgtacatcaccgataagtgcgtgctggacatgcggagcatggacttcaagagcaactccgccgtggcctggtccaacaagtccgatttcgcctgcgccaacgccttcaacaacagcattatccccgaggacacattcttcccaagccccgagagcagcgactccaccgaccacgtgaagcccaaagagacagagaacaccaagcagcccagcaagagctgccacaagcccaaggccatcgtgcacaccgagaaagtgaacatgatgagcctgaccgtgctgggcctgcggatgctgttcgccaaaaccgtggccgtgaacttcctgctgaccgccaagctgttcttcctcctcaccgcccgcgccaagagaagcggatctggcgtgaagcagaccctgaatttcgacctgctgaagctggctggcgacgtggaatccaacccaggccctactagtatggactggatttggcgcatccttttccttgtcggcgctgctaccggcgcgcattccttcgaacaagttcagctggttcagagcggagccgaagtgaagaaacctggggcctctgtgaaggtgtcctgcaaagcctctggcctgaccatcgaggactactacatgcactgggtccgacaggcccctggacaaggacttgaatggatgggctggatcgaccccgagaacggcgatacagagtacggccctaagttccagggcagagtgaccatgaccagagacaccagcatcaacaccgcctacatggaactgagccggctgagatccgatgacaccgccgtgtactattgcgccgtgcacaatgcccactacggcacttggtttgcctattggggccagggcacactggtcaccgttagctctacgcgtgaggacctgaagaacgtgttcccacctgaggtggccgtgttcgagcctagcgaggccgagatcagccacacccagaaagccaccctcgtgtgcctggctaccggcttctaccccgaccatgtggaactgtcttggtgggtcaacggcaaagaggtgcacagcggcgtgtgtaccgacccccagccactgaaagaacagcccgccctgaacgacagccggtactgcctgagcagcagactgagagtgtccgccaccttctggcagaacccccggaaccacttcagatgccaggtgcagttctacggcctgagcgagaacgacgagtggacccaggacagagccaagcccgtgacccagatcgtgtctgccgaagcctggggcagagccgatgatgtgattaagatccactggcaggaaaagaagtccaacaccatcctgggcagccaggaaggcaacaccatgaagaccaacgacacctacatgaagttcagctggctgaccgtgcccgagaagtccctggacaaagaacacagatgcatcgtgcggcacgaaaacaacaagaacggcgtggaccaggaaatcatcttcccacccatcaagaccgatgtgattacaatggaccccaaggacaactgctccaaggacgccaacgataccctgctgctccagctgaccaacaccagcgcctactacatgtacttgttgctgctgctgaagtccgtggtgtacttcgccatcatcacatgctgcctgctgatggctatggtcaagcggaaggacagccgggga

SEQ ID NO: 6322 - DNA, 2178 bp, synthetic construct
  source 1..2178: mol_type = other DNA
atggccttaccagtgaccgccttgctcctgccgctggccttgctgctccacgccgccaggccggacatccagatgacacagagccctagcagcctgtctgccagcgtgggagacagagtgaccatcacctgtagagccagcgagaacatctacagcaacctggcctggtatcagcagaagcctggcaaggcccctaagctgctgatctacgccgccaccaatctggctgatggcgtgccaagcagattttccggctctggcagcggcaccgatttcaccctgacaatatccagcctccagcctgaggacttcgccacctactactgccagcacttttggggcacccctacattcggccagggcaccaaggtggaaatcaagagaacagttctcgagatccagaaccctgatcctgccgtgtaccagctgcgggatagcaagagcagcgacaagagcgtgtgtctgttcaccgacttcgacagccagaccaacgtgtcccagagcaaggactccgacgtgtacatcaccgataagtgcgtgctggacatgcggagcatggacttcaagagcaactccgccgtggcctggtccaacaagtccgatttcgcctgcgccaacgccttcaacaacagcattatccccgaggacacattcttcccaagccccgagagcagcgactccaccgaccacgtgaagcccaaagagacagagaacaccaagcagcccagcaagagctgccacaagcccaaggccatcgtgcacaccgagaaagtgaacatgatgagcctgaccgtgctgggcctgcggatgctgttcgccaaaaccgtggccgtgaacttcctgctgaccgccaagctgttcttcctcctcaccgcccgcgccaagagaagcggatctggcgtgaagcagaccctgaatttcgacctgctgaagctggctggcgacgtggaatccaacccaggccctactagtatggactggatttggcgcatccttttccttgtcggcgctgctaccggcgcgcattccttcgaagaagtgcagctggttgaatcaggtggcggcctggttcaacctggcggatctctgagactgagctgtgccgcctctggcttcagcctgacaaattacggcgtgcactgggtccgacaggcccctggaaaaggactggaatgggtgtccgtgatttggagcggcggcagcaccgattacaacgccgccttcatcagccggttcaccatcagcgccgacaccagcaagaataccgcctacctccagatgaactccctgagagccgaggacaccgccgtgtactattgcgccagagaactgatccacgctatggacaactggggccagggaaccctggtcacagtctcttctacgcgtgaggacctgaagaacgtgttcccacctgaggtggccgtgttcgagcctagcgaggccgagatcagccacacccagaaagccaccctcgtgtgcctggctaccggcttctaccccgaccatgtggaactgtcttggtgggtcaacggcaaagaggtgcacagcggcgtgtgtaccgacccccagccactgaaagaacagcccgccctgaacgacagccggtactgcctgagcagcagactgagagtgtccgccaccttctggcagaacccccggaaccacttcagatgccaggtgcagttctacggcctgagcgagaacgacgagtggacccaggacagagccaagcccgtgacccagatcgtgtctgccgaagcctggggcagagccgatgatgtgattaagatccactggcaggaaaagaagtccaacaccatcctgggcagccaggaaggcaacaccatgaagaccaacgacacctacatgaagttcagctggctgaccgtgcccgagaagtccctggacaaagaacacagatgcatcgtgcggcacgaaaacaacaagaacggcgtggaccaggaaatcatcttcccacccatcaagaccgatgtgattacaatggaccccaaggacaactgctccaaggacgccaacgataccctgctgctccagctgaccaacaccagcgcctactacatgtacttgttgctgctgctgaagtccgtggtgtacttcgccatcatcacatgctgcctgctgatggctatggtcaagcggaaggacagccgggga

SEQ ID NO: 6323 - DNA, 2199 bp, synthetic construct
  source 1..2199: mol_type = other DNA
atggccttaccagtgaccgccttgctcctgccgctggccttgctgctccacgccgccaggccggacttcgtgatgacacagagccctctgagcctgcctgtgacacctggcgaacctgccagcatcagctgtagaagcagccagagcatcgtgcacagcaacggcaacacctacctggaatggtatctccagaagcctggacagagcccacagctgctgatctacaaggtgtccaacagattcagcggcgtgcccgacagattttctggcagcggctctggcaccgacttcaccctgaagattagcagagtggaagccgaggacgtgggcgtgtactactgcttccaaggctctcacgtgcccctgacctttggacagggcaccaagctggaaatcaagagactcgagatccagaaccctgatcctgccgtgtaccagctgcgggatagcaagagcagcgacaagagcgtgtgtctgttcaccgacttcgacagccagaccaacgtgtcccagagcaaggactccgacgtgtacatcaccgataagtgcgtgctggacatgcggagcatggacttcaagagcaactccgccgtggcctggtccaacaagtccgatttcgcctgcgccaacgccttcaacaacagcattatccccgaggacacattcttcccaagccccgagagcagcgactccaccgaccacgtgaagcccaaagagacagagaacaccaagcagcccagcaagagctgccacaagcccaaggccatcgtgcacaccgagaaagtgaacatgatgagcctgaccgtgctgggcctgcggatgctgttcgccaaaaccgtggccgtgaacttcctgctgaccgccaagctgttcttcctcctcaccgcccgcgccaagagaagcggatctggcgtgaagcagaccctgaatttcgacctgctgaagctggctggcgacgtggaatccaacccaggccctactagtatggactggatttggcgcatccttttccttgtcggcgctgctaccggcgcgcattccttcgaagaagtgcagctggttgaaagcggagccgaagtgaagaaacctggggcctctgtgaaggtgtcctgcaaggccagcggctacacctttaccagctactggattcactgggtccgacaggcccctggacaaggacttgagtggatgggcgagaacgacccctccaacggcaggaccaactacaacgagaagttcaagaaccgcgtgaccctgaccgtggacaccagcatctctaccgcctacatggaactgagccggctgagatccgatgacaccgccgtgtactattgcgccagaggacccaactacttttacagcatggactactggggccagggcacaatggtcaccgttagctctacgcgtgaggacctgaagaacgtgttcccacctgaggtggccgtgttcgagcctagcgaggccgagatcagccacacccagaaagccaccctcgtgtgcctggctaccggcttctaccccgaccatgtggaactgtcttggtgggtcaacggcaaagaggtgcacagcggcgtgtgtaccgacccccagccactgaaagaacagcccgccctgaacgacagccggtactgcctgagcagcagactgagagtgtccgccaccttctggcagaacccccggaaccacttcagatgccaggtgcagttctacggcctgagcgagaacgacgagtggacccaggacagagccaagcccgtgacccagatcgtgtctgccgaagcctggggcagagccgatgatgtgattaagatccactggcaggaaaagaagtccaacaccatcctgggcagccaggaaggcaacaccatgaagaccaacgacacctacatgaagttcagctggctgaccgtgcccgagaagtccctggacaaagaacacagatgcatcgtgcggcacgaaaacaacaagaacggcgtggaccaggaaatcatcttcccacccatcaagaccgatgtgattacaatggaccccaaggacaactgctccaaggacgccaacgataccctgctgctccagctgaccaacaccagcgcctactacatgtacttgttgctgctgctgaagtccgtggtgtacttcgccatcatcacatgctgcctgctgatggctatggtcaagcggaaggacagccgggga

SEQ ID NO: 6324 - DNA, 2178 bp, synthetic construct
  source 1..2178: mol_type = other DNA
atggccttaccagtgaccgccttgctcctgccgctggccttgctgctccacgccgccaggccggacatccagctgactcagagccctagctttctgagcgccagcgtgggcgacagagtgaccatcacatgtagcgccagatccagcatcagcttcatgtactggtatcagcagaagcccggcaaggcccctaagctgctgatctacgacaccagcaatctggcctctggcgtgcccagcagattttctggaagcggcagcggcaccgagttcaccctgacaatctctagcctggaagccgaggatgccgccacctactattgccagcagtggtccagctatcccctgacatttggacagggcaccaagctggaaatcaaactcgagatccagaaccctgatcctgccgtgtaccagctgcgggatagcaagagcagcgacaagagcgtgtgtctgttcaccgacttcgacagccagaccaacgtgtcccagagcaaggactccgacgtgtacatcaccgataagtgcgtgctggacatgcggagcatggacttcaagagcaactccgccgtggcctggtccaacaagtccgatttcgcctgcgccaacgccttcaacaacagcattatccccgaggacacattcttcccaagccccgagagcagcgactccaccgaccacgtgaagcccaaagagacagagaacaccaagcagcccagcaagagctgccacaagcccaaggccatcgtgcacaccgagaaagtgaacatgatgagcctgaccgtgctgggcctgcggatgctgttcgccaaaaccgtggccgtgaacttcctgctgaccgccaagctgttcttcctcctcaccgcccgcgccaagagaagcggatctggcgtgaagcagaccctgaatttcgacctgctgaagctggctggcgacgtggaatccaacccaggccctactagtatggactggatttggcgcatccttttccttgtcggcgctgctaccggcgcgcattccttcgaacaggttcagctggttcagtctggggccgaagtgaagaaacctggggcctctgtgaaggtgtcctgcaaggcttccggctacacctttaccggctcttggatgaactgggtccgacaggctcctggacagggactcgaatggatcggcagaatctatcctggcgacggcgagacaaactacaacggcaagttcaaggaccgcgtgacaatcaccgccgacaagagcacaagcaccgcctacatggaactgagcagcctgcggagcgaagataccgccgtgtactactgcgcccggatctacggcaacaacgtgtacttcgatgtgtggggccagggcacaaccgtgacagtctcttctacgcgtgaggacctgaagaacgtgttcccacctgaggtggccgtgttcgagcctagcgaggccgagatcagccacacccagaaagccaccctcgtgtgcctggctaccggcttctaccccgaccatgtggaactgtcttggtgggtcaacggcaaagaggtgcacagcggcgtgtgtaccgacccccagccactgaaagaacagcccgccctgaacgacagccggtactgcctgagcagcagactgagagtgtccgccaccttctggcagaacccccggaaccacttcagatgccaggtgcagttctacggcctgagcgagaacgacgagtggacccaggacagagccaagcccgtgacccagatcgtgtctgccgaagcctggggcagagccgatgatgtgattaagatccactggcaggaaaagaagtccaacaccatcctgggcagccaggaaggcaacaccatgaagaccaacgacacctacatgaagttcagctggctgaccgtgcccgagaagtccctggacaaagaacacagatgcatcgtgcggcacgaaaacaacaagaacggcgtggaccaggaaatcatcttcccacccatcaagaccgatgtgattacaatggaccccaaggacaactgctccaaggacgccaacgataccctgctgctccagctgaccaacaccagcgcctactacatgtacttgttgctgctgctgaagtccgtggtgtacttcgccatcatcacatgctgcctgctgatggctatggtcaagcggaaggacagccgggga

SEQ ID NO: 6325 - DNA, 2202 bp, synthetic construct
  source 1..2202: mol_type = other DNA
atggccttaccagtgaccgccttgctcctgccgctggccttgctgctccacgccgccaggccgcagctggtgctgacacagtctccaagcgcctctgccagcctgggatctagcgtgaagctgacctgtacactgagcagcggccacaagaccgacaccatcgactggtatcagcagcagcctggcaaggcccctagatacctgatgaagctggaaggcagcggcagctacaacaaaggctctggcgtgcccgatagattcagcggcagttcttctggcgctgattggtatctgaccatcagcagcctccagagcgaggacgaggccgattactactgcggcacagactaccccggcaactacctgtttggcggcggaacacagctgacagtgcttggcctcgagatccagaaccctgatcctgccgtgtaccagctgcgggatagcaagagcagcgacaagagcgtgtgtctgttcaccgacttcgacagccagaccaacgtgtcccagagcaaggactccgacgtgtacatcaccgataagtgcgtgctggacatgcggagcatggacttcaagagcaactccgccgtggcctggtccaacaagtccgatttcgcctgcgccaacgccttcaacaacagcattatccccgaggacacattcttcccaagccccgagagcagcgactccaccgaccacgtgaagcccaaagagacagagaacaccaagcagcccagcaagagctgccacaagcccaaggccatcgtgcacaccgagaaagtgaacatgatgagcctgaccgtgctgggcctgcggatgctgttcgccaaaaccgtggccgtgaacttcctgctgaccgccaagctgttcttcctcctcaccgcccgcgccaagagaagcggatctggcgtgaagcagaccctgaatttcgacctgctgaagctggctggcgacgtggaatccaacccaggccctactagtatggactggatttggcgcatccttttccttgtcggcgctgctaccggcgcgcattccttcgaacaagaacagctggttgaaagcggcggaggactggttcaacctggcggttctctgagactgagctgtgccgccagcggcttcaccttcagcgactactacatgagctggatcagacaggccccaggcaaaggactggaatgggtcgccacaatctaccccagcagcggcaagacctactacgccgattctgccaagggcagactgaccatctccagcgacaacgccaaggacagcctgtacctccagatgaacagcctgagagccgaggacaccgccgtgtactactgcaccagagatagctacgccgacgacgccgctctgtttgacatttggggccagggcaccaccgtgaccgtttcttctacgcgtgaggacctgaagaacgtgttcccacctgaggtggccgtgttcgagcctagcgaggccgagatcagccacacccagaaagccaccctcgtgtgcctggctaccggcttctaccccgaccatgtggaactgtcttggtgggtcaacggcaaagaggtgcacagcggcgtgtgtaccgacccccagccactgaaagaacagcccgccctgaacgacagccggtactgcctgagcagcagactgagagtgtccgccaccttctggcagaacccccggaaccacttcagatgccaggtgcagttctacggcctgagcgagaacgacgagtggacccaggacagagccaagcccgtgacccagatcgtgtctgccgaagcctggggcagagccgatgatgtgattaagatccactggcaggaaaagaagtccaacaccatcctgggcagccaggaaggcaacaccatgaagaccaacgacacctacatgaagttcagctggctgaccgtgcccgagaagtccctggacaaagaacacagatgcatcgtgcggcacgaaaacaacaagaacggcgtggaccaggaaatcatcttcccacccatcaagaccgatgtgattacaatggaccccaaggacaactgctccaaggacgccaacgataccctgctgctccagctgaccaacaccagcgcctactacatgtacttgttgctgctgctgaagtccgtggtgtacttcgccatcatcacatgctgcctgctgatggctatggtcaagcggaaggacagccgggga

SEQ ID NO: 6326 - DNA, 2178 bp, synthetic construct; identical to SEQ ID NO: 6322
  source 1..2178: mol_type = other DNA

SEQ ID NO: 6327 - DNA, 2199 bp, synthetic construct; identical to SEQ ID NO: 6323
  source 1..2199: mol_type = other DNA

SEQ ID NO: 6328 - DNA, 2178 bp, synthetic construct; identical to SEQ ID NO: 6324
  source 1..2178: mol_type = other DNA

SEQ ID NO: 6329 - DNA, 2202 bp, synthetic construct; identical to SEQ ID NO: 6325
  source 1..2202: mol_type = other DNA

SEQ ID NO: 6330 - DNA, 2199 bp, synthetic construct
  source 1..2199: mol_type = other DNA
atggccttaccagtgaccgccttgctcctgccgctggccttgctgctccacgccgccaggccggatatccagctcactcaaagcccctctagtctctctgcctcagtgggggatcgggtcagttttacttgtcaagcttcacaggatatcaacaacttccttaattggtatcagcagaagccaggaaaagcacccaagctgctcatctatgatgcctcaaatttggagacgggtgttcccagtcgattctctgggtcagggtccgggaccgactttacgtttacgatctcctctctgcagcccgaagacatcgccacatactattgtcaacagtacggcaacttgcctttcacatttgggggcgggactaaggttgaaatcaagaggctcgagatccagaaccctgatcctgccgtgtaccagctgcgggatagcaagagcagcgacaagagcgtgtgtctgttcaccgacttcgacagccagaccaacgtgtcccagagcaaggactccgacgtgtacatcaccgataagtgcgtgctggacatgcggagcatggacttcaagagcaactccgccgtggcctggtccaacaagtccgatttcgcctgcgccaacgccttcaacaacagcattatccccgaggacacattcttcccaagccccgagagcagcgactccaccgaccacgtgaagcccaaagagacagagaacaccaagcagcccagcaagagctgccacaagcccaaggccatcgtgcacaccgagaaagtgaacatgatgagcctgaccgtgctgggcctgcggatgctgttcgccaaaaccgtggccgtgaacttcctgctgaccgccaagctgttcttcctcctcaccgcccgcgccaagagaagcggatctggcgtgaagcagaccctgaatttcgacctgctgaagctggctggcgacgtggaatccaacccaggccctactagtatggactggatttggcgcatccttttccttgtcggcgctgctaccggcgcgcattccttcgaacaggtacagctgcaggaatctgggcccggacttgtcaagccaagtcagacactttctcttacatgtaccgtgagcggcggaagtataagcagtggaggcttttactggtcttggatacggcagcacccaggcaaaggcttggagtggattggatacattcatcattcaggatctacacactataatccatcccttaagtcccgggtcaccattagcattgatacgtctaagaatctgttcagtctcaggctgtcctccgtcactgctgccgacacagccgtgtactactgcgcctccttggtttactgcggaggcgactgttatagcggctttgattattgggggcaggggaccctcgtaaccgtgagctctacgcgtgaggacctgaagaacgtgttcccacctgaggtggccgtgttcgagcctagcgaggccgagatcagccacacccagaaagccaccctcgtgtgcctggctaccggcttctaccccgaccatgtggaactgtcttggtgggtcaacggcaaagaggtgcacagcggcgtgtgtaccgacccccagccactgaaagaacagcccgccctgaacgacagccggtactgcctgagcagcagactgagagtgtccgccaccttctggcagaacccccggaaccacttcagatgccaggtgcagttctacggcctgagcgagaacgacgagtggacccaggacagagccaagcccgtgacccagatcgtgtctgccgaagcctggggcagagccgatgatgtgattaagatccactggcaggaaaagaagtccaacaccatcctgggcagccaggaaggcaacaccatgaagaccaacgacacctacatgaagttcagctggctgaccgtgcccgagaagtccctggacaaagaacacagatgcatcgtgcggcacgaaaacaacaagaacggcgtggaccaggaaatcatcttcccacccatcaagaccgatgtgattacaatggaccccaaggacaactgctccaaggacgccaacgataccctgctgctccagctgaccaacaccagcgcctactacatgtacttgttgctgctgctgaagtccgtggtgtacttcgccatcatcacatgctgcctgctgatggctatggtcaagcggaaggacagccgggga

SEQ ID NO: 6331 - DNA, 2187 bp, synthetic construct
  source 1..2187: mol_type = other DNA
atggccttaccagtgaccgccttgctcctgccgctggccttgctgctccacgccgccaggccggacattcagatgacacagagccctagcagcctgagcgcctctgtgggagacagagtgaccatcacatgcaagagcagccagagcgtgctgtactccagcaatcagaagaactacctggcctggttccagcagaagcctggcaaggctcctaagctgctgatctactgggccagcaccagagaaagcggcgtgccaagcagattttctggcagcggctctggcaccgacttcaccctgacaatatccagcctccagcctgaggacttcgccacctacttttgccaccagtacctgagcagctacacattcggacagggcaccaaggtggaaatcaagcggctcgagatccagaaccctgatcctgccgtgtaccagctgcgggatagcaagagcagcgacaagagcgtgtgtctgttcaccgacttcgacagccagaccaacgtgtcccagagcaaggactccgacgtgtacatcaccgataagtgcgtgctggacatgcggagcatggacttcaagagcaactccgccgtggcctggtccaacaagtccgatttcgcctgcgccaacgccttcaacaacagcattatccccgaggacacattcttcccaagccccgagagcagcgactccaccgaccacgtgaagcccaaagagacagagaacaccaagcagcccagcaagagctgccacaagcccaaggccatcgtgcacaccgagaaagtgaacatgatgagcctgaccgtgctgggcctgcggatgctgttcgccaaaaccgtggccgtgaacttcctgctgaccgccaagctgttcttcctcctcaccgcccgcgccaagagaagcggatctggcgtgaagcagaccctgaatttcgacctgctgaagctggctggcgacgtggaatccaacccaggccctactagtatggactggatttggcgcatccttttccttgtcggcgctgctaccggcgcgcattccttcgaagaggtgcagctggttgaatctggcggaggactggttcagcctggcggatctctgagactgtcttgtgccgccagcggctacaccttcaccacctattggatgcactgggtccgacaggcccctggcaaaggacttgagtgggtcggatatatcaggcccagcaccggctacacagagtacaaccagaagttcaaggaccgcttcaccatcagcgccgacaccagcaagaataccgcctacctccagatgaacagcctgagagccgaggacaccgccgtgtactactgtgccagatccagatggctgctggactattggggccagggcacactggttacagtttctacgcgtgaggacctgaagaacgtgttcccacctgaggtggccgtgttcgagcctagcgaggccgagatcagccacacccagaaagccaccctcgtgtgcctggctaccggcttctaccccgaccatgtggaactgtcttggtgggtcaacggcaaagaggtgcacagcggcgtgtgtaccgacccccagccactgaaagaacagcccgccctgaacgacagccggtactgcctgagcagcagactgagagtgtccgccaccttctggcagaacccccggaaccacttcagatgccaggtgcagttctacggcctgagcgagaacgacgagtggacccaggacagagccaagcccgtgacccagatcgtgtctgccgaagcctggggcagagccgatgatgtgattaagatccactggcaggaaaagaagtccaacaccatcctgggcagccaggaaggcaacaccatgaagaccaacgacacctacatgaagttcagctggctgaccgtgcccgagaagtccctggacaaagaacacagatgcatcgtgcggcacgaaaacaacaagaacggcgtggaccaggaaatcatcttcccacccatcaagaccgatgtgattacaatggaccccaaggacaactgctccaaggacgccaacgataccctgctgctccagctgaccaacaccagcgcctactacatgtacttgttgctgctgctgaagtccgtggtgtacttcgccatcatcacatgctgcctgctgatggctatggtcaagcggaaggacagccgggga

SEQ ID NO: 6332 - DNA, 2178 bp, synthetic construct
  source 1..2178: mol_type = other DNA
atggccttaccagtgaccgccttgctcctgccgctggccttgctgctccacgccgccaggccggacatccagatgacacagagccctagcagcctgtctgccagcgtgggagacagagtgaccatcacctgtagagccagccaggacatcagcaactacctgaactggtatcagcagaagcccggcaaggcccctaagctgctgatctactacaccagcagactgcacagcggcgtgcccagcagattttctggctctggcagcggcaccgacttcaccctgacaatatctagcctccagcctgaggacttcgccacctactattgccagcagggcaacaccctgccttacacatttggacagggcaccaaggtggaaatcaagagactcgagatccagaaccctgatcctgccgtgtaccagctgcgggatagcaagagcagcgacaagagcgtgtgtctgttcaccgacttcgacagccagaccaacgtgtcccagagcaaggactccgacgtgtacatcaccgataagtgcgtgctggacatgcggagcatggacttcaagagcaactccgccgtggcctggtccaacaagtccgatttcgcctgcgccaacgccttcaacaacagcattatccccgaggacacattcttcccaagccccgagagcagcgactccaccgaccacgtgaagcccaaagagacagagaacaccaagcagcccagcaagagctgccacaagcccaaggccatcgtgcacaccgagaaagtgaacatgatgagcctgaccgtgctgggcctgcggatgctgttcgccaaaaccgtggccgtgaacttcctgctgaccgccaagctgttcttcctcctcaccgcccgcgccaagagaagcggatctggcgtgaagcagaccctgaatttcgacctgctgaagctggctggcgacgtggaatccaacccaggccctactagtatggactggatttggcgcatccttttccttgtcggcgctgctaccggcgcgcattccttcgaagaagtgcagctggttgaatcaggtggcggcctggttcaacctggcggatctctgagactgagctgtgccgccagcggcttcaccttcagcgactactttatgagctgggtccgacaggcccctggcaaaggacttgaatgggtcgccaccatcagcaatggcggcacctacacttactaccccgacagcgtgaagggcagattcaccatctccagagacaacagcaagaacaccctgtacctccagatgaactccctgagagccgaggacaccgccgtgtactactgcgccagattcgacggctacatcttcgactattggggccagggcaccctggtcacagtctcttctacgcgtgaggacctgaagaacgtgttcccacctgaggtggccgtgttcgagcctagcgaggccgagatcagccacacccagaaagccaccctcgtgtgcctggctaccggcttctaccccgaccatgtggaactgtcttggtgggtcaacggcaaagaggtgcacagcggcgtgtgtaccgacccccagccactgaaagaacagcccgccctgaacgacagccggtactgcctgagcagcagactgagagtgtccgccaccttctggcagaacccccggaaccacttcagatgccaggtgcagttctacggcctgagcgagaacgacgagtggacccaggacagagccaagcccgtgacccagatcgtgtctgccgaagcctggggcagagccgatgatgtgattaagatccactggcaggaaaagaagtccaacaccatcctgggcagccaggaaggcaacaccatgaagaccaacgacacctacatgaagttcagctggctgaccgtgcccgagaagtccctggacaaagaacacagatgcatcgtgcggcacgaaaacaacaagaacggcgtggaccaggaaatcatcttcccacccatcaagaccgatgtgattacaatggaccccaaggacaactgctccaaggacgccaacgataccctgctgctccagctgaccaacaccagcgcctactacatgtacttgttgctgctgctgaagtccgtggtgtacttcgccatcatcacatgctgcctgctgatggctatggtcaagcggaaggacagccgggga

SEQ ID NO: 6333 - DNA, 2574 bp, synthetic construct
  source 1..2574: mol_type = other DNA
atggccttaccagtgaccgccttgctcctgccgctggccttgctgctccacgccgccaggccggaagtgcagctggttgaatctggcggaggactggttcagcctggcggatctctgagactgtcttgtgccgccagcggcttcagcttcagcgacttttggatgagctgggtccgacaggcccctggcaaaggacttgaatgggtcgccacaatcagccaggccggcagcgagaaggactacgtggactctgtgaagggcagattcaccatcagccgggacaacgccaagaagtccctgtacctccagatgaacagcctgagagccgaggacaccgccgtgtactattgtgcctctggcgtgtacagcttcgactacagaggccagggcaccctggtcacagtctcttctggtaccggcggaggcggatctggcggcggaggtagcggtggcggaggatctgaattcgacatccagatgacacagactacatcctccctgtctgcctctctgggagacagagtcaccatcagttgcagggcaagtcaggacattagtaagtacctgaactggtatcagcagaaaccagatggaactgttaaactcctgatctaccatacatcaagattacactcaggagtcccatcaaggttcagtggcagtgggtctggaacagattattctctcaccattagcaacctggagcaagaagatattgccacttacttttgccaacagggtaatacgcttccgtacacgttcggaggggggaccaagctggagatcacactcgaggacctgaagaacgtgttcccacctgaggtggccgtgttcgagcctagcgaggccgagatcagccacacccagaaagccaccctcgtgtgcctggctaccggcttctaccccgaccatgtggaactgtcttggtgggtcaacggcaaagaggtgcacagcggcgtgtgtaccgacccccagccactgaaagaacagcccgccctgaacgacagccggtactgcctgagcagcagactgagagtgtccgccaccttctggcagaacccccggaaccacttcagatgccaggtgcagttctacggcctgagcgagaacgacgagtggacccaggacagagccaagcccgtgacccagatcgtgtctgccgaagcctggggcagagccgatgatgtgattaagatccactggcaggaaaagaagtccaacaccatcctgggcagccaggaaggcaacaccatgaagaccaacgacacctacatgaagttcagctggctgaccgtgcccgagaagtccctggacaaagaacacagatgcatcgtgcggcacgaaaacaacaagaacggcgtggaccaggaaatcatcttcccacccatcaagaccgatgtgattacaatggaccccaaggacaactgctccaaggacgccaacgataccctgctgctccagctgaccaacaccagcgcctactacatgtacttgttgctgctgctgaagtccgtggtgtacttcgccatcatcacatgctgcctgctgatggctatggtcaagcggaaggacagccggggaagggccaagcgatctggatctggagcaacaaacttctcactactcaaacaagcaggtgacgtggaggagaatcccgggcctactagtatggactggatttggcgcatccttttccttgtcggcgctgctaccggcgcgcattccttcgaagtgaaactgcaggagtcaggacctggcctggtggcgccctcacagagcctgtccgtcacatgcactgtctcaggggtctcattacccgactatggtgtaagctggattcgccagcctccacgaaagggtctggagtggctgggagtaatatggggtagtgaaaccacatactataattcagctctcaaatccagactgaccatcatcaaggacaactccaagagccaagttttcttaaaaatgaacagtctgcaaactgatgacacagccatttactactgtgccaaacattattactacggtggtagctatgctatggactactggggccaaggaacctcagtcaccgtctcctcaacgcgtatccagaaccctgatcctgccgtgtaccagctgcgggatagcaagagcagcgacaagagcgtgtgtctgttcaccgacttcgacagccagaccaacgtgtcccagagcaaggactccgacgtgtacatcaccgataagtgcgtgctggacatgcggagcatggacttcaagagcaactccgccgtggcctggtccaacaagtccgatttcgcctgcgccaacgccttcaacaacagcattatccccgaggacacattcttcccaagccccgagagcagcgactccaccgaccacgtgaagcccaaagagacagagaacaccaagcagcccagcaagagctgccacaagcccaaggccatcgtgcacaccgagaaagtgaacatgatgagcctgaccgtgctgggcctgcggatgctgttcgccaaaaccgtggccgtgaacttcctgctgaccgccaagctgttcttcctcctcaccgcc

SEQ ID NO: 6334 - DNA, 2577 bp, synthetic construct
  source 1..2577: mol_type = other DNA
atggccttaccagtgaccgccttgctcctgccgctggccttgctgctccacgccgccaggccggaagtgcagctggttgaatctggcggaggactggttcagcctggcggatctctgagactgtcttgtgccgccagcggcttcagcttcagcgacttttggatgagctgggtccgacaggcccctggcaaaggacttgaatgggtcgccacaatcagccaggccggcagcgagaaggactacgtggactctgtgaagggcagattcaccatcagccgggacaacgccaagaagtccctgtacctccagatgaacagcctgagagccgaggacaccgccgtgtactattgtgcctctggcgtgtacagcttcgactacagaggccagggcaccctggtcacagtctcttctggtaccggcggaggcggatctggcggcggaggtagcggtggcggaggatctgaattcgagatcgtgatgacccagagccctgccaccctgtctctgagccctggcgaaagagccaccctgagctgtagagccagccaggacatcagcaagtacctgaactggtatcagcagaagcccggccaggcccccagactgctgatctaccacaccagcagactgcacagcggcatccccgccagattttctggctctggcagcggcaccgactacaccctgacaatcagcagcctccagcccgaggacttcgccgtgtacttctgtcagcaaggcaacaccctgccctacaccttcggccagggcaccaagctggaaatcaagctcgaggacctgaagaacgtgttcccacctgaggtggccgtgttcgagcctagcgaggccgagatcagccacacccagaaagccaccctcgtgtgcctggctaccggcttctaccccgaccatgtggaactgtcttggtgggtcaacggcaaagaggtgcacagcggcgtgtgtaccgacccccagccactgaaagaacagcccgccctgaacgacagccggtactgcctgagcagcagactgagagtgtccgccaccttctggcagaacccccggaaccacttcagatgccaggtgcagttctacggcctgagcgagaacgacgagtggacccaggacagagccaagcccgtgacccagatcgtgtctgccgaagcctggggcagagccgatgatgtgattaagatccactggcaggaaaagaagtccaacaccatcctgggcagccaggaaggcaacaccatgaagaccaacgacacctacatgaagttcagctggctgaccgtgcccgagaagtccctggacaaagaacacagatgcatcgtgcggcacgaaaacaacaagaacggcgtggaccaggaaatcatcttcccacccatcaagaccgatgtgattacaatggaccccaaggacaactgctccaaggacgccaacgataccctgctgctccagctgaccaacaccagcgcctactacatgtacttgttgctgctgctgaagtccgtggtgtacttcgccatcatcacatgctgcctgctgatggctatggtcaagcggaaggacagccggggaagggccaagcgatctggatctggagcaacaaacttctcactactcaaacaagcaggtgacgtggaggagaatcccgggcctactagtatggactggatttggcgcatccttttccttgtcggcgctgctaccggcgcgcattccttcgaacaggtgcaactccaggaatctggccctggcctcgtgaagcccagcgagacactgagcctgacctgtaccgtgtccggcgtgtccctgcctgactatggcgtgtcctggatcagacagccccctggcaagggcctggaatggatcggagtgatttggggcagcgaaaccacctactacaacagctccctgaagtccagagtgaccatctccaaggacaactccaagaaccaggtgtccctgaagctgagcagcgtgacagccgccgacaccgccgtgtattactgcgccaagcactactactacggcggcagctacgctatggactactggggccagggaaccctcgtgaccgtgtctagtacgcgtatccagaaccctgatcctgccgtgtaccagctgcgggatagcaagagcagcgacaagagcgtgtgtctgttcaccgacttcgacagccagaccaacgtgtcccagagcaaggactccgacgtgtacatcaccgataagtgcgtgctggacatgcggagcatggacttcaagagcaactccgccgtggcctggtccaacaagtccgatttcgcctgcgccaacgccttcaacaacagcattatccccgaggacacattcttcccaagccccgagagcagcgactccaccgaccacgtgaagcccaaagagacagagaacaccaagcagcccagcaagagctgccacaagcccaaggccatcgtgcacaccgagaaagtgaacatgatgagcctgaccgtgctgggcctgcggatgctgttcgccaaaaccgtggccgtgaacttcctgctgaccgccaagctgttcttcctcctcaccgcc

SEQ ID NO: 6335 - DNA, 2580 bp, synthetic construct
  source 1..2580: mol_type = other DNA
atggccttaccagtgaccgccttgctcctgccgctggccttgctgctccacgccgccaggccggaagtgcagctggttgaatctggcggaggactggttcagcctggcggatctctgagactgtcttgtgccgccagcggcttcagcttcagcgacttttggatgagctgggtccgacaggcccctggcaaaggacttgaatgggtcgccacaatcagccaggccggcagcgagaaggactacgtggactctgtgaagggcagattcaccatcagccgggacaacgccaagaagtccctgtacctccagatgaacagcctgagagccgaggacaccgccgtgtactattgtgcctctggcgtgtacagcttcgactacagaggccagggcaccctggtcacagtctcttctggtaccggcggaggcggatctggcggcggaggtagcggtggcggaggatctgaattcgacgagatcgtgctgacacagagccccgccaccctgtcactgtctccaggcgaaagagccaccctgagctgtagcgccagcagcagcgtgtcctacatgcactggtatcagcagaagcccggccaggcccccagactgctgatctacgataccagcaagctggcctccggcatccccgccagattttctggcagcggctccggcaccgacttcaccctgacaatcagcagcctggaacccgaggacgtggccgtgtactactgttttcaaggcagcgtgtaccccttcaccttcggccagggcaccaagctggaaatcaagagactcgaggacctgaagaacgtgttcccacctgaggtggccgtgttcgagcctagcgaggccgagatcagccacacccagaaagccaccctcgtgtgcctggctaccggcttctaccccgaccatgtggaactgtcttggtgggtcaacggcaaagaggtgcacagcggcgtgtgtaccgacccccagccactgaaagaacagcccgccctgaacgacagccggtactgcctgagcagcagactgagagtgtccgccaccttctggcagaacccccggaaccacttcagatgccaggtgcagttctacggcctgagcgagaacgacgagtggacccaggacagagccaagcccgtgacccagatcgtgtctgccgaagcctggggcagagccgatgatgtgattaagatccactggcaggaaaagaagtccaacaccatcctgggcagccaggaaggcaacaccatgaagaccaacgacacctacatgaagttcagctggctgaccgtgcccgagaagtccctggacaaagaacacagatgcatcgtgcggcacgaaaacaacaagaacggcgtggaccaggaaatcatcttcccacccatcaagaccgatgtgattacaatggaccccaaggacaactgctccaaggacgccaacgataccctgctgctccagctgaccaacaccagcgcctactacatgtacttgttgctgctgctgaagtccgtggtgtacttcgccatcatcacatgctgcctgctgatggctatggtcaagcggaaggacagccggggaagggccaagcgatctggatctggagcaacaaacttctcactactcaaacaagcaggtgacgtggaggagaatcccgggcctactagtatggactggatttggcgcatccttttccttgtcggcgctgctaccggcgcgcattccttcgaacaggtgcagctccaggaatctggccctggcctcgtgaagcctagccagaccctgagcctgacctgtaccgtgtctggcggcagcatcagcacaagcggcatgggcgtgggctggatcagacagcaccctggcaagggcctggaatggatcggccacatttggtgggacgacgacaagcggtacaaccccgccctgaagtccagagtgaccatcagcgtggacaccagcaagaaccagttcagcctgaagctgagcagcgtgacagccgccgataccgccgtgtattattgcgcccggatggaactgtggtcctactacttcgactactggggccagggaaccctcgtgaccgtgtctagtacgcgtatccagaaccctgatcctgccgtgtaccagctgcgggatagcaagagcagcgacaagagcgtgtgtctgttcaccgacttcgacagccagaccaacgtgtcccagagcaaggactccgacgtgtacatcaccgataagtgcgtgctggacatgcggagcatggacttcaagagcaactccgccgtggcctggtccaacaagtccgatttcgcctgcgccaacgccttcaacaacagcattatccccgaggacacattcttcccaagccccgagagcagcgactccaccgaccacgtgaagcccaaagagacagagaacaccaagcagcccagcaagagctgccacaagcccaaggccatcgtgcacaccgagaaagtgaacatgatgagcctgaccgtgctgggcctgcggatgctgttcgccaaaaccgtggccgtgaacttcctgctgaccgccaagctgttcttcctcctcaccgcc

SEQ ID NO: 6336 - DNA, 2574 bp, synthetic construct
  source 1..2574: mol_type = other DNA
atggccttaccagtgaccgccttgctcctgccgctggccttgctgctccacgccgccaggccggaagtgcagctggttgaatctggcggaggactggttcagcctggcggatctctgagactgtcttgtgccgccagcggcttcagcttcagcgacttttggatgagctgggtccgacaggcccctggcaaaggacttgaatgggtcgccacaatcagccaggccggcagcgagaaggactacgtggactctgtgaagggcagattcaccatcagccgggacaacgccaagaagtccctgtacctccagatgaacagcctgagagccgaggacaccgccgtgtactattgtgcctctggcgtgtacagcttcgactacagaggccagggcaccctggtcacagtctcttctggtaccggcggaggcggatctggcggcggaggtagcggtggcggaggatctgaattcgactacatccacgtgacacagagccctagcagcctgtccgtgtccatcggcgatagagtgaccatcaactgccagacctctcaaggcgtgggcagcgacctgcactggtatcagcacaaacctggcagagcccctaagctgctgatccaccatgccagctctgtggaagatggcgtgcccagcagattttccggcaccggatttcacaccagcttcaacctgacaatcaacgacctccaggccgacgacatcggcacctactactgtcaagtgctccagagcttcggcagaggcagcagactggatacaaaactcgaggacctgaagaacgtgttcccacctgaggtggccgtgttcgagcctagcgaggccgagatcagccacacccagaaagccaccctcgtgtgcctggctaccggcttctaccccgaccatgtggaactgtcttggtgggtcaacggcaaagaggtgcacagcggcgtgtgtaccgacccccagccactgaaagaacagcccgccctgaacgacagccggtactgcctgagcagcagactgagagtgtccgccaccttctggcagaacccccggaaccacttcagatgccaggtgcagttctacggcctgagcgagaacgacgagtggacccaggacagagccaagcccgtgacccagatcgtgtctgccgaagcctggggcagagccgatgatgtgattaagatccactggcaggaaaagaagtccaacaccatcctgggcagccaggaaggcaacaccatgaagaccaacgacacctacatgaagttcagctggctgaccgtgcccgagaagtccctggacaaagaacacagatgcatcgtgcggcacgaaaacaacaagaacggcgtggaccaggaaatcatcttcccacccatcaagaccgatgtgattacaatggaccccaaggacaactgctccaaggacgccaacgataccctgctgctccagctgaccaacaccagcgcctactacatgtacttgttgctgctgctgaagtccgtggtgtacttcgccatcatcacatgctgcctgctgatggctatggtcaagcggaaggacagccggggaagggccaagcgatctggatctggagcaacaaacttctcactactcaaacaagcaggtgacgtggaggagaatcccgggcctactagtatggactggatttggcgcatccttttccttgtcggcgctgctaccggcgcgcattccttcgaaagggcacacctggtgcagtctggcaccgccatgaagaaacctggcgcttccgtcagagtgtcctgtcagacaagcggctacaccttcacagcccacatcctgttctggttcagacaggccccaggcagaggactggaatgggtcggatggatcaagccccagtacggggccgtgaatttcggcggaggcttcagagacagagtgaccctgaccagggacgtgtaccgggaaatcgcctacatggacatccggggcctgaagcctgatgacaccgccgtgtactactgcgccagggatagaagctacggcgacagctcttgggctctcgatgcttggggacagggcacaacagtggtggtgtctgctacgcgtatccagaaccctgatcctgccgtgtaccagctgcgggatagcaagagcagcgacaagagcgtgtgtctgttcaccgacttcgacagccagaccaacgtgtcccagagcaaggactccgacgtgtacatcaccgataagtgcgtgctggacatgcggagcatggacttcaagagcaactccgccgtggcctggtccaacaagtccgatttcgcctgcgccaacgccttcaacaacagcattatccccgaggacacattcttcccaagccccgagagcagcgactccaccgaccacgtgaagcccaaagagacagagaacaccaagcagcccagcaagagctgccacaagcccaaggccatcgtgcacaccgagaaagtgaacatgatgagcctgaccgtgctgggcctgcggatgctgttcgccaaaaccgtggccgtgaacttcctgctgaccgccaagctgttcttcctcctcaccgcc

SEQ ID NO: 6337 - DNA, 2604 bp, synthetic construct
  source 1..2604: mol_type = other DNA
atggccttaccagtgaccgccttgctcctgccgctggccttgctgctccacgccgccaggccggaagtgcagctggttgaatctggcggaggactggttcagcctggcggatctctgagactgtcttgtgccgccagcggcttcagcttcagcgacttttggatgagctgggtccgacaggcccctggcaaaggacttgaatgggtcgccacaatcagccaggccggcagcgagaaggactacgtggactctgtgaagggcagattcaccatcagccgggacaacgccaagaagtccctgtacctccagatgaacagcctgagagccgaggacaccgccgtgtactattgtgcctctggcgtgtacagcttcgactacagaggccagggcaccctggtcacagtctcttctggtaccggcggaggcggatctggcggcggaggtagcggtggcggaggatctgaattcgacgtgcagatgatccagacccccgatagcctggccgtgtccctgggacagagagccaccatctcttgcagagccagcgagagcgtggacaactacggcatcagcttcatgcactggtatcagcagaagcccggccagagccccaagctgctgatctacagagcctccaacctggaaagcggcatccccgccagattttccggcagcggcagcagaaccgacttcaccctgaccatcaaccccgtggaaaccgacgacgtggcaacctactactgccagcagaacaacaaggacccccccacctttggcggaggcaccaagctggaaatcaagctcgaggacctgaagaacgtgttcccacctgaggtggccgtgttcgagcctagcgaggccgagatcagccacacccagaaagccaccctcgtgtgcctggctaccggcttctaccccgaccatgtggaactgtcttggtgggtcaacggcaaagaggtgcacagcggcgtgtgtaccgacccccagccactgaaagaacagcccgccctgaacgacagccggtactgcctgagcagcagactgagagtgtccgccaccttctggcagaacccccggaaccacttcagatgccaggtgcagttctacggcctgagcgagaacgacgagtggacccaggacagagccaagcccgtgacccagatcgtgtctgccgaagcctggggcagagccgatgatgtgattaagatccactggcaggaaaagaagtccaacaccatcctgggcagccaggaaggcaacaccatgaagaccaacgacacctacatgaagttcagctggctgaccgtgcccgagaagtccctggacaaagaacacagatgcatcgtgcggcacgaaaacaacaagaacggcgtggaccaggaaatcatcttcccacccatcaagaccgatgtgattacaatggaccccaaggacaactgctccaaggacgccaacgataccctgctgctccagctgaccaacaccagcgcctactacatgtacttgttgctgctgctgaagtccgtggtgtacttcgccatcatcacatgctgcctgctgatggctatggtcaagcggaaggacagccggggaagggccaagcgatctggatctggagcaacaaacttctcactactcaaacaagcaggtgacgtggaggagaatcccgggcctactagtatggactggatttggcgcatccttttccttgtcggcgctgctaccggcgcgcattccttcgaagggggaggcggctctcaggtgcaactccagcagtctggcgctgagcttgtgaagcctggggccagcgtgaagattagctgcaaggccagcggctacgccttcagcagctactggatgaactgggtcaagcagcggcctggcaagggcctggaatggatcggccaaatctaccccggcgacggcgacaccacctacaacggcaagttcaagggcaaggccaccctgacagccgacaagagcagcagcaccgtgtacatgcaactgaacagcctgaccagcgaggacagcgccgtgtacttctgcgtgcggtactactacggcagctccggctacttcgactattggggccagggcaccacactgaccgtgtcctctacgcgtatccagaaccctgatcctgccgtgtaccagctgcgggatagcaagagcagcgacaagagcgtgtgtctgttcaccgacttcgacagccagaccaacgtgtcccagagcaaggactccgacgtgtacatcaccgataagtgcgtgctggacatgcggagcatggacttcaagagcaactccgccgtggcctggtccaacaagtccgatttcgcctgcgccaacgccttcaacaacagcattatccccgaggacacattcttcccaagccccgagagcagcgactccaccgaccacgtgaagcccaaagagacagagaacaccaagcagcccagcaagagctgccacaagcccaaggccatcgtgcacaccgagaaagtgaacatgatgagcctgaccgtgctgggcctgcggatgctgttcgccaaaaccgtggccgtgaacttcctgctgaccgccaagctgttcttcctcctcaccgcc

SEQ ID NO: 6338 - DNA, 2577 bp, synthetic construct
  source 1..2577: mol_type = other DNA
atggccttaccagtgaccgccttgctcctgccgctggccttgctgctccacgccgccaggccggaagtgcagctggttgaatctggcggaggactggttcagcctggcggatctctgagactgtcttgtgccgccagcggcttcagcttcagcgacttttggatgagctgggtccgacaggcccctggcaaaggacttgaatgggtcgccacaatcagccaggccggcagcgagaaggactacgtggactctgtgaagggcagattcaccatcagccgggacaacgccaagaagtccctgtacctccagatgaacagcctgagagccgaggacaccgccgtgtactattgtgcctctggcgtgtacagcttcgactacagaggccagggcaccctggtcacagtctcttctggtaccggcggaggcggatctggcggcggaggtagcggtggcggaggatctgaattcgacgtgcagatgatccagacccccagcagcctgtctgccagcctgggcgatagagtgaccatcagctgtcgggccagccaggacatcggcaactacctgaactggtatcagcagaaacccgacggcaccgtgaagctgctgatctactacaccagcagactgcacagcggcgtgcccagcagattttctggcagcggctctggcaccgagtacagcctgaccatctccaacctggaacaggaagatattgctacctacttctgtcagcaaggcagcgccctgccccctacatttggcggcggaacaaagctggaaatcaacctcgaggacctgaagaacgtgttcccacctgaggtggccgtgttcgagcctagcgaggccgagatcagccacacccagaaagccaccctcgtgtgcctggctaccggcttctaccccgaccatgtggaactgtcttggtgggtcaacggcaaagaggtgcacagcggcgtgtgtaccgacccccagccactgaaagaacagcccgccctgaacgacagccggtactgcctgagcagcagactgagagtgtccgccaccttctggcagaacccccggaaccacttcagatgccaggtgcagttctacggcctgagcgagaacgacgagtggacccaggacagagccaagcccgtgacccagatcgtgtctgccgaagcctggggcagagccgatgatgtgattaagatccactggcaggaaaagaagtccaacaccatcctgggcagccaggaaggcaacaccatgaagaccaacgacacctacatgaagttcagctggctgaccgtgcccgagaagtccctggacaaagaacacagatgcatcgtgcggcacgaaaacaacaagaacggcgtggaccaggaaatcatcttcccacccatcaagaccgatgtgattacaatggaccccaaggacaactgctccaaggacgccaacgataccctgctgctccagctgaccaacaccagcgcctactacatgtacttgttgctgctgctgaagtccgtggtgtacttcgccatcatcacatgctgcctgctgatggctatggtcaagcggaaggacagccggggaagggccaagcgatctggatctggagcaacaaacttctcactactcaaacaagcaggtgacgtggaggagaatcccgggcctactagtatggactggatttggcgcatccttttccttgtcggcgctgctaccggcgcgcattccttcgaagctctccagctccagcagtctggcgcagaactcgtgcggcctggcgcttctgtgaccctgagctgtaaagccagcggctacaccttcaccgactacgagatgcactgggtcaagcagacccctgtgcacggcctggaatggatcggagccatcgaccctgagacaggcggcaccgcctacaaccagaagttcgagggcaaggccatcctgaccgccgacaagagcagcagcacagcctacatggaactgcggagcctgacctccgaggacagccccgtgtactactgtgccagacggcggtactacggcagcagctccttcgactattggggccagggcaccaccctgaccgtgtctagtacgcgtatccagaaccctgatcctgccgtgtaccagctgcgggatagcaagagcagcgacaagagcgtgtgtctgttcaccgacttcgacagccagaccaacgtgtcccagagcaaggactccgacgtgtacatcaccgataagtgcgtgctggacatgcggagcatggacttcaagagcaactccgccgtggcctggtccaacaagtccgatttcgcctgcgccaacgccttcaacaacagcattatccccgaggacacattcttcccaagccccgagagcagcgactccaccgaccacgtgaagcccaaagagacagagaacaccaagcagcccagcaagagctgccacaagcccaaggccatcgtgcacaccgagaaagtgaacatgatgagcctgaccgtgctgggcctgcggatgctgttcgccaaaaccgtggccgtgaacttcctgctgaccgccaagctgttcttcctcctcaccgcc

SEQ ID NO: 6339 - DNA, 2589 bp, synthetic construct
  source 1..2589: mol_type = other DNA
atggccttaccagtgaccgccttgctcctgccgctggccttgctgctccacgccgccaggccggaagtgcagctggttgaatctggcggaggactggttcagcctggcggatctctgagactgtcttgtgccgccagcggcttcagcttcagcgacttttggatgagctgggtccgacaggcccctggcaaaggacttgaatgggtcgccacaatcagccaggccggcagcgagaaggactacgtggactctgtgaagggcagattcaccatcagccgggacaacgccaagaagtccctgtacctccagatgaacagcctgagagccgaggacaccgccgtgtactattgtgcctctggcgtgtacagcttcgactacagaggccagggcaccctggtcacagtctcttctggtaccggcggaggcggatctggcggcggaggtagcggtggcggaggatctgaattcgacatcgtcctgacccagtccccagccagcctggcggtgtccctgggtcaacgagctaccatttcctgcagagcctctaagtccgtatccacttccggctatagttacctgcattggtaccaacagaaaccagggcagccacccaagctgctcatctatctggcctcaaacctggagtccggcgtgcccgccagattctccggaagtgggagcggcaccgactttacattgaacatccacccagtcgaagaggaagatgctgccacttattactgtcagcactccagggagctgccatttacatttggctctggcacaaaactggagatcaaactcgaggacctgaagaacgtgttcccacctgaggtggccgtgttcgagcctagcgaggccgagatcagccacacccagaaagccaccctcgtgtgcctggctaccggcttctaccccgaccatgtggaactgtcttggtgggtcaacggcaaagaggtgcacagcggcgtgtgtaccgacccccagccactgaaagaacagcccgccctgaacgacagccggtactgcctgagcagcagactgagagtgtccgccaccttctggcagaacccccggaaccacttcagatgccaggtgcagttctacggcctgagcgagaacgacgagtggacccaggacagagccaagcccgtgacccagatcgtgtctgccgaagcctggggcagagccgatgatgtgattaagatccactggcaggaaaagaagtccaacaccatcctgggcagccaggaaggcaacaccatgaagaccaacgacacctacatgaagttcagctggctgaccgtgcccgagaagtccctggacaaagaacacagatgcatcgtgcggcacgaaaacaacaagaacggcgtggaccaggaaatcatcttcccacccatcaagaccgatgtgattacaatggaccccaaggacaactgctccaaggacgccaacgataccctgctgctccagctgaccaacaccagcgcctactacatgtacttgttgctgctgctgaagtccgtggtgtacttcgccatcatcacatgctgcctgctgatggctatggtcaagcggaaggacagccggggaagggccaagcgatctggatctggagcaacaaacttctcactactcaaacaagcaggtgacgtggaggagaatcccgggcctactagtatggactggatttggcgcatccttttccttgtcggcgctgctaccggcgcgcattccttcgaacaggttcagctggtcgagtccgggggaggtctggtacagccgggtggcagcctcaagctgtcatgtgccgcatctggttttgactttagcaggtattggatgagctgggtccgccaggccccgggcaagggacttgagtggattggagaaataaaccctacttccagcacaatcaacttcacaccttctttgaaagataaggtttttatctctcgggataacgctaaaaacacactgtacttgcagatgtctaaggtgcgaagcgaagacaccgccctctattattgcgcccggggtaattactaccgctatggggatgcgatggactattgggggcaaggtacctccgtcacggtctcaacgcgtatccagaaccctgatcctgccgtgtaccagctgcgggatagcaagagcagcgacaagagcgtgtgtctgttcaccgacttcgacagccagaccaacgtgtcccagagcaaggactccgacgtgtacatcaccgataagtgcgtgctggacatgcggagcatggacttcaagagcaactccgccgtggcctggtccaacaagtccgatttcgcctgcgccaacgccttcaacaacagcattatccccgaggacacattcttcccaagccccgagagcagcgactccaccgaccacgtgaagcccaaagagacagagaacaccaagcagcccagcaagagctgccacaagcccaaggccatcgtgcacaccgagaaagtgaacatgatgagcctgaccgtgctgggcctgcggatgctgttcgccaaaaccgtggccgtgaacttcctgctgaccgccaagctgttcttcctcctcaccgcc

SEQ ID NO: 6340 - DNA, 2583 bp, synthetic construct
  source 1..2583: mol_type = other DNA
atggccttaccagtgaccgccttgctcctgccgctggccttgctgctccacgccgccaggccggaagtgcagctggttgaatctggcggaggactggttcagcctggcggatctctgagactgtcttgtgccgccagcggcttcagcttcagcgacttttggatgagctgggtccgacaggcccctggcaaaggacttgaatgggtcgccacaatcagccaggccggcagcgagaaggactacgtggactctgtgaagggcagattcaccatcagccgggacaacgccaagaagtccctgtacctccagatgaacagcctgagagccgaggacaccgccgtgtactattgtgcctctggcgtgtacagcttcgactacagaggccagggcaccctggtcacagtctcttctggtaccggcggaggcggatctggcggcggaggtagcggtggcggaggatctgaattcgacatccagatgacccagagccctagctcactgagcgccagcgtgggcgacagggtgaccattacctgctccgccagccaggacatcagcaactacctgaactggtaccagcagaagcccggcaaggcccccaagctgctgatctactacacctccaacctgcactccggcgtgcccagcaggttcagcggaagcggcagcggcaccgatttcaccctgaccatctccagcctgcagcccgaggacttcgccacctactactgccagcagtacaggaagctcccctggactttcggccagggcaccaaactggagatcaagcgtctcgaggacctgaagaacgtgttcccacctgaggtggccgtgttcgagcctagcgaggccgagatcagccacacccagaaagccaccctcgtgtgcctggctaccggcttctaccccgaccatgtggaactgtcttggtgggtcaacggcaaagaggtgcacagcggcgtgtgtaccgacccccagccactgaaagaacagcccgccctgaacgacagccggtactgcctgagcagcagactgagagtgtccgccaccttctggcagaacccccggaaccacttcagatgccaggtgcagttctacggcctgagcgagaacgacgagtggacccaggacagagccaagcccgtgacccagatcgtgtctgccgaagcctggggcagagccgatgatgtgattaagatccactggcaggaaaagaagtccaacaccatcctgggcagccaggaaggcaacaccatgaagaccaacgacacctacatgaagttcagctggctgaccgtgcccgagaagtccctggacaaagaacacagatgcatcgtgcggcacgaaaacaacaagaacggcgtggaccaggaaatcatcttcccacccatcaagaccgatgtgattacaatggaccccaaggacaactgctccaaggacgccaacgataccctgctgctccagctgaccaacaccagcgcctactacatgtacttgttgctgctgctgaagtccgtggtgtacttcgccatcatcacatgctgcctgctgatggctatggtcaagcggaaggacagccggggaagggccaagcgatctggatctggagcaacaaacttctcactactcaaacaagcaggtgacgtggaggagaatcccgggcctactagtatggactggatttggcgcatccttttccttgtcggcgctgctaccggcgcgcattccttcgaacaggtgcagctggtccagagcggcgccgaagtgaagaagcccggcagctccgtgaaagtgagctgcaaggccagcggcggcaccttcagcaactactggatgcactgggtgaggcaggcccccggacagggcctggagtggatgggcgccacctacaggggccacagcgacacctactacaaccagaagttcaagggccgggtgaccatcaccgccgacaagagcaccagcaccgcctacatggaactgagcagcctcaggagcgaggacaccgctgtgtattactgcgccaggggcgccatctacgacggctacgacgtgctggacaactggggccagggcacactggtgaccgtgtccagcacgcgtatccagaaccctgatcctgccgtgtaccagctgcgggatagcaagagcagcgacaagagcgtgtgtctgttcaccgacttcgacagccagaccaacgtgtcccagagcaaggactccgacgtgtacatcaccgataagtgcgtgctggacatgcggagcatggacttcaagagcaactccgccgtggcctggtccaacaagtccgatttcgcctgcgccaacgccttcaacaacagcattatccccgaggacacattcttcccaagccccgagagcagcgactccaccgaccacgtgaagcccaaagagacagagaacaccaagcagcccagcaagagctgccacaagcccaaggccatcgtgcacaccgagaaagtgaacatgatgagcctgaccgtgctgggcctgcggatgctgttcgccaaaaccgtggccgtgaacttcctgctgaccgccaagctgttcttcctcctcaccgcc

SEQ ID NO: 6341 - DNA, 2583 bp, synthetic construct
  source 1..2583: mol_type = other DNA
atggccttaccagtgaccgccttgctcctgccgctggccttgctgctccacgccgccaggccggaagtgcagctggttgaatctggcggaggactggttcagcctggcggatctctgagactgtcttgtgccgccagcggcttcagcttcagcgacttttggatgagctgggtccgacaggcccctggcaaaggacttgaatgggtcgccacaatcagccaggccggcagcgagaaggactacgtggactctgtgaagggcagattcaccatcagccgggacaacgccaagaagtccctgtacctccagatgaacagcctgagagccgaggacaccgccgtgtactattgtgcctctggcgtgtacagcttcgactacagaggccagggcaccctggtcacagtctcttctggtaccggcggaggcggatctggcggcggaggtagcggtggcggaggatctgaattcgacatcgtgctgacacagagccctgccaccctgtctctgagccctggcgatagagccaccatcagctgtagagccagcgagagcgtgaccatcctgggcagccacctgatctactggtatcagcagaagcccggccagccccccagactgctgattcagctggcctccaatgtgcagaccggcgtgccagccagattttccggcagcggcagcagaaccgacttcaccctgaccatcagcagcgtggaacccgaggacttcgccgtgtactactgcctccagagccggaccatccccagaacattcggccagggcaccaagctggaaatcaagagactcgaggacctgaagaacgtgttcccacctgaggtggccgtgttcgagcctagcgaggccgagatcagccacacccagaaagccaccctcgtgtgcctggctaccggcttctaccccgaccatgtggaactgtcttggtgggtcaacggcaaagaggtgcacagcggcgtgtgtaccgacccccagccactgaaagaacagcccgccctgaacgacagccggtactgcctgagcagcagactgagagtgtccgccaccttctggcagaacccccggaaccacttcagatgccaggtgcagttctacggcctgagcgagaacgacgagtggacccaggacagagccaagcccgtgacccagatcgtgtctgccgaagcctggggcagagccgatgatgtgattaagatccactggcaggaaaagaagtccaacaccatcctgggcagccaggaaggcaacaccatgaagaccaacgacacctacatgaagttcagctggctgaccgtgcccgagaagtccctggacaaagaacacagatgcatcgtgcggcacgaaaacaacaagaacggcgtggaccaggaaatcatcttcccacccatcaagaccgatgtgattacaatggaccccaaggacaactgctccaaggacgccaacgataccctgctgctccagctgaccaacaccagcgcctactacatgtacttgttgctgctgctgaagtccgtggtgtacttcgccatcatcacatgctgcctgctgatggctatggtcaagcggaaggacagccggggaagggccaagcgatctggatctggagcaacaaacttctcactactcaaacaagcaggtgacgtggaggagaatcccgggcctactagtatggactggatttggcgcatccttttccttgtcggcgctgctaccggcgcgcattccttcgaacaggtgcagctggtgcagtctggccccgaagtgaagaaacccggcgagtccgtgaagatcagctgcaaggccagcggctacaccttccggcactacagcatgaactgggtcaagcaggccccaggccagggcctgaagtggatgggcagaatcaacaccgagagcggcgtgcccatctacgccgacgacttcaagggccggttcagcttcaccgtggacaccagcgccagcaccgcctacctggaaatctccagcctgaccagcgaggataccgccgtgtatttctgctccaacgactacctgtacagcctggatttctggggccagggaaccaccctgacagtgtcctctacgcgtatccagaaccctgatcctgccgtgtaccagctgcgggatagcaagagcagcgacaagagcgtgtgtctgttcaccgacttcgacagccagaccaacgtgtcccagagcaaggactccgacgtgtacatcaccgataagtgcgtgctggacatgcggagcatggacttcaagagcaactccgccgtggcctggtccaacaagtccgatttcgcctgcgccaacgccttcaacaacagcattatccccgaggacacattcttcccaagccccgagagcagcgactccaccgaccacgtgaagcccaaagagacagagaacaccaagcagcccagcaagagctgccacaagcccaaggccatcgtgcacaccgagaaagtgaacatgatgagcctgaccgtgctgggcctgcggatgctgttcgccaaaaccgtggccgtgaacttcctgctgaccgccaagctgttcttcctcctcaccgcc

SEQ ID NO: 6342 - DNA, 2586 bp, synthetic construct
  source 1..2586: mol_type = other DNA
atggccttaccagtgaccgccttgctcctgccgctggccttgctgctccacgccgccaggccggaagtgcagctggttgaatctggcggaggactggttcagcctggcggatctctgagactgtcttgtgccgccagcggcttcagcttcagcgacttttggatgagctgggtccgacaggcccctggcaaaggacttgaatgggtcgccacaatcagccaggccggcagcgagaaggactacgtggactctgtgaagggcagattcaccatcagccgggacaacgccaagaagtccctgtacctccagatgaacagcctgagagccgaggacaccgccgtgtactattgtgcctctggcgtgtacagcttcgactacagaggccagggcaccctggtcacagtctcttctggtaccggcggaggcggatctggcggcggaggtagcggtggcggaggatctgaattccagtctgtgctgacacagcctcctagtgtgtctggcgctcctggacagagagtgaccatcagctgtacaggcagcagcagcaatatcggagccggctttgacgtgcactggtatcagcagctgcctggcacagcccctaaactgctgatctacggcaacagcaacagacccagcggcgtgcccgatagattttccggctctaagagcggcacaagcgccagcctggctattactggactccaggccgaggacgaggccgactactactgtcagagctacgacagcagcctgagcggctacgttttcggcaccggcaccaaagtgacagtgcttggtctcgaggacctgaagaacgtgttcccacctgaggtggccgtgttcgagcctagcgaggccgagatcagccacacccagaaagccaccctcgtgtgcctggctaccggcttctaccccgaccatgtggaactgtcttggtgggtcaacggcaaagaggtgcacagcggcgtgtgtaccgacccccagccactgaaagaacagcccgccctgaacgacagccggtactgcctgagcagcagactgagagtgtccgccaccttctggcagaacccccggaaccacttcagatgccaggtgcagttctacggcctgagcgagaacgacgagtggacccaggacagagccaagcccgtgacccagatcgtgtctgccgaagcctggggcagagccgatgatgtgattaagatccactggcaggaaaagaagtccaacaccatcctgggcagccaggaaggcaacaccatgaagaccaacgacacctacatgaagttcagctggctgaccgtgcccgagaagtccctggacaaagaacacagatgcatcgtgcggcacgaaaacaacaagaacggcgtggaccaggaaatcatcttcccacccatcaagaccgatgtgattacaatggaccccaaggacaactgctccaaggacgccaacgataccctgctgctccagctgaccaacaccagcgcctactacatgtacttgttgctgctgctgaagtccgtggtgtacttcgccatcatcacatgctgcctgctgatggctatggtcaagcggaaggacagccggggaagggccaagcgatctggatctggagcaacaaacttctcactactcaaacaagcaggtgacgtggaggagaatcccgggcctactagtatggactggatttggcgcatccttttccttgtcggcgctgctaccggcgcgcattccttcgaacaagttcagctggttcagagcggagccgaagtgaagaaacctggggcctctgtgaaggtgtcctgcaaggcttccggctacacctttaccgattactacatgcactgggtccgacaggctcccggccaaagacttgaatggatgggctggatcaaccccaacagcggcggcacaaattacgcccagaagttccaggaccggatcaccgtgaccagagacaccagctccaacaccggctacatggaactgacccggctgagatccgatgacaccgccgtgtactactgcgctagaagcccttactccggcgtgctggataagtggggacagggcacactggtcaccgtgtcatctacgcgtatccagaaccctgatcctgccgtgtaccagctgcgggatagcaagagcagcgacaagagcgtgtgtctgttcaccgacttcgacagccagaccaacgtgtcccagagcaaggactccgacgtgtacatcaccgataagtgcgtgctggacatgcggagcatggacttcaagagcaactccgccgtggcctggtccaacaagtccgatttcgcctgcgccaacgccttcaacaacagcattatccccgaggacacattcttcccaagccccgagagcagcgactccaccgaccacgtgaagcccaaagagacagagaacaccaagcagcccagcaagagctgccacaagcccaaggccatcgtgcacaccgagaaagtgaacatgatgagcctgaccgtgctgggcctgcggatgctgttcgccaaaaccgtggccgtgaacttcctgctgaccgccaagctgttcttcctcctcaccgcc

SEQ ID NO: 6343 - DNA, 2577 bp, synthetic construct
  source 1..2577: mol_type = other DNA
atggccttaccagtgaccgccttgctcctgccgctggccttgctgctccacgccgccaggccggaagtgcagctggttgaatctggcggaggactggttcagcctggcggatctctgagactgtcttgtgccgccagcggcttcagcttcagcgacttttggatgagctgggtccgacaggcccctggcaaaggacttgaatgggtcgccacaatcagccaggccggcagcgagaaggactacgtggactctgtgaagggcagattcaccatcagccgggacaacgccaagaagtccctgtacctccagatgaacagcctgagagccgaggacaccgccgtgtactattgtgcctctggcgtgtacagcttcgactacagaggccagggcaccctggtcacagtctcttctggtaccggcggaggcggatctggcggcggaggtagcggtggcggaggatctgaattccaggctgttctgacacagcctccatctgcctctggcacacctggacagagagtgaccatctcctgtagcggcagcagcagcaacatcggcagctacaccgtgtcctggtatcagcagctccctggaacagcccctaagttcctgatctacagcaacaaccagcggcctagcggcgtgcccgatagattttctggcagcaagagcggcacaagcgccagcctggctatttctggactccagtctgaggacgaggccgactactattgtgccgcctgggacgatagcctgaacggctatgtgtttggcaccggcaccaaagtgacagtgcttggtctcgaggacctgaagaacgtgttcccacctgaggtggccgtgttcgagcctagcgaggccgagatcagccacacccagaaagccaccctcgtgtgcctggctaccggcttctaccccgaccatgtggaactgtcttggtgggtcaacggcaaagaggtgcacagcggcgtgtgtaccgacccccagccactgaaagaacagcccgccctgaacgacagccggtactgcctgagcagcagactgagagtgtccgccaccttctggcagaacccccggaaccacttcagatgccaggtgcagttctacggcctgagcgagaacgacgagtggacccaggacagagccaagcccgtgacccagatcgtgtctgccgaagcctggggcagagccgatgatgtgattaagatccactggcaggaaaagaagtccaacaccatcctgggcagccaggaaggcaacaccatgaagaccaacgacacctacatgaagttcagctggctgaccgtgcccgagaagtccctggacaaagaacacagatgcatcgtgcggcacgaaaacaacaagaacggcgtggaccaggaaatcatcttcccacccatcaagaccgatgtgattacaatggaccccaaggacaactgctccaaggacgccaacgataccctgctgctccagctgaccaacaccagcgcctactacatgtacttgttgctgctgctgaagtccgtggtgtacttcgccatcatcacatgctgcctgctgatggctatggtcaagcggaaggacagccggggaagggccaagcgatctggatctggagcaacaaacttctcactactcaaacaagcaggtgacgtggaggagaatcccgggcctactagtatggactggatttggcgcatccttttccttgtcggcgctgctaccggcgcgcattccttcgaagttcaactggttcagagcggagccgaagtgaagaagcctggcgagagcctgaagattagctgcaaaggcagcggctacgacttcaccacctactggatcggctgggtccgacagatgcctggcaaaggactggaatggatgggcatcatctaccccggcgacagcgacaccagatacagccctagcgttagaggccgcgtgaccatcagcgccgacaagtctatcaacaccgcctacctccagtggtccagcctggaagcctctgacaccgccatgtactactgcgccagaatgtggaccttcagccaggatggatggggccagggaacactggtcacagtgtcatctacgcgtatccagaaccctgatcctgccgtgtaccagctgcgggatagcaagagcagcgacaagagcgtgtgtctgttcaccgacttcgacagccagaccaacgtgtcccagagcaaggactccgacgtgtacatcaccgataagtgcgtgctggacatgcggagcatggacttcaagagcaactccgccgtggcctggtccaacaagtccgatttcgcctgcgccaacgccttcaacaacagcattatccccgaggacacattcttcccaagccccgagagcagcgactccaccgaccacgtgaagcccaaagagacagagaacaccaagcagcccagcaagagctgccacaagcccaaggccatcgtgcacaccgagaaagtgaacatgatgagcctgaccgtgctgggcctgcggatgctgttcgccaaaaccgtggccgtgaacttcctgctgaccgccaagctgttcttcctcctcaccgcc

SEQ ID NO: 6344 - DNA, 2586 bp, synthetic construct
  source 1..2586: mol_type = other DNA
atggccttaccagtgaccgccttgctcctgccgctggccttgctgctccacgccgccaggccggaagtgcagctggttgaatctggcggaggactggttcagcctggcggatctctgagactgtcttgtgccgccagcggcttcagcttcagcgacttttggatgagctgggtccgacaggcccctggcaaaggacttgaatgggtcgccacaatcagccaggccggcagcgagaaggactacgtggactctgtgaagggcagattcaccatcagccgggacaacgccaagaagtccctgtacctccagatgaacagcctgagagccgaggacaccgccgtgtactattgtgcctctggcgtgtacagcttcgactacagaggccagggcaccctggtcacagtctcttctggtaccggcggaggcggatctggcggcggaggtagcggtggcggaggatctgaattcgacatcgtgatgacccagagccccgatagcctggccgtgtctctgggagagagagccaccatcaactgcaagagcagccagagcatcctgtacagcagcaaccagaagaactacctggcctggtatcagcagaagcccggccagagccctaagctgctgatctactgggccagcaccagagaaagcggcgtgcccgatagattcagcggcagcggctctggcaccgacttcaccctgaccatcagttctcttcaggccgaggacgtggccgtgtactactgccaccagtacatcagctcctacaccttcggccagggcaccaagctggaaatcaagctcgaggacctgaagaacgtgttcccacctgaggtggccgtgttcgagcctagcgaggccgagatcagccacacccagaaagccaccctcgtgtgcctggctaccggcttctaccccgaccatgtggaactgtcttggtgggtcaacggcaaagaggtgcacagcggcgtgtgtaccgacccccagccactgaaagaacagcccgccctgaacgacagccggtactgcctgagcagcagactgagagtgtccgccaccttctggcagaacccccggaaccacttcagatgccaggtgcagttctacggcctgagcgagaacgacgagtggacccaggacagagccaagcccgtgacccagatcgtgtctgccgaagcctggggcagagccgatgatgtgattaagatccactggcaggaaaagaagtccaacaccatcctgggcagccaggaaggcaacaccatgaagaccaacgacacctacatgaagttcagctggctgaccgtgcccgagaagtccctggacaaagaacacagatgcatcgtgcggcacgaaaacaacaagaacggcgtggaccaggaaatcatcttcccacccatcaagaccgatgtgattacaatggaccccaaggacaactgctccaaggacgccaacgataccctgctgctccagctgaccaacaccagcgcctactacatgtacttgttgctgctgctgaagtccgtggtgtacttcgccatcatcacatgctgcctgctgatggctatggtcaagcggaaggacagccggggaagggccaagcgatctggatctggagcaacaaacttctcactactcaaacaagcaggtgacgtggaggagaatcccgggcctactagtatggactggatttggcgcatccttttccttgtcggcgctgctaccggcgcgcattccttcgaacaggtgcagctggtgcagtctggcgctgaagtgaagaaacctggggccagcgtgaaggtgtcctgcaaggccagcggctacacctttgccagccagtggatgcactggatgagacaggcccctggacagggcctggaatggatcggctggatcaaccccggcaacgtgaacaccaagtacaacgagaagttcaagggcagagccaccctgacagtggacaccagcaccaacaccgcctacatggaactgagcagcctgcggagcgaggacaccgccgtgtattattgcgccagaagcacctggtacagacccctggattattggggccagggaacccttgtgaccgtgtcctctacgcgtatccagaaccctgatcctgccgtgtaccagctgcgggatagcaagagcagcgacaagagcgtgtgtctgttcaccgacttcgacagccagaccaacgtgtcccagagcaaggactccgacgtgtacatcaccgataagtgcgtgctggacatgcggagcatggacttcaagagcaactccgccgtggcctggtccaacaagtccgatttcgcctgcgccaacgccttcaacaacagcattatccccgaggacacattcttcccaagccccgagagcagcgactccaccgaccacgtgaagcccaaagagacagagaacaccaagcagcccagcaagagctgccacaagcccaaggccatcgtgcacaccgagaaagtgaacatgatgagcctgaccgtgctgggcctgcggatgctgttcgccaaaaccgtggccgtgaacttcctgctgaccgccaagctgttcttcctcctcaccgcc

SEQ ID NO: 6345 - DNA, 2586 bp, synthetic construct
  source 1..2586: mol_type = other DNA
atggccttaccagtgaccgccttgctcctgccgctggccttgctgctccacgccgccaggccggaagtgcagctggttgaatctggcggaggactggttcagcctggcggatctctgagactgtcttgtgccgccagcggcttcagcttcagcgacttttggatgagctgggtccgacaggcccctggcaaaggacttgaatgggtcgccacaatcagccaggccggcagcgagaaggactacgtggactctgtgaagggcagattcaccatcagccgggacaacgccaagaagtccctgtacctccagatgaacagcctgagagccgaggacaccgccgtgtactattgtgcctctggcgtgtacagcttcgactacagaggccagggcaccctggtcacagtctcttctggtaccggcggaggcggatctggcggcggaggtagcggtggcggaggatctgaattcgaccacatcgtgctgacccagagccctagcagcctgtctgccagcctgggcgacagagtgaccatcagctgtagagccagccaggacatcagcacctacctgaactggtatcagcagaaacccgacggcaccgtgaagctgctgatcttctacaccagcagactgcacgccggggtgcccagcagattttctggcagcggctctggcacccaccacagcctgaccatctccaacctggaacaggaagatattgctacctacttctgtcagcaaggcaacagcctgcccttcaccttcggcagcggcaccaagctggaaatcaagagactcgaggacctgaagaacgtgttcccacctgaggtggccgtgttcgagcctagcgaggccgagatcagccacacccagaaagccaccctcgtgtgcctggctaccggcttctaccccgaccatgtggaactgtcttggtgggtcaacggcaaagaggtgcacagcggcgtgtgtaccgacccccagccactgaaagaacagcccgccctgaacgacagccggtactgcctgagcagcagactgagagtgtccgccaccttctggcagaacccccggaaccacttcagatgccaggtgcagttctacggcctgagcgagaacgacgagtggacccaggacagagccaagcccgtgacccagatcgtgtctgccgaagcctggggcagagccgatgatgtgattaagatccactggcaggaaaagaagtccaacaccatcctgggcagccaggaaggcaacaccatgaagaccaacgacacctacatgaagttcagctggctgaccgtgcccgagaagtccctggacaaagaacacagatgcatcgtgcggcacgaaaacaacaagaacggcgtggaccaggaaatcatcttcccacccatcaagaccgatgtgattacaatggaccccaaggacaactgctccaaggacgccaacgataccctgctgctccagctgaccaacaccagcgcctactacatgtacttgttgctgctgctgaagtccgtggtgtacttcgccatcatcacatgctgcctgctgatggctatggtcaagcggaaggacagccggggaagggccaagcgatctggatctggagcaacaaacttctcactactcaaacaagcaggtgacgtggaggagaatcccgggcctactagtatggactggatttggcgcatccttttccttgtcggcgctgctaccggcgcgcattccttcgaacaggtgcagctgaaagagagcggccctgagctggaaaagcctggggccagcgtgaagattagctgcaaggccagcggctacagcttcaccgcctacagcatgaactgggtcaagcagaacaacggcatgagcctggaatggatcggcagcatcgacccctactacggcgacaccaaatacgcccagaagttcaagggcaaggccaccctgaccgtggataaggccagcagcaccgcctacctccagctgaagtctctgaccagcgaggacagcgccgtgtactactgcgccagacggatgattaccaccggcgactggtacttcgacgtgtggggagccggaaccaccgtgacagtgtctagcacgcgtatccagaaccctgatcctgccgtgtaccagctgcgggatagcaagagcagcgacaagagcgtgtgtctgttcaccgacttcgacagccagaccaacgtgtcccagagcaaggactccgacgtgtacatcaccgataagtgcgtgctggacatgcggagcatggacttcaagagcaactccgccgtggcctggtccaacaagtccgatttcgcctgcgccaacgccttcaacaacagcattatccccgaggacacattcttcccaagccccgagagcagcgactccaccgaccacgtgaagcccaaagagacagagaacaccaagcagcccagcaagagctgccacaagcccaaggccatcgtgcacaccgagaaagtgaacatgatgagcctgaccgtgctgggcctgcggatgctgttcgccaaaaccgtggccgtgaacttcctgctgaccgccaagctgttcttcctcctcaccgcc

SEQ ID NO: 6346 - DNA, 2586 bp, synthetic construct; identical to SEQ ID NO: 6345
  source 1..2586: mol_type = other DNA

SEQ ID NO: 6347 - DNA, 2586 bp, synthetic construct
  source 1..2586: mol_type = other DNA
atggccttaccagtgaccgccttgctcctgccgctggccttgctgctccacgccgccaggccggaagtgcagctggttgaatctggcggaggactggttcagcctggcggatctctgagactgtcttgtgccgccagcggcttcagcttcagcgacttttggatgagctgggtccgacaggcccctggcaaaggacttgaatgggtcgccacaatcagccaggccggcagcgagaaggactacgtggactctgtgaagggcagattcaccatcagccgggacaacgccaagaagtccctgtacctccagatgaacagcctgagagccgaggacaccgccgtgtactattgtgcctctggcgtgtacagcttcgactacagaggccagggcaccctggtcacagtctcttctggtaccggcggaggcggatctggcggcggaggtagcggtggcggaggatctgaattcgacgagatcgtgctgacacagagccctgccaccctgtctctgagccctggcgaaagagccaccctgagctgtagagccagccagagcgtgtccagctacctggcctggtatcagcagaagcccggccaggctccccggctgctgatctacgatgccagcaatagagccaccggcatccccgccagattttccggctctggcagcggcaccgacttcaccctgaccatcagctccctggaacccgaggacttcgccgtgtactactgccagcagcggagcaactggcccatcacattcggccagggcacccggctggaaatcaaactcgaggacctgaagaacgtgttcccacctgaggtggccgtgttcgagcctagcgaggccgagatcagccacacccagaaagccaccctcgtgtgcctggctaccggcttctaccccgaccatgtggaactgtcttggtgggtcaacggcaaagaggtgcacagcggcgtgtgtaccgacccccagccactgaaagaacagcccgccctgaacgacagccggtactgcctgagcagcagactgagagtgtccgccaccttctggcagaacccccggaaccacttcagatgccaggtgcagttctacggcctgagcgagaacgacgagtggacccaggacagagccaagcccgtgacccagatcgtgtctgccgaagcctggggcagagccgatgatgtgattaagatccactggcaggaaaagaagtccaacaccatcctgggcagccaggaaggcaacaccatgaagaccaacgacacctacatgaagttcagctggctgaccgtgcccgagaagtccctggacaaagaacacagatgcatcgtgcggcacgaaaacaacaagaacggcgtggaccaggaaatcatcttcccacccatcaagaccgatgtgattacaatggaccccaaggacaactgctccaaggacgccaacgataccctgctgctccagctgaccaacaccagcgcctactacatgtacttgttgctgctgctgaagtccgtggtgtacttcgccatcatcacatgctgcctgctgatggctatggtcaagcggaaggacagccggggaagggccaagcgatctggatctggagcaacaaacttctcactactcaaacaagcaggtgacgtggaggagaatcccgggcctactagtatggactggatttggcgcatccttttccttgtcggcgctgctaccggcgcgcattccttcgaagaagtgcagctggtggaatcaggcggcggactggtgcagcctggcagaagcctgagactgagctgtgccgccagcggcttcaccttcaacgactacgccatgcactgggtgcgccaggcccctggaaaaggactggaatgggtgtccacaatcagctggaacagcggcagcatcggctacgccgatagcgtgaagggccggttcaccatcagccgggacaacgccaagaagtccctgtacctccagatgaacagcctgcgggccgaggacacagccctgtactattgcgccaaggacatccagtacggcaactactactacggcatggacgtgtggggccagggaaccaccgtgaccgtgtcatctacgcgtatccagaaccctgatcctgccgtgtaccagctgcgggatagcaagagcagcgacaagagcgtgtgtctgttcaccgacttcgacagccagaccaacgtgtcccagagcaaggactccgacgtgtacatcaccgataagtgcgtgctggacatgcggagcatggacttcaagagcaactccgccgtggcctggtccaacaagtccgatttcgcctgcgccaacgccttcaacaacagcattatccccgaggacacattcttcccaagccccgagagcagcgactccaccgaccacgtgaagcccaaagagacagagaacaccaagcagcccagcaagagctgccacaagcccaaggccatcgtgcacaccgagaaagtgaacatgatgagcctgaccgtgctgggcctgcggatgctgttcgccaaaaccgtggccgtgaacttcctgctgaccgccaagctgttcttcctcctcaccgcc

SEQ ID NO: 6348 - DNA, 2592 bp, synthetic construct
  source 1..2592: mol_type = other DNA
atggccttaccagtgaccgccttgctcctgccgctggccttgctgctccacgccgccaggccggaagtgcagctggttgaatctggcggaggactggttcagcctggcggatctctgagactgtcttgtgccgccagcggcttcagcttcagcgacttttggatgagctgggtccgacaggcccctggcaaaggacttgaatgggtcgccacaatcagccaggccggcagcgagaaggactacgtggactctgtgaagggcagattcaccatcagccgggacaacgccaagaagtccctgtacctccagatgaacagcctgagagccgaggacaccgccgtgtactattgtgcctctggcgtgtacagcttcgactacagaggccagggcaccctggtcacagtctcttctggtaccggcggaggcggatctggcggcggaggtagcggtggcggaggatctgaattcgacatcgtgatgacccagacccccctgagcctgcctgtgacacctggcgagcctgccagcatctcctgcagaagcagcaagagcctgctgcacagcaacggcatcacctacctgtactggtatctgcagaaacccggccagagcccccaactgctgatctaccagatgagcaacctggtgtccggcgtgcccgacagattttctggcagcggctccggcaccgacttcaccctgaagatcagccgggtggaagccgaggacgtgggcgtgtactactgcgcccagaacctggaactgccctacacctttggcggcggaacaaaggtggaaatcaagcggctcgaggacctgaagaacgtgttcccacctgaggtggccgtgttcgagcctagcgaggccgagatcagccacacccagaaagccaccctcgtgtgcctggctaccggcttctaccccgaccatgtggaactgtcttggtgggtcaacggcaaagaggtgcacagcggcgtgtgtaccgacccccagccactgaaagaacagcccgccctgaacgacagccggtactgcctgagcagcagactgagagtgtccgccaccttctggcagaacccccggaaccacttcagatgccaggtgcagttctacggcctgagcgagaacgacgagtggacccaggacagagccaagcccgtgacccagatcgtgtctgccgaagcctggggcagagccgatgatgtgattaagatccactggcaggaaaagaagtccaacaccatcctgggcagccaggaaggcaacaccatgaagaccaacgacacctacatgaagttcagctggctgaccgtgcccgagaagtccctggacaaagaacacagatgcatcgtgcggcacgaaaacaacaagaacggcgtggaccaggaaatcatcttcccacccatcaagaccgatgtgattacaatggaccccaaggacaactgctccaaggacgccaacgataccctgctgctccagctgaccaacaccagcgcctactacatgtacttgttgctgctgctgaagtccgtggtgtacttcgccatcatcacatgctgcctgctgatggctatggtcaagcggaaggacagccggggaagggccaagcgatctggatctggagcaacaaacttctcactactcaaacaagcaggtgacgtggaggagaatcccgggcctactagtatggactggatttggcgcatccttttccttgtcggcgctgctaccggcgcgcattccttcgaacaggtgcaactggtgcagagcggagccgaagtgaaaaagcccggcagcagcgtgaaggtgtcctgcaaggccagcggctacgccttcagctactcctggatcaactgggtgcgccaggcccctggacagggcctggaatggatgggcagaatcttccccggcgacggcgacaccgactacaacggcaagttcaagggcagagtgaccatcaccgccgacaagagcaccagcaccgcctacatggaactgagcagcctgcggagcgaggataccgccgtgtactattgtgccagaaacgtgttcgacggctactggctggtgtactggggccagggaacacttgtgaccgtgtccagcacgcgtatccagaaccctgatcctgccgtgtaccagctgcgggatagcaagagcagcgacaagagcgtgtgtctgttcaccgacttcgacagccagaccaacgtgtcccagagcaaggactccgacgtgtacatcaccgataagtgcgtgctggacatgcggagcatggacttcaagagcaactccgccgtggcctggtccaacaagtccgatttcgcctgcgccaacgccttcaacaacagcattatccccgaggacacattcttcccaagccccgagagcagcgactccaccgaccacgtgaagcccaaagagacagagaacaccaagcagcccagcaagagctgccacaagcccaaggccatcgtgcacaccgagaaagtgaacatgatgagcctgaccgtgctgggcctgcggatgctgttcgccaaaaccgtggccgtgaacttcctgctgaccgccaagctgttcttcctcctcaccgcc

SEQ ID NO: 6349 - DNA, 2595 bp, synthetic construct
  source 1..2595: mol_type = other DNA
atggccttaccagtgaccgccttgctcctgccgctggccttgctgctccacgccgccaggccggaagtgcagctggttgaatctggcggaggactggttcagcctggcggatctctgagactgtcttgtgccgccagcggcttcagcttcagcgacttttggatgagctgggtccgacaggcccctggcaaaggacttgaatgggtcgccacaatcagccaggccggcagcgagaaggactacgtggactctgtgaagggcagattcaccatcagccgggacaacgccaagaagtccctgtacctccagatgaacagcctgagagccgaggacaccgccgtgtactattgtgcctctggcgtgtacagcttcgactacagaggccagggcaccctggtcacagtctcttctggtaccggcggaggcggatctggcggcggaggtagcggtggcggaggatctgaattcgacatccagatgacccagagccccagcagcctgtctgccagcgtgggcgacagagtgaccatcacctgtcggagcagccagagcatcgtgcactccgtgggcaacaccttcctggaatggtatcagcagaagcccggcaaggcccccaagctgctgatctacaaggtgtccaacagattcagcggcgtgcccagcaggtttagcggctctggcagcggcaccgacttcaccctgaccatctctagcctccagcccgaggacttcgccacctactactgttttcaaggcagccagttcccctacaccttcggccagggaacaaaggtggaaatcaagcggctcgaggacctgaagaacgtgttcccacctgaggtggccgtgttcgagcctagcgaggccgagatcagccacacccagaaagccaccctcgtgtgcctggctaccggcttctaccccgaccatgtggaactgtcttggtgggtcaacggcaaagaggtgcacagcggcgtgtgtaccgacccccagccactgaaagaacagcccgccctgaacgacagccggtactgcctgagcagcagactgagagtgtccgccaccttctggcagaacccccggaaccacttcagatgccaggtgcagttctacggcctgagcgagaacgacgagtggacccaggacagagccaagcccgtgacccagatcgtgtctgccgaagcctggggcagagccgatgatgtgattaagatccactggcaggaaaagaagtccaacaccatcctgggcagccaggaaggcaacaccatgaagaccaacgacacctacatgaagttcagctggctgaccgtgcccgagaagtccctggacaaagaacacagatgcatcgtgcggcacgaaaacaacaagaacggcgtggaccaggaaatcatcttcccacccatcaagaccgatgtgattacaatggaccccaaggacaactgctccaaggacgccaacgataccctgctgctccagctgaccaacaccagcgcctactacatgtacttgttgctgctgctgaagtccgtggtgtacttcgccatcatcacatgctgcctgctgatggctatggtcaagcggaaggacagccggggaagggccaagcgatctggatctggagcaacaaacttctcactactcaaacaagcaggtgacgtggaggagaatcccgggcctactagtatggactggatttggcgcatccttttccttgtcggcgctgctaccggcgcgcattccttcgaagaagtgcaactggtggaaagcggaggcggcctggtgcagcctggcggatctctgagactgagctgtgccgccagcggctacgagttcagccggtcctggatgaactgggtgcgccaggcccctggcaagggactggaatgggtgggaagaatctaccccggcgacggcgacaccaactacagcggcaagttcaagggccggttcaccatcagcgccgacaccagcaagaacaccgcctacctccagatgaacagcctgcgggccgaggataccgccgtgtactactgtgccagagatggcagctcctgggactggtacttcgacgtgtggggacagggaacccttgtgaccgtgtccagcacgcgtatccagaaccctgatcctgccgtgtaccagctgcgggatagcaagagcagcgacaagagcgtgtgtctgttcaccgacttcgacagccagaccaacgtgtcccagagcaaggactccgacgtgtacatcaccgataagtgcgtgctggacatgcggagcatggacttcaagagcaactccgccgtggcctggtccaacaagtccgatttcgcctgcgccaacgccttcaacaacagcattatccccgaggacacattcttcccaagccccgagagcagcgactccaccgaccacgtgaagcccaaagagacagagaacaccaagcagcccagcaagagctgccacaagcccaaggccatcgtgcacaccgagaaagtgaacatgatgagcctgaccgtgctgggcctgcggatgctgttcgccaaaaccgtggccgtgaacttcctgctgaccgccaagctgttcttcctcctcaccgcc

SEQ ID NO: 6350 - DNA, 2589 bp, synthetic construct
  source 1..2589: mol_type = other DNA
atggccttaccagtgaccgccttgctcctgccgctggccttgctgctccacgccgccaggccggaagtgcagctggttgaatctggcggaggactggttcagcctggcggatctctgagactgtcttgtgccgccagcggcttcagcttcagcgacttttggatgagctgggtccgacaggcccctggcaaaggacttgaatgggtcgccacaatcagccaggccggcagcgagaaggactacgtggactctgtgaagggcagattcaccatcagccgggacaacgccaagaagtccctgtacctccagatgaacagcctgagagccgaggacaccgccgtgtactattgtgcctctggcgtgtacagcttcgactacagaggccagggcaccctggtcacagtctcttctggtaccggcggaggcggatctggcggcggaggtagcggtggcggaggatctgaattcgacatccagatgacccagagccccagcagcctgtctgccagcgtgggcgacagagtgaccatcacctgtagagccagccagaccatctggtcctacctgaactggtatcagcagaggcccggcaaggcccccaacctgctgatctatgccgccagctctctccagagcggcgtgcccagcagattttccggcagaggcagcggcaccgacttcaccctgaccatcagttccttgcaggccgaggacttcgccacctactactgccagcagagctacagcatcccccagattttcggccagggcaccaagctggaaatcaagctcgaggacctgaagaacgtgttcccacctgaggtggccgtgttcgagcctagcgaggccgagatcagccacacccagaaagccaccctcgtgtgcctggctaccggcttctaccccgaccatgtggaactgtcttggtgggtcaacggcaaagaggtgcacagcggcgtgtgtaccgacccccagccactgaaagaacagcccgccctgaacgacagccggtactgcctgagcagcagactgagagtgtccgccaccttctggcagaacccccggaaccacttcagatgccaggtgcagttctacggcctgagcgagaacgacgagtggacccaggacagagccaagcccgtgacccagatcgtgtctgccgaagcctggggcagagccgatgatgtgattaagatccactggcaggaaaagaagtccaacaccatcctgggcagccaggaaggcaacaccatgaagaccaacgacacctacatgaagttcagctggctgaccgtgcccgagaagtccctggacaaagaacacagatgcatcgtgcggcacgaaaacaacaagaacggcgtggaccaggaaatcatcttcccacccatcaagaccgatgtgattacaatggaccccaaggacaactgctccaaggacgccaacgataccctgctgctccagctgaccaacaccagcgcctactacatgtacttgttgctgctgctgaagtccgtggtgtacttcgccatcatcacatgctgcctgctgatggctatggtcaagcggaaggacagccggggaagggccaagcgatctggatctggagcaacaaacttctcactactcaaacaagcaggtgacgtggaggagaatcccgggcctactagtatggactggatttggcgcatccttttccttgtcggcgctgctaccggcgcgcattccttcgaacaggtgcagctccagcagtctggacccggcctcgtgaagcctagccagacactgagcctgacctgcgccatcagcggcgatagcgtgtccagcaatagcgccgcctggaactggatcagacagtccccctctcggggcctggaatggctgggccggacctactaccgcagcaagtggtacaacgactacgccgtgtccgtgaagtcccggatcaccatcaaccccgacaccagcaagaaccagttctccttgcaactgaacagcgtgacccccgaggacaccgccgtgtactactgcgccagagaagtgaccggcgacctggaagatgccttcgacatctggggccagggaacaatggtcacagtgtccagcacgcgtatccagaaccctgatcctgccgtgtaccagctgcgggatagcaagagcagcgacaagagcgtgtgtctgttcaccgacttcgacagccagaccaacgtgtcccagagcaaggactccgacgtgtacatcaccgataagtgcgtgctggacatgcggagcatggacttcaagagcaactccgccgtggcctggtccaacaagtccgatttcgcctgcgccaacgccttcaacaacagcattatccccgaggacacattcttcccaagccccgagagcagcgactccaccgaccacgtgaagcccaaagagacagagaacaccaagcagcccagcaagagctgccacaagcccaaggccatcgtgcacaccgagaaagtgaacatgatgagcctgaccgtgctgggcctgcggatgctgttcgccaaaaccgtggccgtgaacttcctgctgaccgccaagctgttcttcctcctcaccgcc

SEQ ID NO: 6351 - DNA, 2568 bp, synthetic construct
  source 1..2568: mol_type = other DNA
atggccttaccagtgaccgccttgctcctgccgctggccttgctgctccacgccgccaggccggaagtgcagctggttgaatctggcggaggactggttcagcctggcggatctctgagactgtcttgtgccgccagcggcttcagcttcagcgacttttggatgagctgggtccgacaggcccctggcaaaggacttgaatgggtcgccacaatcagccaggccggcagcgagaaggactacgtggactctgtgaagggcagattcaccatcagccgggacaacgccaagaagtccctgtacctccagatgaacagcctgagagccgaggacaccgccgtgtactattgtgcctctggcgtgtacagcttcgactacagaggccagggcaccctggtcacagtctcttctggtaccggcggaggcggatctggcggcggaggtagcggtggcggaggatctgaattcgacatccagatgacccagagccccgccaccatcgagaacacaagcctgtctgccagcgtgggcgacagagtgaccatcacctgtagagccagccagggcatcagctcttggctgacctggtatcagcagaagcccgagaaggcccccaagagcctgatctacgccgccagctctctgcagtctggcgtgcccagcagattttccggcagcggctctggcaccgacttcaccctgacaatcagcagcctgcagcccgaggacttcgccacctactactgccagcagtacgacagctaccccatcaccttcggccagggcacccggctggaaatcaagctcgaggacctgaagaacgtgttcccacctgaggtggccgtgttcgagcctagcgaggccgagatcagccacacccagaaagccaccctcgtgtgcctggctaccggcttctaccccgaccatgtggaactgtcttggtgggtcaacggcaaagaggtgcacagcggcgtgtgtaccgacccccagccactgaaagaacagcccgccctgaacgacagccggtactgcctgagcagcagactgagagtgtccgccaccttctggcagaacccccggaaccacttcagatgccaggtgcagttctacggcctgagcgagaacgacgagtggacccaggacagagccaagcccgtgacccagatcgtgtctgccgaagcctggggcagagccgatgatgtgattaagatccactggcaggaaaagaagtccaacaccatcctgggcagccaggaaggcaacaccatgaagaccaacgacacctacatgaagttcagctggctgaccgtgcccgagaagtccctggacaaagaacacagatgcatcgtgcggcacgaaaacaacaagaacggcgtggaccaggaaatcatcttcccacccatcaagaccgatgtgattacaatggaccccaaggacaactgctccaaggacgccaacgataccctgctgctccagctgaccaacaccagcgcctactacatgtacttgttgctgctgctgaagtccgtggtgtacttcgccatcatcacatgctgcctgctgatggctatggtcaagcggaaggacagccggggaagggccaagcgatctggatctggagcaacaaacttctcactactcaaacaagcaggtgacgtggaggagaatcccgggcctactagtatggactggatttggcgcatccttttccttgtcggcgctgctaccggcgcgcattccttcgaacaggtgcaactgcagcagtggggagccggactgctgaagcctagcgagacactgagcctgacctgcgccgtgtacggcggcagcttcagcgcctactattggagctggatcagacagccccctggcaagggcctggaatggatcggcgacatcaatcacggcggaggcaccaactacaaccccagcctgaagtcccgcgtgaccatctccgtggacaccagcaagaaccagttctccctgaagctgaacagcgtgacagccgccgacacagccgtgtactactgtgccagcctgaccgcctattggggccagggatctcttgtgaccgtgtccagcacgcgtatccagaaccctgatcctgccgtgtaccagctgcgggatagcaagagcagcgacaagagcgtgtgtctgttcaccgacttcgacagccagaccaacgtgtcccagagcaaggactccgacgtgtacatcaccgataagtgcgtgctggacatgcggagcatggacttcaagagcaactccgccgtggcctggtccaacaagtccgatttcgcctgcgccaacgccttcaacaacagcattatccccgaggacacattcttcccaagccccgagagcagcgactccaccgaccacgtgaagcccaaagagacagagaacaccaagcagcccagcaagagctgccacaagcccaaggccatcgtgcacaccgagaaagtgaacatgatgagcctgaccgtgctgggcctgcggatgctgttcgccaaaaccgtggccgtgaacttcctgctgaccgccaagctgttcttcctcctcaccgcc

SEQ ID NO: 6352 - DNA, 2583 bp, synthetic construct
  source 1..2583: mol_type = other DNA
atggccttaccagtgaccgccttgctcctgccgctggccttgctgctccacgccgccaggccggaagtgcagctggttgaatctggcggaggactggttcagcctggcggatctctgagactgtcttgtgccgccagcggcttcagcttcagcgacttttggatgagctgggtccgacaggcccctggcaaaggacttgaatgggtcgccacaatcagccaggccggcagcgagaaggactacgtggactctgtgaagggcagattcaccatcagccgggacaacgccaagaagtccctgtacctccagatgaacagcctgagagccgaggacaccgccgtgtactattgtgcctctggcgtgtacagcttcgactacagaggccagggcaccctggtcacagtctcttctggtaccggcggaggcggatctggcggcggaggtagcggtggcggaggatctgaattcgacgagatcgtgctgacccagagccctgatagcctggccgtgtctctgggcgagagagccaccatcaactgcaaggccagccagagcgtggacttcgacggcgacagctacctgaactggtatcagcagaagcccggccagccccccaaggtgctgatctatgccgccagcacactgcagagcggcgtgcccagcagattttctggcagcggctccggcaccgacttcaccctgaccatcaacagcctggaagccgaggacgccgccacctactactgccagcagagcaacgaggacccctggacctttggcggcggaacaaaggtggaaatcaagctcgaggacctgaagaacgtgttcccacctgaggtggccgtgttcgagcctagcgaggccgagatcagccacacccagaaagccaccctcgtgtgcctggctaccggcttctaccccgaccatgtggaactgtcttggtgggtcaacggcaaagaggtgcacagcggcgtgtgtaccgacccccagccactgaaagaacagcccgccctgaacgacagccggtactgcctgagcagcagactgagagtgtccgccaccttctggcagaacccccggaaccacttcagatgccaggtgcagttctacggcctgagcgagaacgacgagtggacccaggacagagccaagcccgtgacccagatcgtgtctgccgaagcctggggcagagccgatgatgtgattaagatccactggcaggaaaagaagtccaacaccatcctgggcagccaggaaggcaacaccatgaagaccaacgacacctacatgaagttcagctggctgaccgtgcccgagaagtccctggacaaagaacacagatgcatcgtgcggcacgaaaacaacaagaacggcgtggaccaggaaatcatcttcccacccatcaagaccgatgtgattacaatggaccccaaggacaactgctccaaggacgccaacgataccctgctgctccagctgaccaacaccagcgcctactacatgtacttgttgctgctgctgaagtccgtggtgtacttcgccatcatcacatgctgcctgctgatggctatggtcaagcggaaggacagccggggaagggccaagcgatctggatctggagcaacaaacttctcactactcaaacaagcaggtgacgtggaggagaatcccgggcctactagtatggactggatttggcgcatccttttccttgtcggcgctgctaccggcgcgcattccttcgaacaggtgcaactggtgcagtccggcgctgaagtgaagaaacctggggccagcgtgaaggtgtcctgcaaggtgtccggctacacctttaccgactactacattacctgggtgcgccaggcccctggacaggccctggaatggatgggctggatctaccccggcagcggcaacaccaagtacagccagaagttccagggcagattcgtgttcagcgtggacaccagcgccagcaccgcctacctgcaactgtctagcctgaaggccgaagataccgccgtgtactactgcgccaactacggcaactattggttcgcctattggggccagggaacccttgtgaccgtgtcctctacgcgtatccagaaccctgatcctgccgtgtaccagctgcgggatagcaagagcagcgacaagagcgtgtgtctgttcaccgacttcgacagccagaccaacgtgtcccagagcaaggactccgacgtgtacatcaccgataagtgcgtgctggacatgcggagcatggacttcaagagcaactccgccgtggcctggtccaacaagtccgatttcgcctgcgccaacgccttcaacaacagcattatccccgaggacacattcttcccaagccccgagagcagcgactccaccgaccacgtgaagcccaaagagacagagaacaccaagcagcccagcaagagctgccacaagcccaaggccatcgtgcacaccgagaaagtgaacatgatgagcctgaccgtgctgggcctgcggatgctgttcgccaaaaccgtggccgtgaacttcctgctgaccgccaagctgttcttcctcctcaccgcc

SEQ ID NO: 6353 - DNA, 2574 bp, synthetic construct
  source 1..2574: mol_type = other DNA
atggccttaccagtgaccgccttgctcctgccgctggccttgctgctccacgccgccaggccggaagtgcagctggttgaatctggcggaggactggttcagcctggcggatctctgagactgtcttgtgccgccagcggcttcagcttcagcgacttttggatgagctgggtccgacaggcccctggcaaaggacttgaatgggtcgccacaatcagccaggccggcagcgagaaggactacgtggactctgtgaagggcagattcaccatcagccgggacaacgccaagaagtccctgtacctccagatgaacagcctgagagccgaggacaccgccgtgtactattgtgcctctggcgtgtacagcttcgactacagaggccagggcaccctggtcacagtctcttctggtaccggcggaggcggatctggcggcggaggtagcggtggcggaggatctgaattcgacatccagatgacccagagccccagcagcctgtctgccagcgtgggcgacagagtgaccatcacctgtagagccagccagggcatcagctcttggctggcctggtatcagcagaagcccgagaaggcccccaagagcctgatctacgccgcctctagtctccagagcggcgtgcccagcagattttctggcagcggctccggcaccgacttcaccctgacaatcagctccctccagcccgaggacttcgccacctactactgccagcagtacaacagctaccctcccacctttggcggaggcaccaaggtggaaatcaagctcgaggacctgaagaacgtgttcccacctgaggtggccgtgttcgagcctagcgaggccgagatcagccacacccagaaagccaccctcgtgtgcctggctaccggcttctaccccgaccatgtggaactgtcttggtgggtcaacggcaaagaggtgcacagcggcgtgtgtaccgacccccagccactgaaagaacagcccgccctgaacgacagccggtactgcctgagcagcagactgagagtgtccgccaccttctggcagaacccccggaaccacttcagatgccaggtgcagttctacggcctgagcgagaacgacgagtggacccaggacagagccaagcccgtgacccagatcgtgtctgccgaagcctggggcagagccgatgatgtgattaagatccactggcaggaaaagaagtccaacaccatcctgggcagccaggaaggcaacaccatgaagaccaacgacacctacatgaagttcagctggctgaccgtgcccgagaagtccctggacaaagaacacagatgcatcgtgcggcacgaaaacaacaagaacggcgtggaccaggaaatcatcttcccacccatcaagaccgatgtgattacaatggaccccaaggacaactgctccaaggacgccaacgataccctgctgctccagctgaccaacaccagcgcctactacatgtacttgttgctgctgctgaagtccgtggtgtacttcgccatcatcacatgctgcctgctgatggctatggtcaagcggaaggacagccggggaagggccaagcgatctggatctggagcaacaaacttctcactactcaaacaagcaggtgacgtggaggagaatcccgggcctactagtatggactggatttggcgcatccttttccttgtcggcgctgctaccggcgcgcattccttcgaagaagtgcaactggtgcagtctggcggagggctggtgcatcctgggggaagcctgagactgagctgtgccggctctggcttcgccttcagcagcagcaccatgcactggatcagacaggcccctggcaagggcctggaatggatcagcctgatcggaagcggagggggcatctactacggcgacagcgtgaagggccggttcaccatcagccgggacaacgccaagaacagcctgtacctccagatgaactccctgcgggccgaggacatggccgtgtactattgtgtgcggggctacttcgactgggtggactacttcgattactggggccagggcaccctcgtgaccgtgtcatctacgcgtatccagaaccctgatcctgccgtgtaccagctgcgggatagcaagagcagcgacaagagcgtgtgtctgttcaccgacttcgacagccagaccaacgtgtcccagagcaaggactccgacgtgtacatcaccgataagtgcgtgctggacatgcggagcatggacttcaagagcaactccgccgtggcctggtccaacaagtccgatttcgcctgcgccaacgccttcaacaacagcattatccccgaggacacattcttcccaagccccgagagcagcgactccaccgaccacgtgaagcccaaagagacagagaacaccaagcagcccagcaagagctgccacaagcccaaggccatcgtgcacaccgagaaagtgaacatgatgagcctgaccgtgctgggcctgcggatgctgttcgccaaaaccgtggccgtgaacttcctgctgaccgccaagctgttcttcctcctcaccgcc

SEQ ID NO: 6354 - DNA, 2604 bp, synthetic construct
  source 1..2604: mol_type = other DNA
atggccttaccagtgaccgccttgctcctgccgctggccttgctgctccacgccgccaggccggaagtgcagctggttgaatctggcggaggactggttcagcctggcggatctctgagactgtcttgtgccgccagcggcttcagcttcagcgacttttggatgagctgggtccgacaggcccctggcaaaggacttgaatgggtcgccacaatcagccaggccggcagcgagaaggactacgtggactctgtgaagggcagattcaccatcagccgggacaacgccaagaagtccctgtacctccagatgaacagcctgagagccgaggacaccgccgtgtactattgtgcctctggcgtgtacagcttcgactacagaggccagggcaccctggtcacagtctcttctggtaccggcggaggcggatctggcggcggaggtagcggtggcggaggatctgaattcgacgacatcgtgatgacacagtcaccagatagcctcaccgtctccctgggggagcggaccaccattaattgtaaatccagccaaagcgtgctggactcaagcaagaacaagaatagcctcgcctggtatcagcagaagcccggtcagcctccaaagctgctgctttcttgggcctccaccagagagtccgggattcctgataggtttagtggttcaggctccggcacagattttactctgaccattgattctctccagccagaggattctgcaacttattactgccagcaaagcgcccactttcctataacttttggccagggaacccgacttgaaatcaagctcgaggacctgaagaacgtgttcccacctgaggtggccgtgttcgagcctagcgaggccgagatcagccacacccagaaagccaccctcgtgtgcctggctaccggcttctaccccgaccatgtggaactgtcttggtgggtcaacggcaaagaggtgcacagcggcgtgtgtaccgacccccagccactgaaagaacagcccgccctgaacgacagccggtactgcctgagcagcagactgagagtgtccgccaccttctggcagaacccccggaaccacttcagatgccaggtgcagttctacggcctgagcgagaacgacgagtggacccaggacagagccaagcccgtgacccagatcgtgtctgccgaagcctggggcagagccgatgatgtgattaagatccactggcaggaaaagaagtccaacaccatcctgggcagccaggaaggcaacaccatgaagaccaacgacacctacatgaagttcagctggctgaccgtgcccgagaagtccctggacaaagaacacagatgcatcgtgcggcacgaaaacaacaagaacggcgtggaccaggaaatcatcttcccacccatcaagaccgatgtgattacaatggaccccaaggacaactgctccaaggacgccaacgataccctgctgctccagctgaccaacaccagcgcctactacatgtacttgttgctgctgctgaagtccgtggtgtacttcgccatcatcacatgctgcctgctgatggctatggtcaagcggaaggacagccggggaagggccaagcgatctggatctggagcaacaaacttctcactactcaaacaagcaggtgacgtggaggagaatcccgggcctactagtatggactggatttggcgcatccttttccttgtcggcgctgctaccggcgcgcattccttcgaacaggtgcagctggtgcagagcggtgccgaagtgaagaaaccaggtgcatccgttaaagtttcatgtaaggctagtggatataccttcaccaattacggaatgaactgggtgaaacaggcccctggccagggactgaagtggatggggtggattaacacctacaccggggagccgacttatgcagacgactttaaggggcgggtcacgatgacctccgacacctccaccagtaccgcctacctggagctgcacaaccttaggtcagacgataccgccgtgtattactgtgcccgatggtcttggtccgacggatactatgtctacttcgactattggggccaggggaccacagttaccgtgtcctctacgcgtatccagaaccctgatcctgccgtgtaccagctgcgggatagcaagagcagcgacaagagcgtgtgtctgttcaccgacttcgacagccagaccaacgtgtcccagagcaaggactccgacgtgtacatcaccgataagtgcgtgctggacatgcggagcatggacttcaagagcaactccgccgtggcctggtccaacaagtccgatttcgcctgcgccaacgccttcaacaacagcattatccccgaggacacattcttcccaagccccgagagcagcgactccaccgaccacgtgaagcccaaagagacagagaacaccaagcagcccagcaagagctgccacaagcccaaggccatcgtgcacaccgagaaagtgaacatgatgagcctgaccgtgctgggcctgcggatgctgttcgccaaaaccgtggccgtgaacttcctgctgaccgccaagctgttcttcctcctcaccgcc

SEQ ID NO: 6355 - DNA, 2592 bp, synthetic construct
  source 1..2592: mol_type = other DNA
atggccttaccagtgaccgccttgctcctgccgctggccttgctgctccacgccgccaggccggaagtgcagctggttgaatctggcggaggactggttcagcctggcggatctctgagactgtcttgtgccgccagcggcttcagcttcagcgacttttggatgagctgggtccgacaggcccctggcaaaggacttgaatgggtcgccacaatcagccaggccggcagcgagaaggactacgtggactctgtgaagggcagattcaccatcagccgggacaacgccaagaagtccctgtacctccagatgaacagcctgagagccgaggacaccgccgtgtactattgtgcctctggcgtgtacagcttcgactacagaggccagggcaccctggtcacagtctcttctggtaccggcggaggcggatctggcggcggaggtagcggtggcggaggatctgaattcgacgagatcgtgctgacacagagccctggaagcctggccgtgtctcctggcgagcgcgtgacaatgagctgcaagagcagccagagcgtgttcttcagcagctcccagaagaactacctggcctggtatcagcagatccccggccagagccccagactgctgatctactgggccagcaccagagaaagcggcgtgcccgatagattcaccggcagcggctctggcaccgacttcaccctgacaatcagcagcgtgcagcccgaggacctggctatctactactgccaccagtacctgagcagccggaccttcggccagggcaccaagctggaaatcaagagactcgaggacctgaagaacgtgttcccacctgaggtggccgtgttcgagcctagcgaggccgagatcagccacacccagaaagccaccctcgtgtgcctggctaccggcttctaccccgaccatgtggaactgtcttggtgggtcaacggcaaagaggtgcacagcggcgtgtgtaccgacccccagccactgaaagaacagcccgccctgaacgacagccggtactgcctgagcagcagactgagagtgtccgccaccttctggcagaacccccggaaccacttcagatgccaggtgcagttctacggcctgagcgagaacgacgagtggacccaggacagagccaagcccgtgacccagatcgtgtctgccgaagcctggggcagagccgatgatgtgattaagatccactggcaggaaaagaagtccaacaccatcctgggcagccaggaaggcaacaccatgaagaccaacgacacctacatgaagttcagctggctgaccgtgcccgagaagtccctggacaaagaacacagatgcatcgtgcggcacgaaaacaacaagaacggcgtggaccaggaaatcatcttcccacccatcaagaccgatgtgattacaatggaccccaaggacaactgctccaaggacgccaacgataccctgctgctccagctgaccaacaccagcgcctactacatgtacttgttgctgctgctgaagtccgtggtgtacttcgccatcatcacatgctgcctgctgatggctatggtcaagcggaaggacagccggggaagggccaagcgatctggatctggagcaacaaacttctcactactcaaacaagcaggtgacgtggaggagaatcccgggcctactagtatggactggatttggcgcatccttttccttgtcggcgctgctaccggcgcgcattccttcgaacaggtgcaactgcagcagcctggcgctgaggtcgtgaagccaggcgcttccgtgaagatgtcctgcaaggccagcggctacaccttcaccagctactacatccactggatcaagcagacccctggacagggcctggaatgggtgggagtgatctaccccggcaacgacgacatcagctacaaccagaagttccagggcaaggccaccctgaccgccgacaagtctagcaccaccgcctacatgcaactgtccagcctgaccagcgaggacagcgccgtgtactactgcgccagagaagtgcggctgcggtacttcgatgtgtggggccagggaaccaccgtgaccgtgtcatctacgcgtatccagaaccctgatcctgccgtgtaccagctgcgggatagcaagagcagcgacaagagcgtgtgtctgttcaccgacttcgacagccagaccaacgtgtcccagagcaaggactccgacgtgtacatcaccgataagtgcgtgctggacatgcggagcatggacttcaagagcaactccgccgtggcctggtccaacaagtccgatttcgcctgcgccaacgccttcaacaacagcattatccccgaggacacattcttcccaagccccgagagcagcgactccaccgaccacgtgaagcccaaagagacagagaacaccaagcagcccagcaagagctgccacaagcccaaggccatcgtgcacaccgagaaagtgaacatgatgagcctgaccgtgctgggcctgcggatgctgttcgccaaaaccgtggccgtgaacttcctgctgaccgccaagctgttcttcctcctcaccgcc

SEQ ID NO: 6356 - DNA, 2604 bp, synthetic construct
  source 1..2604: mol_type = other DNA
atggccttaccagtgaccgccttgctcctgccgctggccttgctgctccacgccgccaggccggaagtgcagctggttgaatctggcggaggactggttcagcctggcggatctctgagactgtcttgtgccgccagcggcttcagcttcagcgacttttggatgagctgggtccgacaggcccctggcaaaggacttgaatgggtcgccacaatcagccaggccggcagcgagaaggactacgtggactctgtgaagggcagattcaccatcagccgggacaacgccaagaagtccctgtacctccagatgaacagcctgagagccgaggacaccgccgtgtactattgtgcctctggcgtgtacagcttcgactacagaggccagggcaccctggtcacagtctcttctggtaccggcggaggcggatctggcggcggaggtagcggtggcggaggatctgaattcgatgtgctgctgacccagagccctctgagcctgcctgtgacactgggacagcctgccagcatctcctgtcggagcagccagaccatcgtgcacagcaacggcaacacctacctggaatggttccagcagcggccaggccagagccccagactgctgatctaccaggtgtccaacagattcagcggcgtgcccgacagattctccggcagcggctctggcaccgacttcaccctgaagatcagccgggtggaagccgaggacgtgggcgtgtactactgttttcaaggcagccacgtgccccggacctttggcggaggaacaaaggtggaaatcaagagagccctcgaggacctgaagaacgtgttcccacctgaggtggccgtgttcgagcctagcgaggccgagatcagccacacccagaaagccaccctcgtgtgcctggctaccggcttctaccccgaccatgtggaactgtcttggtgggtcaacggcaaagaggtgcacagcggcgtgtgtaccgacccccagccactgaaagaacagcccgccctgaacgacagccggtactgcctgagcagcagactgagagtgtccgccaccttctggcagaacccccggaaccacttcagatgccaggtgcagttctacggcctgagcgagaacgacgagtggacccaggacagagccaagcccgtgacccagatcgtgtctgccgaagcctggggcagagccgatgatgtgattaagatccactggcaggaaaagaagtccaacaccatcctgggcagccaggaaggcaacaccatgaagaccaacgacacctacatgaagttcagctggctgaccgtgcccgagaagtccctggacaaagaacacagatgcatcgtgcggcacgaaaacaacaagaacggcgtggaccaggaaatcatcttcccacccatcaagaccgatgtgattacaatggaccccaaggacaactgctccaaggacgccaacgataccctgctgctccagctgaccaacaccagcgcctactacatgtacttgttgctgctgctgaagtccgtggtgtacttcgccatcatcacatgctgcctgctgatggctatggtcaagcggaaggacagccggggaagggccaagcgatctggatctggagcaacaaacttctcactactcaaacaagcaggtgacgtggaggagaatcccgggcctactagtatggactggatttggcgcatccttttccttgtcggcgctgctaccggcgcgcattccttcgaacagatccaactggtgcagagcggcagcgagctgaagaaacctggggccagcgtgaaggtgtcctgcaaggccagcggctacacctttaccaactacggcatgaactgggtgcgccaggcccctggacagggcctgaaatggatgggctggatcaacaccaacaccggcgagcctaagtacgccgaagagttcaagggcagattcgccctgagcctggacaccagcgtgtccacagcctacctccagatcaacagcctgaaggccgaggataccgccgtgtacttctgcgccagaggctacggcaactacgccagaggggcttggctggcctattggggccagggaacactcgtgaccgtgtcctctacgcgtatccagaaccctgatcctgccgtgtaccagctgcgggatagcaagagcagcgacaagagcgtgtgtctgttcaccgacttcgacagccagaccaacgtgtcccagagcaaggactccgacgtgtacatcaccgataagtgcgtgctggacatgcggagcatggacttcaagagcaactccgccgtggcctggtccaacaagtccgatttcgcctgcgccaacgccttcaacaacagcattatccccgaggacacattcttcccaagccccgagagcagcgactccaccgaccacgtgaagcccaaagagacagagaacaccaagcagcccagcaagagctgccacaagcccaaggccatcgtgcacaccgagaaagtgaacatgatgagcctgaccgtgctgggcctgcggatgctgttcgccaaaaccgtggccgtgaacttcctgctgaccgccaagctgttcttcctcctcaccgcc

SEQ ID NO: 6357 - DNA, 2559 bp, synthetic construct
  source 1..2559: mol_type = other DNA
atggccttaccagtgaccgccttgctcctgccgctggccttgctgctccacgccgccaggccggaagtgcagctggttgaatctggcggaggactggttcagcctggcggatctctgagactgtcttgtgccgccagcggcttcagcttcagcgacttttggatgagctgggtccgacaggcccctggcaaaggacttgaatgggtcgccacaatcagccaggccggcagcgagaaggactacgtggactctgtgaagggcagattcaccatcagccgggacaacgccaagaagtccctgtacctccagatgaacagcctgagagccgaggacaccgccgtgtactattgtgcctctggcgtgtacagcttcgactacagaggccagggcaccctggtcacagtctcttctggtaccggcggaggcggatctggcggcggaggtagcggtggcggaggatctgaattcgacgagatcgtgctgacacagagccctgccacactctctctgagccctggcgaaagagccaccctgagctgtagcgccagcagcagcatcaactacatctactggctccagcagaagcccggccaggcccccagaatcctgatctacctgaccagcaacctggcctccggcgtgccagccagattttctggcagcggctccggcaccgacttcaccctgacaatcagcagcctggaacccgaggacttcgccgtgtactactgcctccagtggtccagcaaccccctgacctttggcggaggcaccaaggtggaaatcaagctcgaggacctgaagaacgtgttcccacctgaggtggccgtgttcgagcctagcgaggccgagatcagccacacccagaaagccaccctcgtgtgcctggctaccggcttctaccccgaccatgtggaactgtcttggtgggtcaacggcaaagaggtgcacagcggcgtgtgtaccgacccccagccactgaaagaacagcccgccctgaacgacagccggtactgcctgagcagcagactgagagtgtccgccaccttctggcagaacccccggaaccacttcagatgccaggtgcagttctacggcctgagcgagaacgacgagtggacccaggacagagccaagcccgtgacccagatcgtgtctgccgaagcctggggcagagccgatgatgtgattaagatccactggcaggaaaagaagtccaacaccatcctgggcagccaggaaggcaacaccatgaagaccaacgacacctacatgaagttcagctggctgaccgtgcccgagaagtccctggacaaagaacacagatgcatcgtgcggcacgaaaacaacaagaacggcgtggaccaggaaatcatcttcccacccatcaagaccgatgtgattacaatggaccccaaggacaactgctccaaggacgccaacgataccctgctgctccagctgaccaacaccagcgcctactacatgtacttgttgctgctgctgaagtccgtggtgtacttcgccatcatcacatgctgcctgctgatggctatggtcaagcggaaggacagccggggaagggccaagcgatctggatctggagcaacaaacttctcactactcaaacaagcaggtgacgtggaggagaatcccgggcctactagtatggactggatttggcgcatccttttccttgtcggcgctgctaccggcgcgcattccttcgaagaagtgcaactggtggaaagcgggggaggacttgtgaagcctggcggctctctgagactgagctgtgccgcctctggcttcaccttcagcagctacgacatgagctgggtgcgccaggctcctggcaagggactggaatgggtgtccaccatcagcagcggcggcagctacacctactacctggacagcatcaagggccggttcaccatctccagagacaacgccaagaacagcctgtacctccagatgaactccctgcgggccgaggacacagccgtgtattattgcgccagacagggcctggattactggggcagaggcacccttgtgaccgtgtcctctacgcgtatccagaaccctgatcctgccgtgtaccagctgcgggatagcaagagcagcgacaagagcgtgtgtctgttcaccgacttcgacagccagaccaacgtgtcccagagcaaggactccgacgtgtacatcaccgataagtgcgtgctggacatgcggagcatggacttcaagagcaactccgccgtggcctggtccaacaagtccgatttcgcctgcgccaacgccttcaacaacagcattatccccgaggacacattcttcccaagccccgagagcagcgactccaccgaccacgtgaagcccaaagagacagagaacaccaagcagcccagcaagagctgccacaagcccaaggccatcgtgcacaccgagaaagtgaacatgatgagcctgaccgtgctgggcctgcggatgctgttcgccaaaaccgtggccgtgaacttcctgctgaccgccaagctgttcttcctcctcaccgcc

SEQ ID NO: 6358 - DNA, 2586 bp, synthetic construct
  source 1..2586: mol_type = other DNA
atggccttaccagtgaccgccttgctcctgccgctggccttgctgctccacgccgccaggccggaagtgcagctggttgaatctggcggaggactggttcagcctggcggatctctgagactgtcttgtgccgccagcggcttcagcttcagcgacttttggatgagctgggtccgacaggcccctggcaaaggacttgaatgggtcgccacaatcagccaggccggcagcgagaaggactacgtggactctgtgaagggcagattcaccatcagccgggacaacgccaagaagtccctgtacctccagatgaacagcctgagagccgaggacaccgccgtgtactattgtgcctctggcgtgtacagcttcgactacagaggccagggcaccctggtcacagtctcttctggtaccggcggaggcggatctggcggcggaggtagcggtggcggaggatctgaattcgacatcgtgatgacccagagccccgatagcctggccgtgtctctgggagagagagccaccatcaactgccgggccagcaagagcgtgtccaccagcggctacagcttcatgcactggtatcagcagaagcccggccagccccccaagctgctgatctacctggcctccaacctggaaagcggcgtgcccgatagattcagcggcagcggctctggcaccgacttcaccctgaccatcagttctcttcaggccgaggacgtggccgtgtactactgccagcacagcagagaggtgccctggacattcggccagggcacaaaggtggaaatcaagcggctcgaggacctgaagaacgtgttcccacctgaggtggccgtgttcgagcctagcgaggccgagatcagccacacccagaaagccaccctcgtgtgcctggctaccggcttctaccccgaccatgtggaactgtcttggtgggtcaacggcaaagaggtgcacagcggcgtgtgtaccgacccccagccactgaaagaacagcccgccctgaacgacagccggtactgcctgagcagcagactgagagtgtccgccaccttctggcagaacccccggaaccacttcagatgccaggtgcagttctacggcctgagcgagaacgacgagtggacccaggacagagccaagcccgtgacccagatcgtgtctgccgaagcctggggcagagccgatgatgtgattaagatccactggcaggaaaagaagtccaacaccatcctgggcagccaggaaggcaacaccatgaagaccaacgacacctacatgaagttcagctggctgaccgtgcccgagaagtccctggacaaagaacacagatgcatcgtgcggcacgaaaacaacaagaacggcgtggaccaggaaatcatcttcccacccatcaagaccgatgtgattacaatggaccccaaggacaactgctccaaggacgccaacgataccctgctgctccagctgaccaacaccagcgcctactacatgtacttgttgctgctgctgaagtccgtggtgtacttcgccatcatcacatgctgcctgctgatggctatggtcaagcggaaggacagccggggaagggccaagcgatctggatctggagcaacaaacttctcactactcaaacaagcaggtgacgtggaggagaatcccgggcctactagtatggactggatttggcgcatccttttccttgtcggcgctgctaccggcgcgcattccttcgaacaggtgcagctggtgcagtctggggccgaagtgaagaaacctggggccagcgtgaaggtgtcctgcaaggccagcggatacacctttaccaactacggcatgaactgggtgcgccaggcccctggacagggcctggaatggatgggctggatcaacacctacaccggcgagcccacatacgccgacgccttcaagggcagattcgccttcagcctggacaccagcacctccaccgcctacctccagatcaacagcctgcggagcgacgacaccgccgtgtattattgcgccagagattacggcgactacgggatggactattggggccagggaaccaccgtgaccgtgtcctctacgcgtatccagaaccctgatcctgccgtgtaccagctgcgggatagcaagagcagcgacaagagcgtgtgtctgttcaccgacttcgacagccagaccaacgtgtcccagagcaaggactccgacgtgtacatcaccgataagtgcgtgctggacatgcggagcatggacttcaagagcaactccgccgtggcctggtccaacaagtccgatttcgcctgcgccaacgccttcaacaacagcattatccccgaggacacattcttcccaagccccgagagcagcgactccaccgaccacgtgaagcccaaagagacagagaacaccaagcagcccagcaagagctgccacaagcccaaggccatcgtgcacaccgagaaagtgaacatgatgagcctgaccgtgctgggcctgcggatgctgttcgccaaaaccgtggccgtgaacttcctgctgaccgccaagctgttcttcctcctcaccgcc

SEQ ID NO: 6359 - DNA, 2574 bp, synthetic construct
  source 1..2574: mol_type = other DNA
atggccttaccagtgaccgccttgctcctgccgctggccttgctgctccacgccgccaggccggaagtgcagctggttgaatctggcggaggactggttcagcctggcggatctctgagactgtcttgtgccgccagcggcttcagcttcagcgacttttggatgagctgggtccgacaggcccctggcaaaggacttgaatgggtcgccacaatcagccaggccggcagcgagaaggactacgtggactctgtgaagggcagattcaccatcagccgggacaacgccaagaagtccctgtacctccagatgaacagcctgagagccgaggacaccgccgtgtactattgtgcctctggcgtgtacagcttcgactacagaggccagggcaccctggtcacagtctcttctggtaccggcggaggcggatctggcggcggaggtagcggtggcggaggatctgaattcgacatcgtgatgacccagacccccctgaccctgagcgtgacaatcggacagcctgccagcatctcctgcaagagcagccagagcctgctggacagcgacggcaagacctacctgaactggctgctgcagaggccaggccagagccccgagagactgatctacctggtgtccaagctggactccggcgtgcccgatagattcacaggcagcggctccggcaccgacttcaccctgaagatcagccgggtggaagccgaggacctgggcgtgtactgttgttggcagggcacccacttcccttacaccttcggcggagggaccaaggtggaaatcaagggcctcgaggacctgaagaacgtgttcccacctgaggtggccgtgttcgagcctagcgaggccgagatcagccacacccagaaagccaccctcgtgtgcctggctaccggcttctaccccgaccatgtggaactgtcttggtgggtcaacggcaaagaggtgcacagcggcgtgtgtaccgacccccagccactgaaagaacagcccgccctgaacgacagccggtactgcctgagcagcagactgagagtgtccgccaccttctggcagaacccccggaaccacttcagatgccaggtgcagttctacggcctgagcgagaacgacgagtggacccaggacagagccaagcccgtgacccagatcgtgtctgccgaagcctggggcagagccgatgatgtgattaagatccactggcaggaaaagaagtccaacaccatcctgggcagccaggaaggcaacaccatgaagaccaacgacacctacatgaagttcagctggctgaccgtgcccgagaagtccctggacaaagaacacagatgcatcgtgcggcacgaaaacaacaagaacggcgtggaccaggaaatcatcttcccacccatcaagaccgatgtgattacaatggaccccaaggacaactgctccaaggacgccaacgataccctgctgctccagctgaccaacaccagcgcctactacatgtacttgttgctgctgctgaagtccgtggtgtacttcgccatcatcacatgctgcctgctgatggctatggtcaagcggaaggacagccggggaagggccaagcgatctggatctggagcaacaaacttctcactactcaaacaagcaggtgacgtggaggagaatcccgggcctactagtatggactggatttggcgcatccttttccttgtcggcgctgctaccggcgcgcattccttcgaacaggtgcaactgcagcagcctggcgctgaacttgtgcggccaggcgcctctgtgaagctgagctgtaaagccagcggctacaccttcaccagctactggatgaactgggtcaagcagcgcccaggccagggcctggaatggatcggaatgatcgaccccagcgacagcgagacacactacaaccacatcttcaaggacaaggccaccctgaccgtggacaagtccagcagcacagcctacctgcaactgtccagcctgaccagcgaggacagcgccgtgtactactgcgcccggaacctgtatctgtggggccagggaacaagcgtgaccgtgtctagcacgcgtatccagaaccctgatcctgccgtgtaccagctgcgggatagcaagagcagcgacaagagcgtgtgtctgttcaccgacttcgacagccagaccaacgtgtcccagagcaaggactccgacgtgtacatcaccgataagtgcgtgctggacatgcggagcatggacttcaagagcaactccgccgtggcctggtccaacaagtccgatttcgcctgcgccaacgccttcaacaacagcattatccccgaggacacattcttcccaagccccgagagcagcgactccaccgaccacgtgaagcccaaagagacagagaacaccaagcagcccagcaagagctgccacaagcccaaggccatcgtgcacaccgagaaagtgaacatgatgagcctgaccgtgctgggcctgcggatgctgttcgccaaaaccgtggccgtgaacttcctgctgaccgccaagctgttcttcctcctcaccgcc

SEQ ID NO: 6360 - DNA, 2598 bp, synthetic construct
  source 1..2598: mol_type = other DNA
atggccttaccagtgaccgccttgctcctgccgctggccttgctgctccacgccgccaggccggaagtgcagctggttgaatctggcggaggactggttcagcctggcggatctctgagactgtcttgtgccgccagcggcttcagcttcagcgacttttggatgagctgggtccgacaggcccctggcaaaggacttgaatgggtcgccacaatcagccaggccggcagcgagaaggactacgtggactctgtgaagggcagattcaccatcagccgggacaacgccaagaagtccctgtacctccagatgaacagcctgagagccgaggacaccgccgtgtactattgtgcctctggcgtgtacagcttcgactacagaggccagggcaccctggtcacagtctcttctggtaccggcggaggcggatctggcggcggaggtagcggtggcggaggatctgaattcgacatcgtgatgacccagagccccgatagcctggccgtgtctctgggagagagagccaccatcaactgcgagagcagccagagcctgctgaacagcggcaaccagaagaactacctgacctggtatcagcagaagcccggccagccccccaagcccctgatctattgggccagcaccagagaaagcggcgtgcccgatagattcagcggcagcggaagcggcaccgacttcaccctgaccatcagttctcttcaggccgaggacgtggccgtgtactactgccagaacgactacagctacccctacaccttcggccagggcaccaagctggaaatcaagagactcgaggacctgaagaacgtgttcccacctgaggtggccgtgttcgagcctagcgaggccgagatcagccacacccagaaagccaccctcgtgtgcctggctaccggcttctaccccgaccatgtggaactgtcttggtgggtcaacggcaaagaggtgcacagcggcgtgtgtaccgacccccagccactgaaagaacagcccgccctgaacgacagccggtactgcctgagcagcagactgagagtgtccgccaccttctggcagaacccccggaaccacttcagatgccaggtgcagttctacggcctgagcgagaacgacgagtggacccaggacagagccaagcccgtgacccagatcgtgtctgccgaagcctggggcagagccgatgatgtgattaagatccactggcaggaaaagaagtccaacaccatcctgggcagccaggaaggcaacaccatgaagaccaacgacacctacatgaagttcagctggctgaccgtgcccgagaagtccctggacaaagaacacagatgcatcgtgcggcacgaaaacaacaagaacggcgtggaccaggaaatcatcttcccacccatcaagaccgatgtgattacaatggaccccaaggacaactgctccaaggacgccaacgataccctgctgctccagctgaccaacaccagcgcctactacatgtacttgttgctgctgctgaagtccgtggtgtacttcgccatcatcacatgctgcctgctgatggctatggtcaagcggaaggacagccggggaagggccaagcgatctggatctggagcaacaaacttctcactactcaaacaagcaggtgacgtggaggagaatcccgggcctactagtatggactggatttggcgcatccttttccttgtcggcgctgctaccggcgcgcattccttcgaagaagtgcagctggtgcagtctggggccgaagtgaagaagcctggcgagagcctgaagatcagctgcaagggcagcggctacagcttcaccgactactacatgaagtgggccagacagatgcccggcaagggcctggaatggatgggcgacatcatccccagcaacggggccaccttctacaaccagaaattcaagggccaagtgaccatctccgccgacaagagcatcagcaccacctacctccagtggtccagcctgaaggccagcgacaccgccatgtactattgcgccagaagccatctgctgcgggccagttggttcgcctattggggccagggaacaatggtcacagtgtccagcacgcgtatccagaaccctgatcctgccgtgtaccagctgcgggatagcaagagcagcgacaagagcgtgtgtctgttcaccgacttcgacagccagaccaacgtgtcccagagcaaggactccgacgtgtacatcaccgataagtgcgtgctggacatgcggagcatggacttcaagagcaactccgccgtggcctggtccaacaagtccgatttcgcctgcgccaacgccttcaacaacagcattatccccgaggacacattcttcccaagccccgagagcagcgactccaccgaccacgtgaagcccaaagagacagagaacaccaagcagcccagcaagagctgccacaagcccaaggccatcgtgcacaccgagaaagtgaacatgatgagcctgaccgtgctgggcctgcggatgctgttcgccaaaaccgtggccgtgaacttcctgctgaccgccaagctgttcttcctcctcaccgcc

SEQ ID NO: 6361 - DNA, 2583 bp, synthetic construct
  source 1..2583: mol_type = other DNA
atggccttaccagtgaccgccttgctcctgccgctggccttgctgctccacgccgccaggccggaagtgcagctggttgaatctggcggaggactggttcagcctggcggatctctgagactgtcttgtgccgccagcggcttcagcttcagcgacttttggatgagctgggtccgacaggcccctggcaaaggacttgaatgggtcgccacaatcagccaggccggcagcgagaaggactacgtggactctgtgaagggcagattcaccatcagccgggacaacgccaagaagtccctgtacctccagatgaacagcctgagagccgaggacaccgccgtgtactattgtgcctctggcgtgtacagcttcgactacagaggccagggcaccctggtcacagtctcttctggtaccggcggaggcggatctggcggcggaggtagcggtggcggaggatctgaattcgacatccagatgacccagtctaccagttccctgagtgcatccctcggagacagggtgacgatcagttgcagcgcaagccaagggatcaataactatctgaactggtatcagcagaaaccggacggaacagtcgaactcctgatttattacaccagcacccttcagagtggcgtcccttcccggttcagtggctccggaagcgggaccgattactccctgaccatttctaatctggagccagaggacataggaacgtattattgccagcagtatagtaaactgccacgaacttttggaggggggacgaaactggagatcaaactcgaggacctgaagaacgtgttcccacctgaggtggccgtgttcgagcctagcgaggccgagatcagccacacccagaaagccaccctcgtgtgcctggctaccggcttctaccccgaccatgtggaactgtcttggtgggtcaacggcaaagaggtgcacagcggcgtgtgtaccgacccccagccactgaaagaacagcccgccctgaacgacagccggtactgcctgagcagcagactgagagtgtccgccaccttctggcagaacccccggaaccacttcagatgccaggtgcagttctacggcctgagcgagaacgacgagtggacccaggacagagccaagcccgtgacccagatcgtgtctgccgaagcctggggcagagccgatgatgtgattaagatccactggcaggaaaagaagtccaacaccatcctgggcagccaggaaggcaacaccatgaagaccaacgacacctacatgaagttcagctggctgaccgtgcccgagaagtccctggacaaagaacacagatgcatcgtgcggcacgaaaacaacaagaacggcgtggaccaggaaatcatcttcccacccatcaagaccgatgtgattacaatggaccccaaggacaactgctccaaggacgccaacgataccctgctgctccagctgaccaacaccagcgcctactacatgtacttgttgctgctgctgaagtccgtggtgtacttcgccatcatcacatgctgcctgctgatggctatggtcaagcggaaggacagccggggaagggccaagcgatctggatctggagcaacaaacttctcactactcaaacaagcaggtgacgtggaggagaatcccgggcctactagtatggactggatttggcgcatccttttccttgtcggcgctgctaccggcgcgcattccttcgaacaggtgcaactccagcagtccggaagcgagcttatgatgccaggggcatcagtgaagatcagctgcaaggctactggctacaccttctctaattactggatagagtgggttaaacaaaggccagggcacggcctggaatggatcggcgagatcctgcctgggacaggccgaaccatttataacgagaagttcaaaggcaaggctactttcaccgcagatataagctctaatacagtgcaaatgcagctctcttccctgacaagtgaggatagtgccgtgtattattgcgcacgaagagattactatggaaatttttattacgctatggattattggggtcaaggaacaagtgtgaccgttagcagcacgcgtatccagaaccctgatcctgccgtgtaccagctgcgggatagcaagagcagcgacaagagcgtgtgtctgttcaccgacttcgacagccagaccaacgtgtcccagagcaaggactccgacgtgtacatcaccgataagtgcgtgctggacatgcggagcatggacttcaagagcaactccgccgtggcctggtccaacaagtccgatttcgcctgcgccaacgccttcaacaacagcattatccccgaggacacattcttcccaagccccgagagcagcgactccaccgaccacgtgaagcccaaagagacagagaacaccaagcagcccagcaagagctgccacaagcccaaggccatcgtgcacaccgagaaagtgaacatgatgagcctgaccgtgctgggcctgcggatgctgttcgccaaaaccgtggccgtgaacttcctgctgaccgccaagctgttcttcctcctcaccgcc

SEQ ID NO: 6362 - DNA, 2568 bp, synthetic construct
  source 1..2568: mol_type = other DNA
atggccttaccagtgaccgccttgctcctgccgctggccttgctgctccacgccgccaggccggaagtgcagctggttgaatctggcggaggactggttcagcctggcggatctctgagactgtcttgtgccgccagcggcttcagcttcagcgacttttggatgagctgggtccgacaggcccctggcaaaggacttgaatgggtcgccacaatcagccaggccggcagcgagaaggactacgtggactctgtgaagggcagattcaccatcagccgggacaacgccaagaagtccctgtacctccagatgaacagcctgagagccgaggacaccgccgtgtactattgtgcctctggcgtgtacagcttcgactacagaggccagggcaccctggtcacagtctcttctggtaccggcggaggcggatctggcggcggaggtagcggtggcggaggatctgaattcgacatccagatgacccagagccctgccagcctgtccgtgtctgtgggcgagacagtgaccatcacctgtcgggccagcgagaacatctacagcaacctggcctggtatcagcagaagcagggcaagagcccccaactgctggtgtacgccgccaccaatctggccgatggcgtgcccagcagattttccggctctggcagcggcacccagtacagcctgaagatcaacagcctccagagcgaggacttcggcagctactactgccagcacttctggggcacctggacctttggaggaggcaccaccctggaaatcaagctcgaggacctgaagaacgtgttcccacctgaggtggccgtgttcgagcctagcgaggccgagatcagccacacccagaaagccaccctcgtgtgcctggctaccggcttctaccccgaccatgtggaactgtcttggtgggtcaacggcaaagaggtgcacagcggcgtgtgtaccgacccccagccactgaaagaacagcccgccctgaacgacagccggtactgcctgagcagcagactgagagtgtccgccaccttctggcagaacccccggaaccacttcagatgccaggtgcagttctacggcctgagcgagaacgacgagtggacccaggacagagccaagcccgtgacccagatcgtgtctgccgaagcctggggcagagccgatgatgtgattaagatccactggcaggaaaagaagtccaacaccatcctgggcagccaggaaggcaacaccatgaagaccaacgacacctacatgaagttcagctggctgaccgtgcccgagaagtccctggacaaagaacacagatgcatcgtgcggcacgaaaacaacaagaacggcgtggaccaggaaatcatcttcccacccatcaagaccgatgtgattacaatggaccccaaggacaactgctccaaggacgccaacgataccctgctgctccagctgaccaacaccagcgcctactacatgtacttgttgctgctgctgaagtccgtggtgtacttcgccatcatcacatgctgcctgctgatggctatggtcaagcggaaggacagccggggaagggccaagcgatctggatctggagcaacaaacttctcactactcaaacaagcaggtgacgtggaggagaatcccgggcctactagtatggactggatttggcgcatccttttccttgtcggcgctgctaccggcgcgcattccttcgaagaagtgcaactccagcagagcggccctgagcttgtgaagcctggcgcttccgtgaagatgagctgcaaggccagcggctacaccttcaccgactactacatgaagtggatgaagcagagccacggcaagtccctggaatggatcggcgacatcaaccccaacaacggcggcaccacctacaaccagaagttcaagggcaaggccaccctgaccgtggacaagagcagcagcaccgcctacatgcaactgaacagcctgaccagcgaggacagcgccgtgtactactgcgccagagactacggctacggctatttcgactactggggccagggcacaaccctgacagtgtcctctacgcgtatccagaaccctgatcctgccgtgtaccagctgcgggatagcaagagcagcgacaagagcgtgtgtctgttcaccgacttcgacagccagaccaacgtgtcccagagcaaggactccgacgtgtacatcaccgataagtgcgtgctggacatgcggagcatggacttcaagagcaactccgccgtggcctggtccaacaagtccgatttcgcctgcgccaacgccttcaacaacagcattatccccgaggacacattcttcccaagccccgagagcagcgactccaccgaccacgtgaagcccaaagagacagagaacaccaagcagcccagcaagagctgccacaagcccaaggccatcgtgcacaccgagaaagtgaacatgatgagcctgaccgtgctgggcctgcggatgctgttcgccaaaaccgtggccgtgaacttcctgctgaccgccaagctgttcttcctcctcaccgcc

SEQ ID NO: 6363 - DNA, 2577 bp, synthetic construct
  source 1..2577: mol_type = other DNA
atggccttaccagtgaccgccttgctcctgccgctggccttgctgctccacgccgccaggccggaagtgcagctggttgaatctggcggaggactggttcagcctggcggatctctgagactgtcttgtgccgccagcggcttcagcttcagcgacttttggatgagctgggtccgacaggcccctggcaaaggacttgaatgggtcgccacaatcagccaggccggcagcgagaaggactacgtggactctgtgaagggcagattcaccatcagccgggacaacgccaagaagtccctgtacctccagatgaacagcctgagagccgaggacaccgccgtgtactattgtgcctctggcgtgtacagcttcgactacagaggccagggcaccctggtcacagtctcttctggtaccggcggaggcggatctggcggcggaggtagcggtggcggaggatctgaattcgagatcgtgctgacacagagccctggcaccctgagcctgtctccaggcgaaagagccacactgagctgtcgggcctctcagagcgtgggaggctacctggcttggtatcagcagaagccaggccaggcccccagactgctgatctacgacgccagcaatcgggccacaggcatccccgccagattttctggcagcggctccggcaccgacttcaccctgacaatcagcagcctggaacccgaggacttcgccgtgtactactgccagcagcggaacaactggccccccatgtacacattcggccagggcaccaagctggaaatcaagagactcgaggacctgaagaacgtgttcccacctgaggtggccgtgttcgagcctagcgaggccgagatcagccacacccagaaagccaccctcgtgtgcctggctaccggcttctaccccgaccatgtggaactgtcttggtgggtcaacggcaaagaggtgcacagcggcgtgtgtaccgacccccagccactgaaagaacagcccgccctgaacgacagccggtactgcctgagcagcagactgagagtgtccgccaccttctggcagaacccccggaaccacttcagatgccaggtgcagttctacggcctgagcgagaacgacgagtggacccaggacagagccaagcccgtgacccagatcgtgtctgccgaagcctggggcagagccgatgatgtgattaagatccactggcaggaaaagaagtccaacaccatcctgggcagccaggaaggcaacaccatgaagaccaacgacacctacatgaagttcagctggctgaccgtgcccgagaagtccctggacaaagaacacagatgcatcgtgcggcacgaaaacaacaagaacggcgtggaccaggaaatcatcttcccacccatcaagaccgatgtgattacaatggaccccaaggacaactgctccaaggacgccaacgataccctgctgctccagctgaccaacaccagcgcctactacatgtacttgttgctgctgctgaagtccgtggtgtacttcgccatcatcacatgctgcctgctgatggctatggtcaagcggaaggacagccggggaagggccaagcgatctggatctggagcaacaaacttctcactactcaaacaagcaggtgacgtggaggagaatcccgggcctactagtatggactggatttggcgcatccttttccttgtcggcgctgctaccggcgcgcattccttcgaacaggtgcaactggtgcagagcggagccgaagtgaagaaacccggcagcagcgtgaaggtgtcctgcaaggcttccggcggcaccttcagcagctacgccatttcttgggtgcgccaggctcctggacagggcctggaatggatgggcggcatcatccctatcctgggcaccgccaactacgcccagaaattccagggcagagtgaccatcaccgccgacgagagcaccagcaccgcctacatggaactgagcagcctgcggagcgaggacacagccgtgtattattgcgccagatggggcggaggggccttcgacatttggggccagggaacaatggtcaccgtgtccagcacgcgtatccagaaccctgatcctgccgtgtaccagctgcgggatagcaagagcagcgacaagagcgtgtgtctgttcaccgacttcgacagccagaccaacgtgtcccagagcaaggactccgacgtgtacatcaccgataagtgcgtgctggacatgcggagcatggacttcaagagcaactccgccgtggcctggtccaacaagtccgatttcgcctgcgccaacgccttcaacaacagcattatccccgaggacacattcttcccaagccccgagagcagcgactccaccgaccacgtgaagcccaaagagacagagaacaccaagcagcccagcaagagctgccacaagcccaaggccatcgtgcacaccgagaaagtgaacatgatgagcctgaccgtgctgggcctgcggatgctgttcgccaaaaccgtggccgtgaacttcctgctgaccgccaagctgttcttcctcctcaccgcc

SEQ ID NO: 6364 - DNA, 2562 bp, synthetic construct
  source 1..2562: mol_type = other DNA
atggccttaccagtgaccgccttgctcctgccgctggccttgctgctccacgccgccaggccggaagtgcagctggttgaatctggcggaggactggttcagcctggcggatctctgagactgtcttgtgccgccagcggcttcagcttcagcgacttttggatgagctgggtccgacaggcccctggcaaaggacttgaatgggtcgccacaatcagccaggccggcagcgagaaggactacgtggactctgtgaagggcagattcaccatcagccgggacaacgccaagaagtccctgtacctccagatgaacagcctgagagccgaggacaccgccgtgtactattgtgcctctggcgtgtacagcttcgactacagaggccagggcaccctggtcacagtctcttctggtaccggcggaggcggatctggcggcggaggtagcggtggcggaggatctgaattccagatcgtgctgacacagagccctgccctgatgagcgccagccctggcgagaaagtgaccatgacctgtagcgccagcagcagcgtgcgctacatgtactggtatcagcagaagcccagaagcagccccaagccctggattcacctgaccagcaatctggcctctggcgtgcccgctagattttccggctctggcagcggcaccagctacagcctgaccatcagcagcatggaagccgaggacgccgccacctactactgccagcagtggtccagccaccccttcacatttggctccggcaccaagctggaaatcaagctcgaggacctgaagaacgtgttcccacctgaggtggccgtgttcgagcctagcgaggccgagatcagccacacccagaaagccaccctcgtgtgcctggctaccggcttctaccccgaccatgtggaactgtcttggtgggtcaacggcaaagaggtgcacagcggcgtgtgtaccgacccccagccactgaaagaacagcccgccctgaacgacagccggtactgcctgagcagcagactgagagtgtccgccaccttctggcagaacccccggaaccacttcagatgccaggtgcagttctacggcctgagcgagaacgacgagtggacccaggacagagccaagcccgtgacccagatcgtgtctgccgaagcctggggcagagccgatgatgtgattaagatccactggcaggaaaagaagtccaacaccatcctgggcagccaggaaggcaacaccatgaagaccaacgacacctacatgaagttcagctggctgaccgtgcccgagaagtccctggacaaagaacacagatgcatcgtgcggcacgaaaacaacaagaacggcgtggaccaggaaatcatcttcccacccatcaagaccgatgtgattacaatggaccccaaggacaactgctccaaggacgccaacgataccctgctgctccagctgaccaacaccagcgcctactacatgtacttgttgctgctgctgaagtccgtggtgtacttcgccatcatcacatgctgcctgctgatggctatggtcaagcggaaggacagccggggaagggccaagcgatctggatctggagcaacaaacttctcactactcaaacaagcaggtgacgtggaggagaatcccgggcctactagtatggactggatttggcgcatccttttccttgtcggcgctgctaccggcgcgcattccttcgaagatgtgcaactccaggaaagcggccctggccttgtgaagcctagccagagcctgtccctgacctgtaccgtgaccggcttcagcatcaccagcgactactcttggaactggatcagacagttccctggcaacaaactggaatggatgggctacatcagctactccggccacacctcctacaaccccagcctggaaagccggatctccatcaccagagacaccagcaagaaccagttcttcttgcaactgaacagcgtgaccaccgaggataccgccacatattactgtaccagaggcaactgggacgtggtgtactggggccagggcacacttgtgaccgtgtctgctacgcgtatccagaaccctgatcctgccgtgtaccagctgcgggatagcaagagcagcgacaagagcgtgtgtctgttcaccgacttcgacagccagaccaacgtgtcccagagcaaggactccgacgtgtacatcaccgataagtgcgtgctggacatgcggagcatggacttcaagagcaactccgccgtggcctggtccaacaagtccgatttcgcctgcgccaacgccttcaacaacagcattatccccgaggacacattcttcccaagccccgagagcagcgactccaccgaccacgtgaagcccaaagagacagagaacaccaagcagcccagcaagagctgccacaagcccaaggccatcgtgcacaccgagaaagtgaacatgatgagcctgaccgtgctgggcctgcggatgctgttcgccaaaaccgtggccgtgaacttcctgctgaccgccaagctgttcttcctcctcaccgcc

SEQ ID NO: 6365 - DNA, 2592 bp, synthetic construct
  source 1..2592: mol_type = other DNA
atggccttaccagtgaccgccttgctcctgccgctggccttgctgctccacgccgccaggccggaagtgcagctggttgaatctggcggaggactggttcagcctggcggatctctgagactgtcttgtgccgccagcggcttcagcttcagcgacttttggatgagctgggtccgacaggcccctggcaaaggacttgaatgggtcgccacaatcagccaggccggcagcgagaaggactacgtggactctgtgaagggcagattcaccatcagccgggacaacgccaagaagtccctgtacctccagatgaacagcctgagagccgaggacaccgccgtgtactattgtgcctctggcgtgtacagcttcgactacagaggccagggcaccctggtcacagtctcttctggtaccggcggaggcggatctggcggcggaggtagcggtggcggaggatctgaattcgacgtcgtgatgacccagagccctctgagcctgcctgtgacactgggacagcctgccagcatctcctgtcggagcagccagagcatcgtgcacagcgacggcaacacctacctggaatggtatcagcagcggccaggccagagccccagacggctgatctacaaggtgtccaacagattcagcggcgtgcccgacagattctccggcagcggctctggcaccgacttcaccctgaagatcagcagagtggaagccgaggacgtgggcgtgtactactgttttcaaggcagccacgccccctggacctttggcggaggaacaaaggtggaaatcaagctcgaggacctgaagaacgtgttcccacctgaggtggccgtgttcgagcctagcgaggccgagatcagccacacccagaaagccaccctcgtgtgcctggctaccggcttctaccccgaccatgtggaactgtcttggtgggtcaacggcaaagaggtgcacagcggcgtgtgtaccgacccccagccactgaaagaacagcccgccctgaacgacagccggtactgcctgagcagcagactgagagtgtccgccaccttctggcagaacccccggaaccacttcagatgccaggtgcagttctacggcctgagcgagaacgacgagtggacccaggacagagccaagcccgtgacccagatcgtgtctgccgaagcctggggcagagccgatgatgtgattaagatccactggcaggaaaagaagtccaacaccatcctgggcagccaggaaggcaacaccatgaagaccaacgacacctacatgaagttcagctggctgaccgtgcccgagaagtccctggacaaagaacacagatgcatcgtgcggcacgaaaacaacaagaacggcgtggaccaggaaatcatcttcccacccatcaagaccgatgtgattacaatggaccccaaggacaactgctccaaggacgccaacgataccctgctgctccagctgaccaacaccagcgcctactacatgtacttgttgctgctgctgaagtccgtggtgtacttcgccatcatcacatgctgcctgctgatggctatggtcaagcggaaggacagccggggaagggccaagcgatctggatctggagcaacaaacttctcactactcaaacaagcaggtgacgtggaggagaatcccgggcctactagtatggactggatttggcgcatccttttccttgtcggcgctgctaccggcgcgcattccttcgaagaagtgcaactggtggaatcaggcggcggactggtgcagcctggcggatctctgagactgagctgtgccgccagcggcttcaccttcagcagctacggaatgcactgggtgcgccaggcccctggcaaaggactggaatgggtggcctacatcaccaccagaagcagcaccatctactacgccgacagcgtgaagggccggttcaccatctccagagacaacgccaagaacagcctgtacctccagatgaactccctgcgggccgaggacaccgccgtgtactattgcaccagagagcccctgaccggctactacgctatggactattggggccagggcaccagcgtgaccgtgtctagtacgcgtatccagaaccctgatcctgccgtgtaccagctgcgggatagcaagagcagcgacaagagcgtgtgtctgttcaccgacttcgacagccagaccaacgtgtcccagagcaaggactccgacgtgtacatcaccgataagtgcgtgctggacatgcggagcatggacttcaagagcaactccgccgtggcctggtccaacaagtccgatttcgcctgcgccaacgccttcaacaacagcattatccccgaggacacattcttcccaagccccgagagcagcgactccaccgaccacgtgaagcccaaagagacagagaacaccaagcagcccagcaagagctgccacaagcccaaggccatcgtgcacaccgagaaagtgaacatgatgagcctgaccgtgctgggcctgcggatgctgttcgccaaaaccgtggccgtgaacttcctgctgaccgccaagctgttcttcctcctcaccgcc

SEQ ID NO: 6366 - DNA, 2568 bp, synthetic construct
  source 1..2568: mol_type = other DNA
atggccttaccagtgaccgccttgctcctgccgctggccttgctgctccacgccgccaggccggaagtgcagctggttgaatctggcggaggactggttcagcctggcggatctctgagactgtcttgtgccgccagcggcttcagcttcagcgacttttggatgagctgggtccgacaggcccctggcaaaggacttgaatgggtcgccacaatcagccaggccggcagcgagaaggactacgtggactctgtgaagggcagattcaccatcagccgggacaacgccaagaagtccctgtacctccagatgaacagcctgagagccgaggacaccgccgtgtactattgtgcctctggcgtgtacagcttcgactacagaggccagggcaccctggtcacagtctcttctggtaccggcggaggcggatctggcggcggaggtagcggtggcggaggatctgaattcgacatccagatgacccagagccccagcagcctgtctgccagcgtgggcgacagagtgaccatcacctgtagagccagccagagcatcagcctgtggctgaactggtatcagcagaagcccggcaaggcccccaagctgctgatctacgccgccagcacactccagagcggcgtgccaagcagattttccggcagcggctccggcaccgacttcaccctgacaatcagctccctccagcccgaggacttcgccacctactactgccagcagtactacaccagcccctacaccttcggccagggcaccaaggtggaaatcaagagactcgaggacctgaagaacgtgttcccacctgaggtggccgtgttcgagcctagcgaggccgagatcagccacacccagaaagccaccctcgtgtgcctggctaccggcttctaccccgaccatgtggaactgtcttggtgggtcaacggcaaagaggtgcacagcggcgtgtgtaccgacccccagccactgaaagaacagcccgccctgaacgacagccggtactgcctgagcagcagactgagagtgtccgccaccttctggcagaacccccggaaccacttcagatgccaggtgcagttctacggcctgagcgagaacgacgagtggacccaggacagagccaagcccgtgacccagatcgtgtctgccgaagcctggggcagagccgatgatgtgattaagatccactggcaggaaaagaagtccaacaccatcctgggcagccaggaaggcaacaccatgaagaccaacgacacctacatgaagttcagctggctgaccgtgcccgagaagtccctggacaaagaacacagatgcatcgtgcggcacgaaaacaacaagaacggcgtggaccaggaaatcatcttcccacccatcaagaccgatgtgattacaatggaccccaaggacaactgctccaaggacgccaacgataccctgctgctccagctgaccaacaccagcgcctactacatgtacttgttgctgctgctgaagtccgtggtgtacttcgccatcatcacatgctgcctgctgatggctatggtcaagcggaaggacagccggggaagggccaagcgatctggatctggagcaacaaacttctcactactcaaacaagcaggtgacgtggaggagaatcccgggcctactagtatggactggatttggcgcatccttttccttgtcggcgctgctaccggcgcgcattccttcgaacaggtgcaactgctggaatctggcggcggactggtgcagcctggcggatctctgagactgagctgtgccgccagcggcttcaccttcagcagctacgccatgagctgggtgcgccaggcccctggaaaaggactggaatgggtgtccgtgatccggtccagcggcagcagcacctattacgccgatagcgtgaagggccggttcaccatcagccgggacaacagcaagaacaccctgtacctccagatgaacagcctgcgggccgaggacaccgccgtgtactattgtgctaggggaggcggctacttcgactactggggccagggaacactcgtgaccgtgtcctctacgcgtatccagaaccctgatcctgccgtgtaccagctgcgggatagcaagagcagcgacaagagcgtgtgtctgttcaccgacttcgacagccagaccaacgtgtcccagagcaaggactccgacgtgtacatcaccgataagtgcgtgctggacatgcggagcatggacttcaagagcaactccgccgtggcctggtccaacaagtccgatttcgcctgcgccaacgccttcaacaacagcattatccccgaggacacattcttcccaagccccgagagcagcgactccaccgaccacgtgaagcccaaagagacagagaacaccaagcagcccagcaagagctgccacaagcccaaggccatcgtgcacaccgagaaagtgaacatgatgagcctgaccgtgctgggcctgcggatgctgttcgccaaaaccgtggccgtgaacttcctgctgaccgccaagctgttcttcctcctcaccgcc

SEQ ID NO: 6367 - DNA, 2577 bp, synthetic construct
  source 1..2577: mol_type = other DNA
atggccttaccagtgaccgccttgctcctgccgctggccttgctgctccacgccgccaggccggaagtgcagctggttgaatctggcggaggactggttcagcctggcggatctctgagactgtcttgtgccgccagcggcttcagcttcagcgacttttggatgagctgggtccgacaggcccctggcaaaggacttgaatgggtcgccacaatcagccaggccggcagcgagaaggactacgtggactctgtgaagggcagattcaccatcagccgggacaacgccaagaagtccctgtacctccagatgaacagcctgagagccgaggacaccgccgtgtactattgtgcctctggcgtgtacagcttcgactacagaggccagggcaccctggtcacagtctcttctggtaccggcggaggcggatctggcggcggaggtagcggtggcggaggatctgaattcgacatccagatgacccagagccccagcagcctgtctgccagcgtgggcgacagagtgaccatcacctgtagagccagccagagcatcagcagctacctgaactggtatcagcagaagcccggcaaggcccccaaactgctgatctacgccgtgtccacactccagagcggcgtgcccagcagattttctggcagcggctccggcaccgacttcaccctgacaatcagctccctccagcccgaggacttcgccacctactactgtcagcagagcggcaccttccctcccaccacatttggacagggcaccaaggtggaaatcaagagactcgaggacctgaagaacgtgttcccacctgaggtggccgtgttcgagcctagcgaggccgagatcagccacacccagaaagccaccctcgtgtgcctggctaccggcttctaccccgaccatgtggaactgtcttggtgggtcaacggcaaagaggtgcacagcggcgtgtgtaccgacccccagccactgaaagaacagcccgccctgaacgacagccggtactgcctgagcagcagactgagagtgtccgccaccttctggcagaacccccggaaccacttcagatgccaggtgcagttctacggcctgagcgagaacgacgagtggacccaggacagagccaagcccgtgacccagatcgtgtctgccgaagcctggggcagagccgatgatgtgattaagatccactggcaggaaaagaagtccaacaccatcctgggcagccaggaaggcaacaccatgaagaccaacgacacctacatgaagttcagctggctgaccgtgcccgagaagtccctggacaaagaacacagatgcatcgtgcggcacgaaaacaacaagaacggcgtggaccaggaaatcatcttcccacccatcaagaccgatgtgattacaatggaccccaaggacaactgctccaaggacgccaacgataccctgctgctccagctgaccaacaccagcgcctactacatgtacttgttgctgctgctgaagtccgtggtgtacttcgccatcatcacatgctgcctgctgatggctatggtcaagcggaaggacagccggggaagggccaagcgatctggatctggagcaacaaacttctcactactcaaacaagcaggtgacgtggaggagaatcccgggcctactagtatggactggatttggcgcatccttttccttgtcggcgctgctaccggcgcgcattccttcgaacaggtgcaactgctggaatctggcggcggactggtgcagcctggcggatctctgagactgagctgtgccgccagcggcttcaccttcagcagccacggaatgcactgggtgcgccaggcccctggaaagggactggaatgggtgtccgtgatctccggcagcggcagcaataccggctacgccgatagcgtgaagggccggttcaccatcagccgggacaacagcaagaacaccctgtacctccagatgaacagcctgcgggccgaggacaccgccgtgtactattgtgccagacagtggggcagctacgccttcgattcttggggccagggcaccctcgtgaccgtgtcatctacgcgtatccagaaccctgatcctgccgtgtaccagctgcgggatagcaagagcagcgacaagagcgtgtgtctgttcaccgacttcgacagccagaccaacgtgtcccagagcaaggactccgacgtgtacatcaccgataagtgcgtgctggacatgcggagcatggacttcaagagcaactccgccgtggcctggtccaacaagtccgatttcgcctgcgccaacgccttcaacaacagcattatccccgaggacacattcttcccaagccccgagagcagcgactccaccgaccacgtgaagcccaaagagacagagaacaccaagcagcccagcaagagctgccacaagcccaaggccatcgtgcacaccgagaaagtgaacatgatgagcctgaccgtgctgggcctgcggatgctgttcgccaaaaccgtggccgtgaacttcctgctgaccgccaagctgttcttcctcctcaccgcc

SEQ ID NO: 6368 - DNA, 2607 bp, synthetic construct
  source 1..2607: mol_type = other DNA
atggccttaccagtgaccgccttgctcctgccgctggccttgctgctccacgccgccaggccggaagtgcagctggttgaatctggcggaggactggttcagcctggcggatctctgagactgtcttgtgccgccagcggcttcagcttcagcgacttttggatgagctgggtccgacaggcccctggcaaaggacttgaatgggtcgccacaatcagccaggccggcagcgagaaggactacgtggactctgtgaagggcagattcaccatcagccgggacaacgccaagaagtccctgtacctccagatgaacagcctgagagccgaggacaccgccgtgtactattgtgcctctggcgtgtacagcttcgactacagaggccagggcaccctggtcacagtctcttctggtaccggcggaggcggatctggcggcggaggtagcggtggcggaggatctgaattcgacatcgtgatgagccagagccctagcagcctggccgtgtccgtgggcgagaaagtgaccatgagctgcaagagcagccagtccctgctgcacagcagcaaccagaagaactacctggcctggtatcagcagaagcccggccagtcccccaaggtgctgatctactgggccagcaccagagaaagcggcgtgcccgatagattcaccggcagcggctctggcaccgacttcaccctgaccatcaccagcgtgaagtccgaggacctggctgtgtactactgccagcagtattacagctacccctggaccttcggcggaggcacccggctggaaatcaaaagactcgaggacctgaagaacgtgttcccacctgaggtggccgtgttcgagcctagcgaggccgagatcagccacacccagaaagccaccctcgtgtgcctggctaccggcttctaccccgaccatgtggaactgtcttggtgggtcaacggcaaagaggtgcacagcggcgtgtgtaccgacccccagccactgaaagaacagcccgccctgaacgacagccggtactgcctgagcagcagactgagagtgtccgccaccttctggcagaacccccggaaccacttcagatgccaggtgcagttctacggcctgagcgagaacgacgagtggacccaggacagagccaagcccgtgacccagatcgtgtctgccgaagcctggggcagagccgatgatgtgattaagatccactggcaggaaaagaagtccaacaccatcctgggcagccaggaaggcaacaccatgaagaccaacgacacctacatgaagttcagctggctgaccgtgcccgagaagtccctggacaaagaacacagatgcatcgtgcggcacgaaaacaacaagaacggcgtggaccaggaaatcatcttcccacccatcaagaccgatgtgattacaatggaccccaaggacaactgctccaaggacgccaacgataccctgctgctccagctgaccaacaccagcgcctactacatgtacttgttgctgctgctgaagtccgtggtgtacttcgccatcatcacatgctgcctgctgatggctatggtcaagcggaaggacagccggggaagggccaagcgatctggatctggagcaacaaacttctcactactcaaacaagcaggtgacgtggaggagaatcccgggcctactagtatggactggatttggcgcatccttttccttgtcggcgctgctaccggcgcgcattccttcgaagaagtgcaactccagcagagcgtggccgagcttgtgaagcctggcgcttccgtgaagatgtcctgcaaggtgtccggctacaccctgacagaccacaccatccactggatgaagcagcggcctgagcagggcctggaatggatcggctacatctaccccagggacggcatcaccggctacaacgagaagttcaagggcaaggccacactgaccgccgacaccagcagcagcacagcctacatgcaactgaacagcctgaccagcgaggacagcgccgtgtacttctgtgccagatggggctacagctacagaaactacgcctactactacgactactggggccagggcacaaccctgaccgtgtctagtacgcgtatccagaaccctgatcctgccgtgtaccagctgcgggatagcaagagcagcgacaagagcgtgtgtctgttcaccgacttcgacagccagaccaacgtgtcccagagcaaggactccgacgtgtacatcaccgataagtgcgtgctggacatgcggagcatggacttcaagagcaactccgccgtggcctggtccaacaagtccgatttcgcctgcgccaacgccttcaacaacagcattatccccgaggacacattcttcccaagccccgagagcagcgactccaccgaccacgtgaagcccaaagagacagagaacaccaagcagcccagcaagagctgccacaagcccaaggccatcgtgcacaccgagaaagtgaacatgatgagcctgaccgtgctgggcctgcggatgctgttcgccaaaaccgtggccgtgaacttcctgctgaccgccaagctgttcttcctcctcaccgcc

SEQ ID NO: 6369 - DNA, 2598 bp, synthetic construct
  source 1..2598: mol_type = other DNA
atggccttaccagtgaccgccttgctcctgccgctggccttgctgctccacgccgccaggccggaagtgcagctggttgaatctggcggaggactggttcagcctggcggatctctgagactgtcttgtgccgccagcggcttcagcttcagcgacttttggatgagctgggtccgacaggcccctggcaaaggacttgaatgggtcgccacaatcagccaggccggcagcgagaaggactacgtggactctgtgaagggcagattcaccatcagccgggacaacgccaagaagtccctgtacctccagatgaacagcctgagagccgaggacaccgccgtgtactattgtgcctctggcgtgtacagcttcgactacagaggccagggcaccctggtcacagtctcttctggtaccggcggaggcggatctggcggcggaggtagcggtggcggaggatctgaattcgagatcgtgctgacacagagccctggcaccctgagcctgtctccaggcgaaagagccacactgagctgtcgggccagccagagcgtgtccagctcttacctggcctggtatcagcagaagcccggccaggctccccggctgctgatctacggaacaagcagcagagccaccggcatccccgacagattttctggcagcggctccggcaccgacttcaccctgacaatcagcagactggaacccgaggacttcgccgtgtactactgccagcagtacggcagcagccccttcacctttggcggaggcaccaaggtggaaatcaagagactcgaggacctgaagaacgtgttcccacctgaggtggccgtgttcgagcctagcgaggccgagatcagccacacccagaaagccaccctcgtgtgcctggctaccggcttctaccccgaccatgtggaactgtcttggtgggtcaacggcaaagaggtgcacagcggcgtgtgtaccgacccccagccactgaaagaacagcccgccctgaacgacagccggtactgcctgagcagcagactgagagtgtccgccaccttctggcagaacccccggaaccacttcagatgccaggtgcagttctacggcctgagcgagaacgacgagtggacccaggacagagccaagcccgtgacccagatcgtgtctgccgaagcctggggcagagccgatgatgtgattaagatccactggcaggaaaagaagtccaacaccatcctgggcagccaggaaggcaacaccatgaagaccaacgacacctacatgaagttcagctggctgaccgtgcccgagaagtccctggacaaagaacacagatgcatcgtgcggcacgaaaacaacaagaacggcgtggaccaggaaatcatcttcccacccatcaagaccgatgtgattacaatggaccccaaggacaactgctccaaggacgccaacgataccctgctgctccagctgaccaacaccagcgcctactacatgtacttgttgctgctgctgaagtccgtggtgtacttcgccatcatcacatgctgcctgctgatggctatggtcaagcggaaggacagccggggaagggccaagcgatctggatctggagcaacaaacttctcactactcaaacaagcaggtgacgtggaggagaatcccgggcctactagtatggactggatttggcgcatccttttccttgtcggcgctgctaccggcgcgcattccttcgaacaggtgcaactccaggaatctggccccggactggctaagcccagcgagacactgagcctgacctgtaccgtgtccggcgacagcatcaccagctactactggtcctggatcagacagccccctggcaagggcctggaatggatcggctacatctactacagcggcagcaccaactacaaccccagcctgaagtccagagtgaccatcagcgtggacaccagcaagaaccagttctccctgaagctgagcagcgtgacagccgccgacaccgccgtgtattattgcgccagagatcagcggagaatcgccgctgccggcacccacttttacggcatggatgtgtggggccagggcaccaccgtgaccgtgtcatctacgcgtatccagaaccctgatcctgccgtgtaccagctgcgggatagcaagagcagcgacaagagcgtgtgtctgttcaccgacttcgacagccagaccaacgtgtcccagagcaaggactccgacgtgtacatcaccgataagtgcgtgctggacatgcggagcatggacttcaagagcaactccgccgtggcctggtccaacaagtccgatttcgcctgcgccaacgccttcaacaacagcattatccccgaggacacattcttcccaagccccgagagcagcgactccaccgaccacgtgaagcccaaagagacagagaacaccaagcagcccagcaagagctgccacaagcccaaggccatcgtgcacaccgagaaagtgaacatgatgagcctgaccgtgctgggcctgcggatgctgttcgccaaaaccgtggccgtgaacttcctgctgaccgccaagctgttcttcctcctcaccgcc

SEQ ID NO: 6370 - DNA, 2574 bp, synthetic construct
  source 1..2574: mol_type = other DNA
atggccttaccagtgaccgccttgctcctgccgctggccttgctgctccacgccgccaggccggaagtgcagctggttgaatctggcggaggactggttcagcctggcggatctctgagactgtcttgtgccgccagcggcttcagcttcagcgacttttggatgagctgggtccgacaggcccctggcaaaggacttgaatgggtcgccacaatcagccaggccggcagcgagaaggactacgtggactctgtgaagggcagattcaccatcagccgggacaacgccaagaagtccctgtacctccagatgaacagcctgagagccgaggacaccgccgtgtactattgtgcctctggcgtgtacagcttcgactacagaggccagggcaccctggtcacagtctcttctggtaccggcggaggcggatctggcggcggaggtagcggtggcggaggatctgaattcgacatcctgctgacccagagccccgtgatcctgtccgtgtctcctggcgagagagtgtccttcagctgtcgggccagccagagcatcggcaccaacatccactggtatcagcagcggaccaacggcagccccagactgctgattaagtacgccagcgagtccatcagcggcatccccagcagattttccggcagcggctccggcaccgacttcaccctgagcatcaacagcgtggaaagcgaggacattgccgactactactgccagcagaacaacaactggcccaccaccttcggagccggcaccaagctggaactgaagctcgaggacctgaagaacgtgttcccacctgaggtggccgtgttcgagcctagcgaggccgagatcagccacacccagaaagccaccctcgtgtgcctggctaccggcttctaccccgaccatgtggaactgtcttggtgggtcaacggcaaagaggtgcacagcggcgtgtgtaccgacccccagccactgaaagaacagcccgccctgaacgacagccggtactgcctgagcagcagactgagagtgtccgccaccttctggcagaacccccggaaccacttcagatgccaggtgcagttctacggcctgagcgagaacgacgagtggacccaggacagagccaagcccgtgacccagatcgtgtctgccgaagcctggggcagagccgatgatgtgattaagatccactggcaggaaaagaagtccaacaccatcctgggcagccaggaaggcaacaccatgaagaccaacgacacctacatgaagttcagctggctgaccgtgcccgagaagtccctggacaaagaacacagatgcatcgtgcggcacgaaaacaacaagaacggcgtggaccaggaaatcatcttcccacccatcaagaccgatgtgattacaatggaccccaaggacaactgctccaaggacgccaacgataccctgctgctccagctgaccaacaccagcgcctactacatgtacttgttgctgctgctgaagtccgtggtgtacttcgccatcatcacatgctgcctgctgatggctatggtcaagcggaaggacagccggggaagggccaagcgatctggatctggagcaacaaacttctcactactcaaacaagcaggtgacgtggaggagaatcccgggcctactagtatggactggatttggcgcatccttttccttgtcggcgctgctaccggcgcgcattccttcgaacaggtgcagctgaagcagagcggacctggcctggtgcagcctagccagagcctgtccatcacctgtaccgtgtccggcttcagcctgaccaactacggcgtgcactgggtgcgccagagccctggaaaaggactggaatggctgggagtgatttggagcggcggcaacaccgactacaacacccccttcaccagcagactgtctatcaacaaggacaacagcaagagccaggtgttcttcaagatgaacagcctccagagcaacgacaccgccatctactactgtgctagagccctgacctactatgactacgagttcgcctactggggccagggcacactcgtgacagtgtctgctacgcgtatccagaaccctgatcctgccgtgtaccagctgcgggatagcaagagcagcgacaagagcgtgtgtctgttcaccgacttcgacagccagaccaacgtgtcccagagcaaggactccgacgtgtacatcaccgataagtgcgtgctggacatgcggagcatggacttcaagagcaactccgccgtggcctggtccaacaagtccgatttcgcctgcgccaacgccttcaacaacagcattatccccgaggacacattcttcccaagccccgagagcagcgactccaccgaccacgtgaagcccaaagagacagagaacaccaagcagcccagcaagagctgccacaagcccaaggccatcgtgcacaccgagaaagtgaacatgatgagcctgaccgtgctgggcctgcggatgctgttcgccaaaaccgtggccgtgaacttcctgctgaccgccaagctgttcttcctcctcaccgcc

SEQ ID NO: 6371 - DNA, 2553 bp, synthetic construct
  source 1..2553: mol_type = other DNA
atggccttaccagtgaccgccttgctcctgccgctggccttgctgctccacgccgccaggccggaagtgcagctggttgaatctggcggaggactggttcagcctggcggatctctgagactgtcttgtgccgccagcggcttcagcttcagcgacttttggatgagctgggtccgacaggcccctggcaaaggacttgaatgggtcgccacaatcagccaggccggcagcgagaaggactacgtggactctgtgaagggcagattcaccatcagccgggacaacgccaagaagtccctgtacctccagatgaacagcctgagagccgaggacaccgccgtgtactattgtgcctctggcgtgtacagcttcgactacagaggccagggcaccctggtcacagtctcttctggtaccggcggaggcggatctggcggcggaggtagcggtggcggaggatctgaattcatgacccagagccccaagttcctgctggtgtctgccggcgacagagtgaccctgacatgcaaggccagccagagcgtgaacaacgacgtgtactggtatcagcaggaacccggccagtcccccaagctgctgatctactgggccagcaccagagaaagcggcgtgcccgatagattcaccggcagcggctctggcaccgacttcaccctgacaatcagcagcgtgcaggccgaggacctggccgtgtactactgcaagcagagctacaacctgtacaccttcggcggaggcaccaagctggaaatcaagagactcgaggacctgaagaacgtgttcccacctgaggtggccgtgttcgagcctagcgaggccgagatcagccacacccagaaagccaccctcgtgtgcctggctaccggcttctaccccgaccatgtggaactgtcttggtgggtcaacggcaaagaggtgcacagcggcgtgtgtaccgacccccagccactgaaagaacagcccgccctgaacgacagccggtactgcctgagcagcagactgagagtgtccgccaccttctggcagaacccccggaaccacttcagatgccaggtgcagttctacggcctgagcgagaacgacgagtggacccaggacagagccaagcccgtgacccagatcgtgtctgccgaagcctggggcagagccgatgatgtgattaagatccactggcaggaaaagaagtccaacaccatcctgggcagccaggaaggcaacaccatgaagaccaacgacacctacatgaagttcagctggctgaccgtgcccgagaagtccctggacaaagaacacagatgcatcgtgcggcacgaaaacaacaagaacggcgtggaccaggaaatcatcttcccacccatcaagaccgatgtgattacaatggaccccaaggacaactgctccaaggacgccaacgataccctgctgctccagctgaccaacaccagcgcctactacatgtacttgttgctgctgctgaagtccgtggtgtacttcgccatcatcacatgctgcctgctgatggctatggtcaagcggaaggacagccggggaagggccaagcgatctggatctggagcaacaaacttctcactactcaaacaagcaggtgacgtggaggagaatcccgggcctactagtatggactggatttggcgcatccttttccttgtcggcgctgctaccggcgcgcattccttcgaagaatctggaagaggactggtgcagcctggcggcagcagaaagctgtcttgtgccgccagcggcttcaccttcagcaccagcggaatgcactgggtgcgccaggcccctgagaagggactggaatgggtggcctacatcagctccggcagcaccaccatctaccacgccgataccgtgaagggccggttcaccatcagccgggacaaccccaagaataccctgttcctccagatgaccagcctgcggagcgaggacaccgccatgtactattgctgcgccagaagcggccagttcggcaactacttcgactactggggccagggcaccaccctgaccgtgtcatctacgcgtatccagaaccctgatcctgccgtgtaccagctgcgggatagcaagagcagcgacaagagcgtgtgtctgttcaccgacttcgacagccagaccaacgtgtcccagagcaaggactccgacgtgtacatcaccgataagtgcgtgctggacatgcggagcatggacttcaagagcaactccgccgtggcctggtccaacaagtccgatttcgcctgcgccaacgccttcaacaacagcattatccccgaggacacattcttcccaagccccgagagcagcgactccaccgaccacgtgaagcccaaagagacagagaacaccaagcagcccagcaagagctgccacaagcccaaggccatcgtgcacaccgagaaagtgaacatgatgagcctgaccgtgctgggcctgcggatgctgttcgccaaaaccgtggccgtgaacttcctgctgaccgccaagctgttcttcctcctcaccgcc

SEQ ID NO: 6372 - DNA, 2568 bp, synthetic construct
  source 1..2568: mol_type = other DNA
atggccttaccagtgaccgccttgctcctgccgctggccttgctgctccacgccgccaggccggaagtgcagctggttgaatctggcggaggactggttcagcctggcggatctctgagactgtcttgtgccgccagcggcttcagcttcagcgacttttggatgagctgggtccgacaggcccctggcaaaggacttgaatgggtcgccacaatcagccaggccggcagcgagaaggactacgtggactctgtgaagggcagattcaccatcagccgggacaacgccaagaagtccctgtacctccagatgaacagcctgagagccgaggacaccgccgtgtactattgtgcctctggcgtgtacagcttcgactacagaggccagggcaccctggtcacagtctcttctggtaccggcggaggcggatctggcggcggaggtagcggtggcggaggatctgaattccagagcccatctagcctggctgtgtctgccggcgagaaagtgaccatgagctgcaagagcagccagagcctgctgaacagccggacccggaagaactacctggcctggtatcagcagaagcccggccagagccccaagctgctgatctactgggccagcaccagagaaagcggcgtgcccgatagattcaccggctctggcagcggcaccgacttcaccctgacaatcagcagcgtgcaggccgaggacctggccgtgtactactgcaagcagagcaacctgtacaccttcggcggaggcaccaagctggaaatcaagctcgaggacctgaagaacgtgttcccacctgaggtggccgtgttcgagcctagcgaggccgagatcagccacacccagaaagccaccctcgtgtgcctggctaccggcttctaccccgaccatgtggaactgtcttggtgggtcaacggcaaagaggtgcacagcggcgtgtgtaccgacccccagccactgaaagaacagcccgccctgaacgacagccggtactgcctgagcagcagactgagagtgtccgccaccttctggcagaacccccggaaccacttcagatgccaggtgcagttctacggcctgagcgagaacgacgagtggacccaggacagagccaagcccgtgacccagatcgtgtctgccgaagcctggggcagagccgatgatgtgattaagatccactggcaggaaaagaagtccaacaccatcctgggcagccaggaaggcaacaccatgaagaccaacgacacctacatgaagttcagctggctgaccgtgcccgagaagtccctggacaaagaacacagatgcatcgtgcggcacgaaaacaacaagaacggcgtggaccaggaaatcatcttcccacccatcaagaccgatgtgattacaatggaccccaaggacaactgctccaaggacgccaacgataccctgctgctccagctgaccaacaccagcgcctactacatgtacttgttgctgctgctgaagtccgtggtgtacttcgccatcatcacatgctgcctgctgatggctatggtcaagcggaaggacagccggggaagggccaagcgatctggatctggagcaacaaacttctcactactcaaacaagcaggtgacgtggaggagaatcccgggcctactagtatggactggatttggcgcatccttttccttgtcggcgctgctaccggcgcgcattccttcgaacaggtgcagctggaagagtctggacccgagcttgtgaagcctggggccagcgtgaagctgtcctgtaaagccagcggctacaccttcaccgagtacatcatccactgggtcaagcagcggagcggccagggcctggaatggatcggctggttttaccctggctccggcagcatcaagtacaacgagaagttcaaggacaaggccaccctgaccgccgacaagtccagcagcaccgtgtacatggaactgagcggcctgaccagcgaggacagcgccgtgtatttctgcgccagacacgacggctacagctacttcgactattggggccagggcaccacactgaccgtgtcctctacgcgtatccagaaccctgatcctgccgtgtaccagctgcgggatagcaagagcagcgacaagagcgtgtgtctgttcaccgacttcgacagccagaccaacgtgtcccagagcaaggactccgacgtgtacatcaccgataagtgcgtgctggacatgcggagcatggacttcaagagcaactccgccgtggcctggtccaacaagtccgatttcgcctgcgccaacgccttcaacaacagcattatccccgaggacacattcttcccaagccccgagagcagcgactccaccgaccacgtgaagcccaaagagacagagaacaccaagcagcccagcaagagctgccacaagcccaaggccatcgtgcacaccgagaaagtgaacatgatgagcctgaccgtgctgggcctgcggatgctgttcgccaaaaccgtggccgtgaacttcctgctgaccgccaagctgttcttcctcctcaccgcc

SEQ ID NO: 6373 - DNA, 2577 bp, synthetic construct
  source 1..2577: mol_type = other DNA
atggccttaccagtgaccgccttgctcctgccgctggccttgctgctccacgccgccaggccggaagtgcagctggttgaatctggcggaggactggttcagcctggcggatctctgagactgtcttgtgccgccagcggcttcagcttcagcgacttttggatgagctgggtccgacaggcccctggcaaaggacttgaatgggtcgccacaatcagccaggccggcagcgagaaggactacgtggactctgtgaagggcagattcaccatcagccgggacaacgccaagaagtccctgtacctccagatgaacagcctgagagccgaggacaccgccgtgtactattgtgcctctggcgtgtacagcttcgactacagaggccagggcaccctggtcacagtctcttctggtaccggcggaggcggatctggcggcggaggtagcggtggcggaggatctgaattcgacatccagatgacccagagccccagcagcctgtctgcctctctgggcgagagagtgtccctgacctgtcgggccacacaggaactgagcggctacctgtcttggctgcagcagaagcccgacggcaccatcaagcggctgatctacgccgccagcaccctggatagcggcgtgcccaagagattcagcggcaacagaagcggcagcgactacagcctgaccatcagctccctggaaagcgaggacttcgccgactactactgcctgcagtacgccatctacccctacaccttcggcggaggcaccaagctggaaatcaagctcgaggacctgaagaacgtgttcccacctgaggtggccgtgttcgagcctagcgaggccgagatcagccacacccagaaagccaccctcgtgtgcctggctaccggcttctaccccgaccatgtggaactgtcttggtgggtcaacggcaaagaggtgcacagcggcgtgtgtaccgacccccagccactgaaagaacagcccgccctgaacgacagccggtactgcctgagcagcagactgagagtgtccgccaccttctggcagaacccccggaaccacttcagatgccaggtgcagttctacggcctgagcgagaacgacgagtggacccaggacagagccaagcccgtgacccagatcgtgtctgccgaagcctggggcagagccgatgatgtgattaagatccactggcaggaaaagaagtccaacaccatcctgggcagccaggaaggcaacaccatgaagaccaacgacacctacatgaagttcagctggctgaccgtgcccgagaagtccctggacaaagaacacagatgcatcgtgcggcacgaaaacaacaagaacggcgtggaccaggaaatcatcttcccacccatcaagaccgatgtgattacaatggaccccaaggacaactgctccaaggacgccaacgataccctgctgctccagctgaccaacaccagcgcctactacatgtacttgttgctgctgctgaagtccgtggtgtacttcgccatcatcacatgctgcctgctgatggctatggtcaagcggaaggacagccggggaagggccaagcgatctggatctggagcaacaaacttctcactactcaaacaagcaggtgacgtggaggagaatcccgggcctactagtatggactggatttggcgcatccttttccttgtcggcgctgctaccggcgcgcattccttcgaagaggtgcaactgcagcagtctggccccgagcttgtgaagcctggcgcctccgtgaagatgagctgcaaggccagcggctacacctttaccagctacttcatccactgggtcaagcagaaacccggccagggcctggaatggatcggcttcatcaacccttacaacgacggcagcaagtacaacgagaagttcaagggcaaggccaccctgaccagcgacaagagcagcagcaccgcctacatggaactgtccagcctgacatccgaggacagcgccgtgtactactgcaccagggacgacggctactacggctacgccatggactactggggccagggaacaagcgtcaccgtgtcctctacgcgtatccagaaccctgatcctgccgtgtaccagctgcgggatagcaagagcagcgacaagagcgtgtgtctgttcaccgacttcgacagccagaccaacgtgtcccagagcaaggactccgacgtgtacatcaccgataagtgcgtgctggacatgcggagcatggacttcaagagcaactccgccgtggcctggtccaacaagtccgatttcgcctgcgccaacgccttcaacaacagcattatccccgaggacacattcttcccaagccccgagagcagcgactccaccgaccacgtgaagcccaaagagacagagaacaccaagcagcccagcaagagctgccacaagcccaaggccatcgtgcacaccgagaaagtgaacatgatgagcctgaccgtgctgggcctgcggatgctgttcgccaaaaccgtggccgtgaacttcctgctgaccgccaagctgttcttcctcctcaccgcc

SEQ ID NO: 6374 - DNA, 2592 bp, synthetic construct
  source 1..2592: mol_type = other DNA
atggccttaccagtgaccgccttgctcctgccgctggccttgctgctccacgccgccaggccggaagtgcagctggttgaatctggcggaggactggttcagcctggcggatctctgagactgtcttgtgccgccagcggcttcagcttcagcgacttttggatgagctgggtccgacaggcccctggcaaaggacttgaatgggtcgccacaatcagccaggccggcagcgagaaggactacgtggactctgtgaagggcagattcaccatcagccgggacaacgccaagaagtccctgtacctccagatgaacagcctgagagccgaggacaccgccgtgtactattgtgcctctggcgtgtacagcttcgactacagaggccagggcaccctggtcacagtctcttctggtaccggcggaggcggatctggcggcggaggtagcggtggcggaggatctgaattcgacaccatcgtgctgacacagagccctgcttccctggccgtgtccctgggacagagagccaccatctcttgcagagccagcgagagcgtggacagctacggcaacagcttcatgcactggtatcagcagaagcccggccagccccccaagctgctgatctacctggcctccaacctggaaagcggcgtgcccgccagattttctggcagcggcagcagaaccgacttcaccctgaccatcgaccccgtggaagccgatgatgccgccacctactactgccagcagaacaactacgacccctggaccttcggcggaggcaccaagctggaaatcaagctcgaggacctgaagaacgtgttcccacctgaggtggccgtgttcgagcctagcgaggccgagatcagccacacccagaaagccaccctcgtgtgcctggctaccggcttctaccccgaccatgtggaactgtcttggtgggtcaacggcaaagaggtgcacagcggcgtgtgtaccgacccccagccactgaaagaacagcccgccctgaacgacagccggtactgcctgagcagcagactgagagtgtccgccaccttctggcagaacccccggaaccacttcagatgccaggtgcagttctacggcctgagcgagaacgacgagtggacccaggacagagccaagcccgtgacccagatcgtgtctgccgaagcctggggcagagccgatgatgtgattaagatccactggcaggaaaagaagtccaacaccatcctgggcagccaggaaggcaacaccatgaagaccaacgacacctacatgaagttcagctggctgaccgtgcccgagaagtccctggacaaagaacacagatgcatcgtgcggcacgaaaacaacaagaacggcgtggaccaggaaatcatcttcccacccatcaagaccgatgtgattacaatggaccccaaggacaactgctccaaggacgccaacgataccctgctgctccagctgaccaacaccagcgcctactacatgtacttgttgctgctgctgaagtccgtggtgtacttcgccatcatcacatgctgcctgctgatggctatggtcaagcggaaggacagccggggaagggccaagcgatctggatctggagcaacaaacttctcactactcaaacaagcaggtgacgtggaggagaatcccgggcctactagtatggactggatttggcgcatccttttccttgtcggcgctgctaccggcgcgcattccttcgaagaagtgcaactccagcagagcggccctgagcttgtgaagcctggcgcttccgtgaagatgagctgcaaggccagcggctacaccttcaccagctacgtgatgcactgggtcaagcagaaacctggacagggcctggaatggatcggctacatcaacccctacaacgacggcaccaagtacaacgagaagttcaagggcaaggccaccctgacaagcgacaccagcagcagcaccgcctacatggaactgaacagcctgaccagcgaggacagcgccgtgtacttctgcgccagacccatctacttcgacaacgactacttcgattactggggccagggcaccaccctgaaggtgtcctctacgcgtatccagaaccctgatcctgccgtgtaccagctgcgggatagcaagagcagcgacaagagcgtgtgtctgttcaccgacttcgacagccagaccaacgtgtcccagagcaaggactccgacgtgtacatcaccgataagtgcgtgctggacatgcggagcatggacttcaagagcaactccgccgtggcctggtccaacaagtccgatttcgcctgcgccaacgccttcaacaacagcattatccccgaggacacattcttcccaagccccgagagcagcgactccaccgaccacgtgaagcccaaagagacagagaacaccaagcagcccagcaagagctgccacaagcccaaggccatcgtgcacaccgagaaagtgaacatgatgagcctgaccgtgctgggcctgcggatgctgttcgccaaaaccgtggccgtgaacttcctgctgaccgccaagctgttcttcctcctcaccgcc

SEQ ID NO: 6375 - DNA, 2577 bp, synthetic construct
  source 1..2577: mol_type = other DNA
atggccttaccagtgaccgccttgctcctgccgctggccttgctgctccacgccgccaggccggaagtgcagctggttgaatctggcggaggactggttcagcctggcggatctctgagactgtcttgtgccgccagcggcttcagcttcagcgacttttggatgagctgggtccgacaggcccctggcaaaggacttgaatgggtcgccacaatcagccaggccggcagcgagaaggactacgtggactctgtgaagggcagattcaccatcagccgggacaacgccaagaagtccctgtacctccagatgaacagcctgagagccgaggacaccgccgtgtactattgtgcctctggcgtgtacagcttcgactacagaggccagggcaccctggtcacagtctcttctggtaccggcggaggcggatctggcggcggaggtagcggtggcggaggatctgaattcgacatccagatgacccagagccccagcagcctgtctgccagcgtgggcgacagagtgaccatcacatgcaaggccagccaggacgtgggaatcgccgtggcctggtatcagcagaaacccggcaaggtgcccaagctgctgatctactgggccagcaccagacacaccggcgtgcccgatagattttccggcagcggctccggcaccgacttcaccctgacaatcagctccctccagcccgaggacgtggcaacctactactgccagcagtacagcagctacccctacaccttcggccagggcaccaaggtggaaatcaagagactcgaggacctgaagaacgtgttcccacctgaggtggccgtgttcgagcctagcgaggccgagatcagccacacccagaaagccaccctcgtgtgcctggctaccggcttctaccccgaccatgtggaactgtcttggtgggtcaacggcaaagaggtgcacagcggcgtgtgtaccgacccccagccactgaaagaacagcccgccctgaacgacagccggtactgcctgagcagcagactgagagtgtccgccaccttctggcagaacccccggaaccacttcagatgccaggtgcagttctacggcctgagcgagaacgacgagtggacccaggacagagccaagcccgtgacccagatcgtgtctgccgaagcctggggcagagccgatgatgtgattaagatccactggcaggaaaagaagtccaacaccatcctgggcagccaggaaggcaacaccatgaagaccaacgacacctacatgaagttcagctggctgaccgtgcccgagaagtccctggacaaagaacacagatgcatcgtgcggcacgaaaacaacaagaacggcgtggaccaggaaatcatcttcccacccatcaagaccgatgtgattacaatggaccccaaggacaactgctccaaggacgccaacgataccctgctgctccagctgaccaacaccagcgcctactacatgtacttgttgctgctgctgaagtccgtggtgtacttcgccatcatcacatgctgcctgctgatggctatggtcaagcggaaggacagccggggaagggccaagcgatctggatctggagcaacaaacttctcactactcaaacaagcaggtgacgtggaggagaatcccgggcctactagtatggactggatttggcgcatccttttccttgtcggcgctgctaccggcgcgcattccttcgaagaagtgcaactggtggaatcaggcggcggactggtgcagcctggcggatctctgagactgagctgtgccgccagcggcttcgacttcagccggtactggatgagctgggtgcgccaggcccctggcaaaggactggaatggatcggcgagatcaaccccgacagcagcaccatcaactacgcccccagcctgaaggacaagttcatcatcagccgggacaacgccaagaacagcctgtacctccagatgaactccctgcgggccgaggacaccgccgtgtactattgcgccagacccgacggcaactactggtacttcgacgtgtggggccagggaaccctcgtgaccgtgtcatctacgcgtatccagaaccctgatcctgccgtgtaccagctgcgggatagcaagagcagcgacaagagcgtgtgtctgttcaccgacttcgacagccagaccaacgtgtcccagagcaaggactccgacgtgtacatcaccgataagtgcgtgctggacatgcggagcatggacttcaagagcaactccgccgtggcctggtccaacaagtccgatttcgcctgcgccaacgccttcaacaacagcattatccccgaggacacattcttcccaagccccgagagcagcgactccaccgaccacgtgaagcccaaagagacagagaacaccaagcagcccagcaagagctgccacaagcccaaggccatcgtgcacaccgagaaagtgaacatgatgagcctgaccgtgctgggcctgcggatgctgttcgccaaaaccgtggccgtgaacttcctgctgaccgccaagctgttcttcctcctcaccgcc

SEQ ID NO: 6376 - DNA, 2577 bp, synthetic construct
  source 1..2577: mol_type = other DNA
atggccttaccagtgaccgccttgctcctgccgctggccttgctgctccacgccgccaggccggaagtgcagctggttgaatctggcggaggactggttcagcctggcggatctctgagactgtcttgtgccgccagcggcttcagcttcagcgacttttggatgagctgggtccgacaggcccctggcaaaggacttgaatgggtcgccacaatcagccaggccggcagcgagaaggactacgtggactctgtgaagggcagattcaccatcagccgggacaacgccaagaagtccctgtacctccagatgaacagcctgagagccgaggacaccgccgtgtactattgtgcctctggcgtgtacagcttcgactacagaggccagggcaccctggtcacagtctcttctggtaccggcggaggcggatctggcggcggaggtagcggtggcggaggatctgaattcgacatcgtgatgacccagagccagaagagcatgagcaccagcgtgggcgacagagtgagcatcacctgcaaggccagccaggacgtgatcaccggcgtggcctggtaccagcagaagcccggccagagccccaagctgctgatctacagcgccagctacagatacaccggcgtgcccgacagattcaccggcagcggcagcggcaccgacttcaccttcaccatcagcaacgtgcaggccgaggacctggccgtgtactactgccagcagcactacagcacccccctgaccttcggcgccggcaccaagctggagctgaagctcgaggacctgaagaacgtgttcccacctgaggtggccgtgttcgagcctagcgaggccgagatcagccacacccagaaagccaccctcgtgtgcctggctaccggcttctaccccgaccatgtggaactgtcttggtgggtcaacggcaaagaggtgcacagcggcgtgtgtaccgacccccagccactgaaagaacagcccgccctgaacgacagccggtactgcctgagcagcagactgagagtgtccgccaccttctggcagaacccccggaaccacttcagatgccaggtgcagttctacggcctgagcgagaacgacgagtggacccaggacagagccaagcccgtgacccagatcgtgtctgccgaagcctggggcagagccgatgatgtgattaagatccactggcaggaaaagaagtccaacaccatcctgggcagccaggaaggcaacaccatgaagaccaacgacacctacatgaagttcagctggctgaccgtgcccgagaagtccctggacaaagaacacagatgcatcgtgcggcacgaaaacaacaagaacggcgtggaccaggaaatcatcttcccacccatcaagaccgatgtgattacaatggaccccaaggacaactgctccaaggacgccaacgataccctgctgctccagctgaccaacaccagcgcctactacatgtacttgttgctgctgctgaagtccgtggtgtacttcgccatcatcacatgctgcctgctgatggctatggtcaagcggaaggacagccggggaagggccaagcgatctggatctggagcaacaaacttctcactactcaaacaagcaggtgacgtggaggagaatcccgggcctactagtatggactggatttggcgcatccttttccttgtcggcgctgctaccggcgcgcattccttcgaacaggtgcagctgcagcagcccggcgccgagctggtgagacccggcgccagcgtgaagctgagctgcaaggccagcggctacagcttcaccacctactggatgaactgggtgaagcagagacccggccagggcctggagtggatcggcatgatccaccccagcgacagcgagaccagactgaaccagaagttcaaggacaaggccaccctgaccgtggacaagagcagcagcaccgcctacatgcagctgagcagccccaccagcgaggacagcgccgtgtactactgcgccagaagcaccatgatcgccaccagagccatggactactggggccagggcaccagcgtgaccgtgagcagcacgcgtatccagaaccctgatcctgccgtgtaccagctgcgggatagcaagagcagcgacaagagcgtgtgtctgttcaccgacttcgacagccagaccaacgtgtcccagagcaaggactccgacgtgtacatcaccgataagtgcgtgctggacatgcggagcatggacttcaagagcaactccgccgtggcctggtccaacaagtccgatttcgcctgcgccaacgccttcaacaacagcattatccccgaggacacattcttcccaagccccgagagcagcgactccaccgaccacgtgaagcccaaagagacagagaacaccaagcagcccagcaagagctgccacaagcccaaggccatcgtgcacaccgagaaagtgaacatgatgagcctgaccgtgctgggcctgcggatgctgttcgccaaaaccgtggccgtgaacttcctgctgaccgccaagctgttcttcctcctcaccgcc

SEQ ID NO: 6377 - DNA, 2595 bp, synthetic construct
  source 1..2595: mol_type = other DNA
atggccttaccagtgaccgccttgctcctgccgctggccttgctgctccacgccgccaggccggaagtgcagctggttgaatctggcggaggactggttcagcctggcggatctctgagactgtcttgtgccgccagcggcttcagcttcagcgacttttggatgagctgggtccgacaggcccctggcaaaggacttgaatgggtcgccacaatcagccaggccggcagcgagaaggactacgtggactctgtgaagggcagattcaccatcagccgggacaacgccaagaagtccctgtacctccagatgaacagcctgagagccgaggacaccgccgtgtactattgtgcctctggcgtgtacagcttcgactacagaggccagggcaccctggtcacagtctcttctggtaccggcggaggcggatctggcggcggaggtagcggtggcggaggatctgaattccagagcgtgctgacacagcctccatccgtgtctggcgctccaggccagagagtgaccatctcctgtaccggcagcggcagcaacatcggagccccctacgacgtgtcctggtatcagcaactgcctggcaccgcccccaagctgctgatctaccacaacaacaagcggcccagcggcgtgcccgatagattcagcggctctaagagcggcaccagcgccagcctggctatcactggactccaggccgaggacgaggccgactactactgtgccacagtggaagccggcctgagcggctctgtgtttggcggcggaacaaagctgaccgtgctgggagctctcgaggacctgaagaacgtgttcccacctgaggtggccgtgttcgagcctagcgaggccgagatcagccacacccagaaagccaccctcgtgtgcctggctaccggcttctaccccgaccatgtggaactgtcttggtgggtcaacggcaaagaggtgcacagcggcgtgtgtaccgacccccagccactgaaagaacagcccgccctgaacgacagccggtactgcctgagcagcagactgagagtgtccgccaccttctggcagaacccccggaaccacttcagatgccaggtgcagttctacggcctgagcgagaacgacgagtggacccaggacagagccaagcccgtgacccagatcgtgtctgccgaagcctggggcagagccgatgatgtgattaagatccactggcaggaaaagaagtccaacaccatcctgggcagccaggaaggcaacaccatgaagaccaacgacacctacatgaagttcagctggctgaccgtgcccgagaagtccctggacaaagaacacagatgcatcgtgcggcacgaaaacaacaagaacggcgtggaccaggaaatcatcttcccacccatcaagaccgatgtgattacaatggaccccaaggacaactgctccaaggacgccaacgataccctgctgctccagctgaccaacaccagcgcctactacatgtacttgttgctgctgctgaagtccgtggtgtacttcgccatcatcacatgctgcctgctgatggctatggtcaagcggaaggacagccggggaagggccaagcgatctggatctggagcaacaaacttctcactactcaaacaagcaggtgacgtggaggagaatcccgggcctactagtatggactggatttggcgcatccttttccttgtcggcgctgctaccggcgcgcattccttcgaacaggtgcaactggtgcagagcggagccgaagtgaagaaacctggggccagcgtgaaggtgtcctgcaaggtgtccggctacaccctgaccgagctgagcattcactgggtgcgccaggcccctggcaagggactggaatggatgggcggcttcgaccccgaagagaacgagatcgtgtacgcccagcggttccagggcagagtgacaatgaccgaggacaccagcaccgacaccgcctacatggaactgagcagcctgcggagcgaggataccgccgtgtactactgcgccatcgtgggcagcttcagccctctgacactgggcctgtggggccagggaactatggtcaccgtgtccagcacgcgtatccagaaccctgatcctgccgtgtaccagctgcgggatagcaagagcagcgacaagagcgtgtgtctgttcaccgacttcgacagccagaccaacgtgtcccagagcaaggactccgacgtgtacatcaccgataagtgcgtgctggacatgcggagcatggacttcaagagcaactccgccgtggcctggtccaacaagtccgatttcgcctgcgccaacgccttcaacaacagcattatccccgaggacacattcttcccaagccccgagagcagcgactccaccgaccacgtgaagcccaaagagacagagaacaccaagcagcccagcaagagctgccacaagcccaaggccatcgtgcacaccgagaaagtgaacatgatgagcctgaccgtgctgggcctgcggatgctgttcgccaaaaccgtggccgtgaacttcctgctgaccgccaagctgttcttcctcctcaccgcc

SEQ ID NO: 6378 - DNA, 2595 bp, synthetic construct
  source 1..2595: mol_type = other DNA
atggccttaccagtgaccgccttgctcctgccgctggccttgctgctccacgccgccaggccggaagtgcagctggttgaatctggcggaggactggttcagcctggcggatctctgagactgtcttgtgccgccagcggcttcagcttcagcgacttttggatgagctgggtccgacaggcccctggcaaaggacttgaatgggtcgccacaatcagccaggccggcagcgagaaggactacgtggactctgtgaagggcagattcaccatcagccgggacaacgccaagaagtccctgtacctccagatgaacagcctgagagccgaggacaccgccgtgtactattgtgcctctggcgtgtacagcttcgactacagaggccagggcaccctggtcacagtctcttctggtaccggcggaggcggatctggcggcggaggtagcggtggcggaggatctgaattccagagcgtgctgacacagcctccatccgtgtctggcgctccaggccagagagtgaccatctcctgtaccggcagcggcagcaacatcggagccccctacgacgtgtcctggtatcagcaactgcctggcaccgcccccaagctgctgatctaccacaacaacaagcggcccagcggcgtgcccgatagattcagcggctctaagagcggcaccagcgccagcctggctatcactggactccaggccgaggacgaggccgactactactgccagagctacgacagcagcagcatcagcaccatcttcggcggaggcaccaagctgacagtgctgggagctctcgaggacctgaagaacgtgttcccacctgaggtggccgtgttcgagcctagcgaggccgagatcagccacacccagaaagccaccctcgtgtgcctggctaccggcttctaccccgaccatgtggaactgtcttggtgggtcaacggcaaagaggtgcacagcggcgtgtgtaccgacccccagccactgaaagaacagcccgccctgaacgacagccggtactgcctgagcagcagactgagagtgtccgccaccttctggcagaacccccggaaccacttcagatgccaggtgcagttctacggcctgagcgagaacgacgagtggacccaggacagagccaagcccgtgacccagatcgtgtctgccgaagcctggggcagagccgatgatgtgattaagatccactggcaggaaaagaagtccaacaccatcctgggcagccaggaaggcaacaccatgaagaccaacgacacctacatgaagttcagctggctgaccgtgcccgagaagtccctggacaaagaacacagatgcatcgtgcggcacgaaaacaacaagaacggcgtggaccaggaaatcatcttcccacccatcaagaccgatgtgattacaatggaccccaaggacaactgctccaaggacgccaacgataccctgctgctccagctgaccaacaccagcgcctactacatgtacttgttgctgctgctgaagtccgtggtgtacttcgccatcatcacatgctgcctgctgatggctatggtcaagcggaaggacagccggggaagggccaagcgatctggatctggagcaacaaacttctcactactcaaacaagcaggtgacgtggaggagaatcccgggcctactagtatggactggatttggcgcatccttttccttgtcggcgctgctaccggcgcgcattccttcgaacaggtgcaactggtgcagagcggagccgaagtgaagaaacctggggccagcgtgaaggtgtcctgcaaggtgtccggctacaccctgaccgagctgagcattcactgggtgcgccaggcccctggcaagggactggaatggatgggcggcttcgaccccgaagagaacgagatcgtgtacgcccagcggttccagggcagagtgacaatgaccgaggacaccagcaccgacaccgcctacatggaactgagcagcctgcggagcgaggataccgccgtgtactactgtgccatcgtgggcagcttcagcggaatcgcctacagaccttggggccagggcacaatggtcaccgtgtctagcacgcgtatccagaaccctgatcctgccgtgtaccagctgcgggatagcaagagcagcgacaagagcgtgtgtctgttcaccgacttcgacagccagaccaacgtgtcccagagcaaggactccgacgtgtacatcaccgataagtgcgtgctggacatgcggagcatggacttcaagagcaactccgccgtggcctggtccaacaagtccgatttcgcctgcgccaacgccttcaacaacagcattatccccgaggacacattcttcccaagccccgagagcagcgactccaccgaccacgtgaagcccaaagagacagagaacaccaagcagcccagcaagagctgccacaagcccaaggccatcgtgcacaccgagaaagtgaacatgatgagcctgaccgtgctgggcctgcggatgctgttcgccaaaaccgtggccgtgaacttcctgctgaccgccaagctgttcttcctcctcaccgcc

SEQ ID NO: 6379 - DNA, 2559 bp, synthetic construct
  source 1..2559: mol_type = other DNA
atggccttaccagtgaccgccttgctcctgccgctggccttgctgctccacgccgccaggccggaagtgcagctggttgaatctggcggaggactggttcagcctggcggatctctgagactgtcttgtgccgccagcggcttcagcttcagcgacttttggatgagctgggtccgacaggcccctggcaaaggacttgaatgggtcgccacaatcagccaggccggcagcgagaaggactacgtggactctgtgaagggcagattcaccatcagccgggacaacgccaagaagtccctgtacctccagatgaacagcctgagagccgaggacaccgccgtgtactattgtgcctctggcgtgtacagcttcgactacagaggccagggcaccctggtcacagtctcttctggtaccggcggaggcggatctggcggcggaggtagcggtggcggaggatctgaattcgacatccagatgacccagagccccagcagcctgtctgccagcgtgggcgacagagtgaccatcacctgtagagccagccagggcatcagaaacaacctggcctggtatcagcagaagcccggcaaggcccccaagcggctgatctacgccgccagcaatctccagagcggcgtgcccagcagattcacaggctctggcagcggcaccgagttcaccctgatcgtgtctagcctccagcccgaggacttcgccacctactactgcctccagcaccacagctaccccctgacatctggcggaggcaccaaggtggaactcgaggacctgaagaacgtgttcccacctgaggtggccgtgttcgagcctagcgaggccgagatcagccacacccagaaagccaccctcgtgtgcctggctaccggcttctaccccgaccatgtggaactgtcttggtgggtcaacggcaaagaggtgcacagcggcgtgtgtaccgacccccagccactgaaagaacagcccgccctgaacgacagccggtactgcctgagcagcagactgagagtgtccgccaccttctggcagaacccccggaaccacttcagatgccaggtgcagttctacggcctgagcgagaacgacgagtggacccaggacagagccaagcccgtgacccagatcgtgtctgccgaagcctggggcagagccgatgatgtgattaagatccactggcaggaaaagaagtccaacaccatcctgggcagccaggaaggcaacaccatgaagaccaacgacacctacatgaagttcagctggctgaccgtgcccgagaagtccctggacaaagaacacagatgcatcgtgcggcacgaaaacaacaagaacggcgtggaccaggaaatcatcttcccacccatcaagaccgatgtgattacaatggaccccaaggacaactgctccaaggacgccaacgataccctgctgctccagctgaccaacaccagcgcctactacatgtacttgttgctgctgctgaagtccgtggtgtacttcgccatcatcacatgctgcctgctgatggctatggtcaagcggaaggacagccggggaagggccaagcgatctggatctggagcaacaaacttctcactactcaaacaagcaggtgacgtggaggagaatcccgggcctactagtatggactggatttggcgcatccttttccttgtcggcgctgctaccggcgcgcattccttcgaagaggtgcaggtgctggaaagtggcggaggactggtgcagcctggcggctctctgagactgtcttgtgccgccagcggcttcaccttcagcagctacgccatgagctgggtgcgccaggcccctggaaaaggactggaatgggtgtccgccatcagcggctctggcgggtctaccaactacgccgatagcgtgaagggccggttcaccatcagccgggacaacagcaagaacaccctgtacctccagatgaacagcctgcgggccgaggacaccgccgtgtattattgtgccggcagcagcgggtggagcgagtattggggacagggcaccctcgtgaccgtgtcctctacgcgtatccagaaccctgatcctgccgtgtaccagctgcgggatagcaagagcagcgacaagagcgtgtgtctgttcaccgacttcgacagccagaccaacgtgtcccagagcaaggactccgacgtgtacatcaccgataagtgcgtgctggacatgcggagcatggacttcaagagcaactccgccgtggcctggtccaacaagtccgatttcgcctgcgccaacgccttcaacaacagcattatccccgaggacacattcttcccaagccccgagagcagcgactccaccgaccacgtgaagcccaaagagacagagaacaccaagcagcccagcaagagctgccacaagcccaaggccatcgtgcacaccgagaaagtgaacatgatgagcctgaccgtgctgggcctgcggatgctgttcgccaaaaccgtggccgtgaacttcctgctgaccgccaagctgttcttcctcctcaccgcc

SEQ ID NO: 6380 - DNA, 2577 bp, synthetic construct
  source 1..2577: mol_type = other DNA
atggccttaccagtgaccgccttgctcctgccgctggccttgctgctccacgccgccaggccggaagtgcagctggttgaatctggcggaggactggttcagcctggcggatctctgagactgtcttgtgccgccagcggcttcagcttcagcgacttttggatgagctgggtccgacaggcccctggcaaaggacttgaatgggtcgccacaatcagccaggccggcagcgagaaggactacgtggactctgtgaagggcagattcaccatcagccgggacaacgccaagaagtccctgtacctccagatgaacagcctgagagccgaggacaccgccgtgtactattgtgcctctggcgtgtacagcttcgactacagaggccagggcaccctggtcacagtctcttctggtaccggcggaggcggatctggcggcggaggtagcggtggcggaggatctgaattcgacgagatccagctggtgcagagcggagccgaagtgaagaagcctggcgagagcctgcggatcagctgcaagggcagcggcttcaacatcgaggactactacatccactgggtgcgccagatgcccggcaagggcctggaatggatgggcagaatcgaccccgagaacgacgagactaagtacggccccatcttccagggccacgtgaccatcagcgccgacaccagcatcaacaccgtgtacctccagtggtccagcctgaaggccagcgacaccgccatgtactactgcgcctttagaggcggcgtgtactggggccagggcaccacagtgacagtgtctagcctcgaggacctgaagaacgtgttcccacctgaggtggccgtgttcgagcctagcgaggccgagatcagccacacccagaaagccaccctcgtgtgcctggctaccggcttctaccccgaccatgtggaactgtcttggtgggtcaacggcaaagaggtgcacagcggcgtgtgtaccgacccccagccactgaaagaacagcccgccctgaacgacagccggtactgcctgagcagcagactgagagtgtccgccaccttctggcagaacccccggaaccacttcagatgccaggtgcagttctacggcctgagcgagaacgacgagtggacccaggacagagccaagcccgtgacccagatcgtgtctgccgaagcctggggcagagccgatgatgtgattaagatccactggcaggaaaagaagtccaacaccatcctgggcagccaggaaggcaacaccatgaagaccaacgacacctacatgaagttcagctggctgaccgtgcccgagaagtccctggacaaagaacacagatgcatcgtgcggcacgaaaacaacaagaacggcgtggaccaggaaatcatcttcccacccatcaagaccgatgtgattacaatggaccccaaggacaactgctccaaggacgccaacgataccctgctgctccagctgaccaacaccagcgcctactacatgtacttgttgctgctgctgaagtccgtggtgtacttcgccatcatcacatgctgcctgctgatggctatggtcaagcggaaggacagccggggaagggccaagcgatctggatctggagcaacaaacttctcactactcaaacaagcaggtgacgtggaggagaatcccgggcctactagtatggactggatttggcgcatccttttccttgtcggcgctgctaccggcgcgcattccttcgaagatgtcgtgatgacccagagccccgacagcctggctgtgtctctgggagagagagccaccatcaactgcaagtccagccagtccctgctggacagcgacggcaagacctacctgaactggctccagcagaagcccggccagccccccaagagactgatctccctggtgtccaagctggactccggcgtgcccgatagattttccggctctggcagcggcaccgacttcaccctgacaatcagctcccttcaggccgaggacgtggccgtgtactattgctggcagggcacacacttccccggcacctttggcggaggcaccaaggtggaaatcaagacgcgtatccagaaccctgatcctgccgtgtaccagctgcgggatagcaagagcagcgacaagagcgtgtgtctgttcaccgacttcgacagccagaccaacgtgtcccagagcaaggactccgacgtgtacatcaccgataagtgcgtgctggacatgcggagcatggacttcaagagcaactccgccgtggcctggtccaacaagtccgatttcgcctgcgccaacgccttcaacaacagcattatccccgaggacacattcttcccaagccccgagagcagcgactccaccgaccacgtgaagcccaaagagacagagaacaccaagcagcccagcaagagctgccacaagcccaaggccatcgtgcacaccgagaaagtgaacatgatgagcctgaccgtgctgggcctgcggatgctgttcgccaaaaccgtggccgtgaacttcctgctgaccgccaagctgttcttcctcctcaccgcc

SEQ ID NO: 6381 - DNA, 2598 bp, synthetic construct
  source 1..2598: mol_type = other DNA
atggccttaccagtgaccgccttgctcctgccgctggccttgctgctccacgccgccaggccggaagtgcagctggttgaatctggcggaggactggttcagcctggcggatctctgagactgtcttgtgccgccagcggcttcagcttcagcgacttttggatgagctgggtccgacaggcccctggcaaaggacttgaatgggtcgccacaatcagccaggccggcagcgagaaggactacgtggactctgtgaagggcagattcaccatcagccgggacaacgccaagaagtccctgtacctccagatgaacagcctgagagccgaggacaccgccgtgtactattgtgcctctggcgtgtacagcttcgactacagaggccagggcaccctggtcacagtctcttctggtaccggcggaggcggatctggcggcggaggtagcggtggcggaggatctgaattcgacgagcttgtgatgacccagagccccagcagcctgacagtgacagccggcgagaaagtgaccatgagctgcaagagcagccagagcctgctgaacagcggcaaccagaagaactacctgacctggtatcagcagaagcccggccagccccccaagctgctgatctactgggccagcaccagagaaagcggcgtgcccgatagattcaccggctctggcagcggcaccgacttcaccctgacaatcagcagcgtgcaggccgaggacctggccgtgtactactgccagaacgactacagctaccccctgaccttcggagccggcaccaagctggaaatcaagctcgaggacctgaagaacgtgttcccacctgaggtggccgtgttcgagcctagcgaggccgagatcagccacacccagaaagccaccctcgtgtgcctggctaccggcttctaccccgaccatgtggaactgtcttggtgggtcaacggcaaagaggtgcacagcggcgtgtgtaccgacccccagccactgaaagaacagcccgccctgaacgacagccggtactgcctgagcagcagactgagagtgtccgccaccttctggcagaacccccggaaccacttcagatgccaggtgcagttctacggcctgagcgagaacgacgagtggacccaggacagagccaagcccgtgacccagatcgtgtctgccgaagcctggggcagagccgatgatgtgattaagatccactggcaggaaaagaagtccaacaccatcctgggcagccaggaaggcaacaccatgaagaccaacgacacctacatgaagttcagctggctgaccgtgcccgagaagtccctggacaaagaacacagatgcatcgtgcggcacgaaaacaacaagaacggcgtggaccaggaaatcatcttcccacccatcaagaccgatgtgattacaatggaccccaaggacaactgctccaaggacgccaacgataccctgctgctccagctgaccaacaccagcgcctactacatgtacttgttgctgctgctgaagtccgtggtgtacttcgccatcatcacatgctgcctgctgatggctatggtcaagcggaaggacagccggggaagggccaagcgatctggatctggagcaacaaacttctcactactcaaacaagcaggtgacgtggaggagaatcccgggcctactagtatggactggatttggcgcatccttttccttgtcggcgctgctaccggcgcgcattccttcgaagaagtgcagctgctggaacagtctggcgccgaacttgtgcggcctggcaccagcgtgaagatcagctgtaaagccagcggctacgccttcaccaactactggctgggctgggtcaagcagaggcctggacacggcctggaatggatcggcgacatctttcccggctccggcaacatccactacaacgagaagttcaagggcaaggccaccctgaccgccgacaagtctagcagcaccgcctacatgcagctgtccagcctgacctttgaggacagcgccgtgtatttctgtgcccggctgcggaactgggacgagcccatggattattggggccagggcaccaccgtgaccgtgtctagtacgcgtatccagaaccctgatcctgccgtgtaccagctgcgggatagcaagagcagcgacaagagcgtgtgtctgttcaccgacttcgacagccagaccaacgtgtcccagagcaaggactccgacgtgtacatcaccgataagtgcgtgctggacatgcggagcatggacttcaagagcaactccgccgtggcctggtccaacaagtccgatttcgcctgcgccaacgccttcaacaacagcattatccccgaggacacattcttcccaagccccgagagcagcgactccaccgaccacgtgaagcccaaagagacagagaacaccaagcagcccagcaagagctgccacaagcccaaggccatcgtgcacaccgagaaagtgaacatgatgagcctgaccgtgctgggcctgcggatgctgttcgccaaaaccgtggccgtgaacttcctgctgaccgccaagctgttcttcctcctcaccgcc

SEQ ID NO: 6382 - DNA, 2601 bp, synthetic construct
  source 1..2601: mol_type = other DNA
atggccttaccagtgaccgccttgctcctgccgctggccttgctgctccacgccgccaggccggaagtgcagctggttgaatctggcggaggactggttcagcctggcggatctctgagactgtcttgtgccgccagcggcttcagcttcagcgacttttggatgagctgggtccgacaggcccctggcaaaggacttgaatgggtcgccacaatcagccaggccggcagcgagaaggactacgtggactctgtgaagggcagattcaccatcagccgggacaacgccaagaagtccctgtacctccagatgaacagcctgagagccgaggacaccgccgtgtactattgtgcctctggcgtgtacagcttcgactacagaggccagggcaccctggtcacagtctcttctggtaccggcggaggcggatctggcggcggaggtagcggtggcggaggatctgaattcgacgagctgcagatgacccagagccctagcagcctgtctgccagcgtgggcgacagagtgaccatcacctgtagagccagccagagcatcagcagctacctgaactggtatcagcagaagcccggccagccccccaaactgctgatctactgggccagcaccagagaaagcggcgtgcccgatagattcagcggcagcgagagcggcaccaactacaccctgaccatcagctccctgcagcccgaggacttcgccacctacttttgccagcagagcgacagcctgcccatcacctttggacagggcacccggctggacattcagctcgaggacctgaagaacgtgttcccacctgaggtggccgtgttcgagcctagcgaggccgagatcagccacacccagaaagccaccctcgtgtgcctggctaccggcttctaccccgaccatgtggaactgtcttggtgggtcaacggcaaagaggtgcacagcggcgtgtgtaccgacccccagccactgaaagaacagcccgccctgaacgacagccggtactgcctgagcagcagactgagagtgtccgccaccttctggcagaacccccggaaccacttcagatgccaggtgcagttctacggcctgagcgagaacgacgagtggacccaggacagagccaagcccgtgacccagatcgtgtctgccgaagcctggggcagagccgatgatgtgattaagatccactggcaggaaaagaagtccaacaccatcctgggcagccaggaaggcaacaccatgaagaccaacgacacctacatgaagttcagctggctgaccgtgcccgagaagtccctggacaaagaacacagatgcatcgtgcggcacgaaaacaacaagaacggcgtggaccaggaaatcatcttcccacccatcaagaccgatgtgattacaatggaccccaaggacaactgctccaaggacgccaacgataccctgctgctccagctgaccaacaccagcgcctactacatgtacttgttgctgctgctgaagtccgtggtgtacttcgccatcatcacatgctgcctgctgatggctatggtcaagcggaaggacagccggggaagggccaagcgatctggatctggagcaacaaacttctcactactcaaacaagcaggtgacgtggaggagaatcccgggcctactagtatggactggatttggcgcatccttttccttgtcggcgctgctaccggcgcgcattccttcgaagaggtgcaactgctggaatctgggggcggagtggtgcagcctggcagaagcctgagactgagctgtgccgccagcggcttcaccttcagctcctacggaatgcactgggtgcgccaggcccctggcaaaggactggaatgggtggccgtgatctcctacgacggcagcaacaagtactacgccgacagcgtgaagggccggttcaccatcagccgggacaacagcaagaacaccctgtacctgcagatgaacagcctgcgggccgaggacaccgccgtgtactactgcgccaaggatatgggctggggcagcggctggcggccttactactactacggcatggacgtgtggggccagggcaccaccgtgacagtgtcatctacgcgtatccagaaccctgatcctgccgtgtaccagctgcgggatagcaagagcagcgacaagagcgtgtgtctgttcaccgacttcgacagccagaccaacgtgtcccagagcaaggactccgacgtgtacatcaccgataagtgcgtgctggacatgcggagcatggacttcaagagcaactccgccgtggcctggtccaacaagtccgatttcgcctgcgccaacgccttcaacaacagcattatccccgaggacacattcttcccaagccccgagagcagcgactccaccgaccacgtgaagcccaaagagacagagaacaccaagcagcccagcaagagctgccacaagcccaaggccatcgtgcacaccgagaaagtgaacatgatgagcctgaccgtgctgggcctgcggatgctgttcgccaaaaccgtggccgtgaacttcctgctgaccgccaagctgttcttcctcctcaccgcc

SEQ ID NO: 6383 - DNA, 2592 bp, synthetic construct
  source 1..2592: mol_type = other DNA
atggccttaccagtgaccgccttgctcctgccgctggccttgctgctccacgccgccaggccggaagtgcagctggttgaatctggcggaggactggttcagcctggcggatctctgagactgtcttgtgccgccagcggcttcagcttcagcgacttttggatgagctgggtccgacaggcccctggcaaaggacttgaatgggtcgccacaatcagccaggccggcagcgagaaggactacgtggactctgtgaagggcagattcaccatcagccgggacaacgccaagaagtccctgtacctccagatgaacagcctgagagccgaggacaccgccgtgtactattgtgcctctggcgtgtacagcttcgactacagaggccagggcaccctggtcacagtctcttctggtaccggcggaggcggatctggcggcggaggtagcggtggcggaggatctgaattcgacgacatccaaatgacacagagtccttctagtttgagtgcgagcgtgggggacagggtgaccattacctgcagggccagccagagcataagctcataccttaattggtaccagcaaaaaccaggtaaggcccctaagctcctgatctacgcggcctcttcacttcaatctggggtcccttcccgcttcagtggctccggcagcggcaccgacttcacgctcactatatcaagtctgcagcctgaggatctcgccacctattactgtcaacaaagttattccacccctttcacctttggaccgggcacgaaagtggatattaagctcgaggacctgaagaacgtgttcccacctgaggtggccgtgttcgagcctagcgaggccgagatcagccacacccagaaagccaccctcgtgtgcctggctaccggcttctaccccgaccatgtggaactgtcttggtgggtcaacggcaaagaggtgcacagcggcgtgtgtaccgacccccagccactgaaagaacagcccgccctgaacgacagccggtactgcctgagcagcagactgagagtgtccgccaccttctggcagaacccccggaaccacttcagatgccaggtgcagttctacggcctgagcgagaacgacgagtggacccaggacagagccaagcccgtgacccagatcgtgtctgccgaagcctggggcagagccgatgatgtgattaagatccactggcaggaaaagaagtccaacaccatcctgggcagccaggaaggcaacaccatgaagaccaacgacacctacatgaagttcagctggctgaccgtgcccgagaagtccctggacaaagaacacagatgcatcgtgcggcacgaaaacaacaagaacggcgtggaccaggaaatcatcttcccacccatcaagaccgatgtgattacaatggaccccaaggacaactgctccaaggacgccaacgataccctgctgctccagctgaccaacaccagcgcctactacatgtacttgttgctgctgctgaagtccgtggtgtacttcgccatcatcacatgctgcctgctgatggctatggtcaagcggaaggacagccggggaagggccaagcgatctggatctggagcaacaaacttctcactactcaaacaagcaggtgacgtggaggagaatcccgggcctactagtatggactggatttggcgcatccttttccttgtcggcgctgctaccggcgcgcattccttcgaagtgcacgaggtccagcttgtgcagtccggggcagaggtcaagaagcctggttctagcgtaaaagtgagttgcaaagcctcaggtgggacattttcatcctacgcgatcagttgggttagacaggctcctggtcaagggctggaatggatgggcggaattattccaatcttcggaacagcgaattacgcgcagaagttccagggtagagtaaccatcactgctgacaagtccacctccaccgcatacatggaattgtctagtctccggagcgaggatacggcggtgtattattgtgctacgttcgccctgtttggcttccgcgaacaggctttcgacatctgggggcagggcacgacagtcacggttagtagtacgcgtatccagaaccctgatcctgccgtgtaccagctgcgggatagcaagagcagcgacaagagcgtgtgtctgttcaccgacttcgacagccagaccaacgtgtcccagagcaaggactccgacgtgtacatcaccgataagtgcgtgctggacatgcggagcatggacttcaagagcaactccgccgtggcctggtccaacaagtccgatttcgcctgcgccaacgccttcaacaacagcattatccccgaggacacattcttcccaagccccgagagcagcgactccaccgaccacgtgaagcccaaagagacagagaacaccaagcagcccagcaagagctgccacaagcccaaggccatcgtgcacaccgagaaagtgaacatgatgagcctgaccgtgctgggcctgcggatgctgttcgccaaaaccgtggccgtgaacttcctgctgaccgccaagctgttcttcctcctcaccgcc

SEQ ID NO: 6384 - DNA, 2586 bp, synthetic construct
  source 1..2586: mol_type = other DNA
atggccttaccagtgaccgccttgctcctgccgctggccttgctgctccacgccgccaggccggaagtgcagctggttgaatctggcggaggactggttcagcctggcggatctctgagactgtcttgtgccgccagcggcttcagcttcagcgacttttggatgagctgggtccgacaggcccctggcaaaggacttgaatgggtcgccacaatcagccaggccggcagcgagaaggactacgtggactctgtgaagggcagattcaccatcagccgggacaacgccaagaagtccctgtacctccagatgaacagcctgagagccgaggacaccgccgtgtactattgtgcctctggcgtgtacagcttcgactacagaggccagggcaccctggtcacagtctcttctggtaccggcggaggcggatctggcggcggaggtagcggtggcggaggatctgaattcgacatcgtgctgacccagagccctctgagcctggccgtgtctctgggacagcctgccatcatcagctgcaaggccagccagagcgtgtcctttgccggcacctctctgatgcactggtatcaccagaagcccggccagcagcccagactgctgatctacagagccagcaacctggaagccggcgtgcccgatagattttccggcagcggcagcaagaccgacttcaccctgaccatcagccccgtggaagccgaagatgccgccacctactactgccagcagagcagagagtacccctacaccttcggcggaggcaccaagctggaaatcaagaggctcgaggacctgaagaacgtgttcccacctgaggtggccgtgttcgagcctagcgaggccgagatcagccacacccagaaagccaccctcgtgtgcctggctaccggcttctaccccgaccatgtggaactgtcttggtgggtcaacggcaaagaggtgcacagcggcgtgtgtaccgacccccagccactgaaagaacagcccgccctgaacgacagccggtactgcctgagcagcagactgagagtgtccgccaccttctggcagaacccccggaaccacttcagatgccaggtgcagttctacggcctgagcgagaacgacgagtggacccaggacagagccaagcccgtgacccagatcgtgtctgccgaagcctggggcagagccgatgatgtgattaagatccactggcaggaaaagaagtccaacaccatcctgggcagccaggaaggcaacaccatgaagaccaacgacacctacatgaagttcagctggctgaccgtgcccgagaagtccctggacaaagaacacagatgcatcgtgcggcacgaaaacaacaagaacggcgtggaccaggaaatcatcttcccacccatcaagaccgatgtgattacaatggaccccaaggacaactgctccaaggacgccaacgataccctgctgctccagctgaccaacaccagcgcctactacatgtacttgttgctgctgctgaagtccgtggtgtacttcgccatcatcacatgctgcctgctgatggctatggtcaagcggaaggacagccggggaagggccaagcgatctggatctggagcaacaaacttctcactactcaaacaagcaggtgacgtggaggagaatcccgggcctactagtatggactggatttggcgcatccttttccttgtcggcgctgctaccggcgcgcattccttcgaacaggtccaactggtgcagagcggagccgaggtcgtgaagcctggcgcttccgtgaagattagctgcaaagccagcggctacacctttaccggctactttatgaactgggtcaagcagagccctggccagagcctggaatggatcggcagaatccacccctacgacggcgacaccttctacaaccagaagttccagggcaaggccaccctgacagtggacaagagcagcaacaccgcccacatggaactgctgagcctgaccagcgaggacttcgccgtgtactactgcaccagatacgacggcagccgggctatggactattggggccagggcaccaccgtgaccgtgtctagtacgcgtatccagaaccctgatcctgccgtgtaccagctgcgggatagcaagagcagcgacaagagcgtgtgtctgttcaccgacttcgacagccagaccaacgtgtcccagagcaaggactccgacgtgtacatcaccgataagtgcgtgctggacatgcggagcatggacttcaagagcaactccgccgtggcctggtccaacaagtccgatttcgcctgcgccaacgccttcaacaacagcattatccccgaggacacattcttcccaagccccgagagcagcgactccaccgaccacgtgaagcccaaagagacagagaacaccaagcagcccagcaagagctgccacaagcccaaggccatcgtgcacaccgagaaagtgaacatgatgagcctgaccgtgctgggcctgcggatgctgttcgccaaaaccgtggccgtgaacttcctgctgaccgccaagctgttcttcctcctcaccgcc

SEQ ID NO: 6385 - DNA, 2577 bp, synthetic construct
  source 1..2577: mol_type = other DNA
atggccttaccagtgaccgccttgctcctgccgctggccttgctgctccacgccgccaggccggaagtgcagctggttgaatctggcggaggactggttcagcctggcggatctctgagactgtcttgtgccgccagcggcttcagcttcagcgacttttggatgagctgggtccgacaggcccctggcaaaggacttgaatgggtcgccacaatcagccaggccggcagcgagaaggactacgtggactctgtgaagggcagattcaccatcagccgggacaacgccaagaagtccctgtacctccagatgaacagcctgagagccgaggacaccgccgtgtactattgtgcctctggcgtgtacagcttcgactacagaggccagggcaccctggtcacagtctcttctggtaccggcggaggcggatctggcggcggaggtagcggtggcggaggatctgaattcgacgacgttgtgatgacccagacccccctgagcctgcctgtgacacctggcgaacctgccagcatcagctgtcggagcagccagagcctggtgcacagaaacggcaacacctacctgcactggtatctccagaagcccggccagagccccaagctgctgatccacaaggtgtccaacagattcagcggcgtgcccgacagattctccggcagcggctctggcaccgacttcaccctgaagatcagccgggtggaagccgaggacctgggcgtgtacttctgtagccagagcacccatgtgccccccctgacatttggagccggcaccaagctggaactgaagctcgaggacctgaagaacgtgttcccacctgaggtggccgtgttcgagcctagcgaggccgagatcagccacacccagaaagccaccctcgtgtgcctggctaccggcttctaccccgaccatgtggaactgtcttggtgggtcaacggcaaagaggtgcacagcggcgtgtgtaccgacccccagccactgaaagaacagcccgccctgaacgacagccggtactgcctgagcagcagactgagagtgtccgccaccttctggcagaacccccggaaccacttcagatgccaggtgcagttctacggcctgagcgagaacgacgagtggacccaggacagagccaagcccgtgacccagatcgtgtctgccgaagcctggggcagagccgatgatgtgattaagatccactggcaggaaaagaagtccaacaccatcctgggcagccaggaaggcaacaccatgaagaccaacgacacctacatgaagttcagctggctgaccgtgcccgagaagtccctggacaaagaacacagatgcatcgtgcggcacgaaaacaacaagaacggcgtggaccaggaaatcatcttcccacccatcaagaccgatgtgattacaatggaccccaaggacaactgctccaaggacgccaacgataccctgctgctccagctgaccaacaccagcgcctactacatgtacttgttgctgctgctgaagtccgtggtgtacttcgccatcatcacatgctgcctgctgatggctatggtcaagcggaaggacagccggggaagggccaagcgatctggatctggagcaacaaacttctcactactcaaacaagcaggtgacgtggaggagaatcccgggcctactagtatggactggatttggcgcatccttttccttgtcggcgctgctaccggcgcgcattccttcgaagaagtgcagctggtgcagtctggcgctgaggtggaaaagcctggggccagcgtgaagattagctgcaaggccagcggcagcagcttcaccggctacaacatgaactgggtgcgccagaacatcggcaagagcctggaatggatcggagccatcgacccctactacggcggcaccagctacaaccagaagttcaagggcagagccaccctgaccgtggacaagagcaccagcaccgcctacatgcacctgaagtccctgcggagcgaggacaccgccgtgtactactgtgtgtccggcatggaatattggggccagggcaccagcgtgaccgtgtctagtacgcgtatccagaaccctgatcctgccgtgtaccagctgcgggatagcaagagcagcgacaagagcgtgtgtctgttcaccgacttcgacagccagaccaacgtgtcccagagcaaggactccgacgtgtacatcaccgataagtgcgtgctggacatgcggagcatggacttcaagagcaactccgccgtggcctggtccaacaagtccgatttcgcctgcgccaacgccttcaacaacagcattatccccgaggacacattcttcccaagccccgagagcagcgactccaccgaccacgtgaagcccaaagagacagagaacaccaagcagcccagcaagagctgccacaagcccaaggccatcgtgcacaccgagaaagtgaacatgatgagcctgaccgtgctgggcctgcggatgctgttcgccaaaaccgtggccgtgaacttcctgctgaccgccaagctgttcttcctcctcaccgcc

SEQ ID NO: 6386 - DNA, 2571 bp, synthetic construct
  source 1..2571: mol_type = other DNA
atggccttaccagtgaccgccttgctcctgccgctggccttgctgctccacgccgccaggccggaagtgcagctggttgaatctggcggaggactggttcagcctggcggatctctgagactgtcttgtgccgccagcggcttcagcttcagcgacttttggatgagctgggtccgacaggcccctggcaaaggacttgaatgggtcgccacaatcagccaggccggcagcgagaaggactacgtggactctgtgaagggcagattcaccatcagccgggacaacgccaagaagtccctgtacctccagatgaacagcctgagagccgaggacaccgccgtgtactattgtgcctctggcgtgtacagcttcgactacagaggccagggcaccctggtcacagtctcttctggtaccggcggaggcggatctggcggcggaggtagcggtggcggaggatctgaattcgacgagatcgtgatgacccagacccctgccaccctgtctgtgtctgccggcgagagagtgaccattacctgcaaggccagccagagcgtgtccaacgacgtgacctggtatcagcagaagcccggccaggcccccagactgctgatctacagcgccagcaacagatacagcggcgtgcccgccagattttccggcagcggctacggcaccgagttcaccttcaccatcagcagcgtgcagagcgaggacttcgccgtgtacttctgtcagcaagactacagcagcttcggccagggcaccaagctggaaatcaagaggctcgaggacctgaagaacgtgttcccacctgaggtggccgtgttcgagcctagcgaggccgagatcagccacacccagaaagccaccctcgtgtgcctggctaccggcttctaccccgaccatgtggaactgtcttggtgggtcaacggcaaagaggtgcacagcggcgtgtgtaccgacccccagccactgaaagaacagcccgccctgaacgacagccggtactgcctgagcagcagactgagagtgtccgccaccttctggcagaacccccggaaccacttcagatgccaggtgcagttctacggcctgagcgagaacgacgagtggacccaggacagagccaagcccgtgacccagatcgtgtctgccgaagcctggggcagagccgatgatgtgattaagatccactggcaggaaaagaagtccaacaccatcctgggcagccaggaaggcaacaccatgaagaccaacgacacctacatgaagttcagctggctgaccgtgcccgagaagtccctggacaaagaacacagatgcatcgtgcggcacgaaaacaacaagaacggcgtggaccaggaaatcatcttcccacccatcaagaccgatgtgattacaatggaccccaaggacaactgctccaaggacgccaacgataccctgctgctccagctgaccaacaccagcgcctactacatgtacttgttgctgctgctgaagtccgtggtgtacttcgccatcatcacatgctgcctgctgatggctatggtcaagcggaaggacagccggggaagggccaagcgatctggatctggagcaacaaacttctcactactcaaacaagcaggtgacgtggaggagaatcccgggcctactagtatggactggatttggcgcatccttttccttgtcggcgctgctaccggcgcgcattccttcgaacaggtgcagctggtggaatctggacctggcgtggtgcagcctggcagaagcctgagaatcagctgtgccgtgtccggcttcagcgtgaccaactacggcgtgcactgggtgcgccagccacctggaaaaggactggaatggctgggcgtgatctgggctggcggcatcaccaactacaacagcgccttcatgtcccggctgaccatctccaaggacaacagcaagaacaccgtgtacctccagatgaacagcctgcgggccgaggacaccgccatgtactactgtgcttccagaggcggccactacggctacgccctggattattggggccagggaaccctcgtgaccgtgtcctctacgcgtatccagaaccctgatcctgccgtgtaccagctgcgggatagcaagagcagcgacaagagcgtgtgtctgttcaccgacttcgacagccagaccaacgtgtcccagagcaaggactccgacgtgtacatcaccgataagtgcgtgctggacatgcggagcatggacttcaagagcaactccgccgtggcctggtccaacaagtccgatttcgcctgcgccaacgccttcaacaacagcattatccccgaggacacattcttcccaagccccgagagcagcgactccaccgaccacgtgaagcccaaagagacagagaacaccaagcagcccagcaagagctgccacaagcccaaggccatcgtgcacaccgagaaagtgaacatgatgagcctgaccgtgctgggcctgcggatgctgttcgccaaaaccgtggccgtgaacttcctgctgaccgccaagctgttcttcctcctcaccgcc

SEQ ID NO: 6387 - DNA, 2577 bp, synthetic construct
  source 1..2577: mol_type = other DNA
atggccttaccagtgaccgccttgctcctgccgctggccttgctgctccacgccgccaggccggaagtgcagctggttgaatctggcggaggactggttcagcctggcggatctctgagactgtcttgtgccgccagcggcttcagcttcagcgacttttggatgagctgggtccgacaggcccctggcaaaggacttgaatgggtcgccacaatcagccaggccggcagcgagaaggactacgtggactctgtgaagggcagattcaccatcagccgggacaacgccaagaagtccctgtacctccagatgaacagcctgagagccgaggacaccgccgtgtactattgtgcctctggcgtgtacagcttcgactacagaggccagggcaccctggtcacagtctcttctggtaccggcggaggcggatctggcggcggaggtagcggtggcggaggatctgaattcgacatccagatgacccagaccgccagcagcctgcctgcctctctgggcgacagagtgaccatctcctgtagcgccagccaggacatcagcaactacctgaactggtatcagcagaaacccgacggcaccgtgaagctgctgatcttctacagcagcaacctgcacagcggcgtgcccagcagattttctggcggcggaagcggcaccgactacagcctgaccatcagcaatctggaacccgaggacattgccacctacttttgccaccagtacagcaagctgccctggacctttggcggaggcaccaagctggaaatcaagagactcgaggacctgaagaacgtgttcccacctgaggtggccgtgttcgagcctagcgaggccgagatcagccacacccagaaagccaccctcgtgtgcctggctaccggcttctaccccgaccatgtggaactgtcttggtgggtcaacggcaaagaggtgcacagcggcgtgtgtaccgacccccagccactgaaagaacagcccgccctgaacgacagccggtactgcctgagcagcagactgagagtgtccgccaccttctggcagaacccccggaaccacttcagatgccaggtgcagttctacggcctgagcgagaacgacgagtggacccaggacagagccaagcccgtgacccagatcgtgtctgccgaagcctggggcagagccgatgatgtgattaagatccactggcaggaaaagaagtccaacaccatcctgggcagccaggaaggcaacaccatgaagaccaacgacacctacatgaagttcagctggctgaccgtgcccgagaagtccctggacaaagaacacagatgcatcgtgcggcacgaaaacaacaagaacggcgtggaccaggaaatcatcttcccacccatcaagaccgatgtgattacaatggaccccaaggacaactgctccaaggacgccaacgataccctgctgctccagctgaccaacaccagcgcctactacatgtacttgttgctgctgctgaagtccgtggtgtacttcgccatcatcacatgctgcctgctgatggctatggtcaagcggaaggacagccggggaagggccaagcgatctggatctggagcaacaaacttctcactactcaaacaagcaggtgacgtggaggagaatcccgggcctactagtatggactggatttggcgcatccttttccttgtcggcgctgctaccggcgcgcattccttcgaagaagtgaccctggtggaaagcggcggagacttcgtgaagcctggcggctctctgaaggtgtcctgtgccgccagcggcttcgcctttagccactacgccatgagctgggtgcgccagacccctgccaagagactggaatgggtggcctacatcagcagcggcggctccggcacctactactccgatagcgtgaagggccggttcaccatcagccgggacaacgccaagaacaccctgtacctccagatgcggagcctgcggagcgaggacagcgccatgtatttctgcaccagagtgaagctgggcacctattacttcgactcttggggccagggcaccaccctgaccgtgtcatctacgcgtatccagaaccctgatcctgccgtgtaccagctgcgggatagcaagagcagcgacaagagcgtgtgtctgttcaccgacttcgacagccagaccaacgtgtcccagagcaaggactccgacgtgtacatcaccgataagtgcgtgctggacatgcggagcatggacttcaagagcaactccgccgtggcctggtccaacaagtccgatttcgcctgcgccaacgccttcaacaacagcattatccccgaggacacattcttcccaagccccgagagcagcgactccaccgaccacgtgaagcccaaagagacagagaacaccaagcagcccagcaagagctgccacaagcccaaggccatcgtgcacaccgagaaagtgaacatgatgagcctgaccgtgctgggcctgcggatgctgttcgccaaaaccgtggccgtgaacttcctgctgaccgccaagctgttcttcctcctcaccgcc

SEQ ID NO: 6388 - DNA, 2583 bp, synthetic construct
  source 1..2583: mol_type = other DNA
atggccttaccagtgaccgccttgctcctgccgctggccttgctgctccacgccgccaggccggaagtgcagctggttgaatctggcggaggactggttcagcctggcggatctctgagactgtcttgtgccgccagcggcttcagcttcagcgacttttggatgagctgggtccgacaggcccctggcaaaggacttgaatgggtcgccacaatcagccaggccggcagcgagaaggactacgtggactctgtgaagggcagattcaccatcagccgggacaacgccaagaagtccctgtacctccagatgaacagcctgagagccgaggacaccgccgtgtactattgtgcctctggcgtgtacagcttcgactacagaggccagggcaccctggtcacagtctcttctggtaccggcggaggcggatctggcggcggaggtagcggtggcggaggatctgaattccagttcgtgctgacccagagcccttctgcctctgctgccctgggagcctctgccaagctgacctgtacactgagcagcgcccacaagacctacaccatcgactggtatcagcagcagaagggaaaggcccccagatacctgatccaagtgaagtccgacggcacctacacaaaggccaccggcgtgcccgatagattcagcggcagtagcagcggagccgatagatacctgattatccccagcgtgcaggccgacgacgaggccgattactactgcggcaccgattacaccggcggctacgtgttcggcggaggcacacaactgaccgtgacactcgaggacctgaagaacgtgttcccacctgaggtggccgtgttcgagcctagcgaggccgagatcagccacacccagaaagccaccctcgtgtgcctggctaccggcttctaccccgaccatgtggaactgtcttggtgggtcaacggcaaagaggtgcacagcggcgtgtgtaccgacccccagccactgaaagaacagcccgccctgaacgacagccggtactgcctgagcagcagactgagagtgtccgccaccttctggcagaacccccggaaccacttcagatgccaggtgcagttctacggcctgagcgagaacgacgagtggacccaggacagagccaagcccgtgacccagatcgtgtctgccgaagcctggggcagagccgatgatgtgattaagatccactggcaggaaaagaagtccaacaccatcctgggcagccaggaaggcaacaccatgaagaccaacgacacctacatgaagttcagctggctgaccgtgcccgagaagtccctggacaaagaacacagatgcatcgtgcggcacgaaaacaacaagaacggcgtggaccaggaaatcatcttcccacccatcaagaccgatgtgattacaatggaccccaaggacaactgctccaaggacgccaacgataccctgctgctccagctgaccaacaccagcgcctactacatgtacttgttgctgctgctgaagtccgtggtgtacttcgccatcatcacatgctgcctgctgatggctatggtcaagcggaaggacagccggggaagggccaagcgatctggatctggagcaacaaacttctcactactcaaacaagcaggtgacgtggaggagaatcccgggcctactagtatggactggatttggcgcatccttttccttgtcggcgctgctaccggcgcgcattccttcgaagagcaactgaaagagtctggcggcggactgttcaagcccaccgataccctgaccctgacctgcaccgtgtccggcttcagcctgagctactacggcgtgaactgggtgcgccaggcccctggcaatggcctggaatggatcggcacaatcggcggcagcggcgacacctactatgcctcttgggccaagtccagaagcaccatcatcagaaacaccaacgagaacaccgtgaccctgaagatgaccagcctgacagccgccgacaccgccacctacttttgcgtcagatacgccaacatcggctacgagtatttcaacgtgtggggacccggcaccctcgtgaccgtgtcatctacgcgtatccagaaccctgatcctgccgtgtaccagctgcgggatagcaagagcagcgacaagagcgtgtgtctgttcaccgacttcgacagccagaccaacgtgtcccagagcaaggactccgacgtgtacatcaccgataagtgcgtgctggacatgcggagcatggacttcaagagcaactccgccgtggcctggtccaacaagtccgatttcgcctgcgccaacgccttcaacaacagcattatccccgaggacacattcttcccaagccccgagagcagcgactccaccgaccacgtgaagcccaaagagacagagaacaccaagcagcccagcaagagctgccacaagcccaaggccatcgtgcacaccgagaaagtgaacatgatgagcctgaccgtgctgggcctgcggatgctgttcgccaaaaccgtggccgtgaacttcctgctgaccgccaagctgttcttcctcctcaccgcc

SEQ ID NO: 6389 - DNA, 2598 bp, synthetic construct
  source 1..2598: mol_type = other DNA
atggccttaccagtgaccgccttgctcctgccgctggccttgctgctccacgccgccaggccggaagtgcagctggttgaatctggcggaggactggttcagcctggcggatctctgagactgtcttgtgccgccagcggcttcagcttcagcgacttttggatgagctgggtccgacaggcccctggcaaaggacttgaatgggtcgccacaatcagccaggccggcagcgagaaggactacgtggactctgtgaagggcagattcaccatcagccgggacaacgccaagaagtccctgtacctccagatgaacagcctgagagccgaggacaccgccgtgtactattgtgcctctggcgtgtacagcttcgactacagaggccagggcaccctggtcacagtctcttctggtaccggcggaggcggatctggcggcggaggtagcggtggcggaggatctgaattccagttcgtgctgacccagagcccttctgtgtctgccgccctgggagcctctgccaagctgacctgtacactgagcagcgcccacaagacctacaccatcgactggtatcagcagcagcagggcgaggcccccagatacctgatgcaagtgaagtccgacggcagctacaccaagggcaccggcgtgcccgatagattcagcggcagtagcagcggagccgatagatacctgattatccccagcgtgcaggccgacgacgaggccggatatgtgtgcggcgctgacgacaatggcggctacgtgttcggcggaggcacccaactgacagtgacactcgaggacctgaagaacgtgttcccacctgaggtggccgtgttcgagcctagcgaggccgagatcagccacacccagaaagccaccctcgtgtgcctggctaccggcttctaccccgaccatgtggaactgtcttggtgggtcaacggcaaagaggtgcacagcggcgtgtgtaccgacccccagccactgaaagaacagcccgccctgaacgacagccggtactgcctgagcagcagactgagagtgtccgccaccttctggcagaacccccggaaccacttcagatgccaggtgcagttctacggcctgagcgagaacgacgagtggacccaggacagagccaagcccgtgacccagatcgtgtctgccgaagcctggggcagagccgatgatgtgattaagatccactggcaggaaaagaagtccaacaccatcctgggcagccaggaaggcaacaccatgaagaccaacgacacctacatgaagttcagctggctgaccgtgcccgagaagtccctggacaaagaacacagatgcatcgtgcggcacgaaaacaacaagaacggcgtggaccaggaaatcatcttcccacccatcaagaccgatgtgattacaatggaccccaaggacaactgctccaaggacgccaacgataccctgctgctccagctgaccaacaccagcgcctactacatgtacttgttgctgctgctgaagtccgtggtgtacttcgccatcatcacatgctgcctgctgatggctatggtcaagcggaaggacagccggggaagggccaagcgatctggatctggagcaacaaacttctcactactcaaacaagcaggtgacgtggaggagaatcccgggcctactagtatggactggatttggcgcatccttttccttgtcggcgctgctaccggcgcgcattccttcgaacagagcgtgaaagagtctgagggcggcctgttcaagcccaccgataccctgaccctgacctgcaccgtgtccggcttcagcctgagcagacacgccctgacatgggtgcgccaggcccctggaaatggcctggaatggatcggagccatcgacaacgccggcaccacctactatgcctcttgggccaagtccagaagcaccatcacccggaacaccgacctgcacaccgtgaccctgaagatgaccagcctgaccgccagcgacaccgccacctacttttgcgccagagtgttctacgacatcaacagcggctactacctggacggcatggacctgtggggacctggcacacttgtgaccgtgtccagcacgcgtatccagaaccctgatcctgccgtgtaccagctgcgggatagcaagagcagcgacaagagcgtgtgtctgttcaccgacttcgacagccagaccaacgtgtcccagagcaaggactccgacgtgtacatcaccgataagtgcgtgctggacatgcggagcatggacttcaagagcaactccgccgtggcctggtccaacaagtccgatttcgcctgcgccaacgccttcaacaacagcattatccccgaggacacattcttcccaagccccgagagcagcgactccaccgaccacgtgaagcccaaagagacagagaacaccaagcagcccagcaagagctgccacaagcccaaggccatcgtgcacaccgagaaagtgaacatgatgagcctgaccgtgctgggcctgcggatgctgttcgccaaaaccgtggccgtgaacttcctgctgaccgccaagctgttcttcctcctcaccgcc

SEQ ID NO: 6390 - DNA, 2580 bp, synthetic construct
  source 1..2580: mol_type = other DNA
atggccttaccagtgaccgccttgctcctgccgctggccttgctgctccacgccgccaggccggaagtgcagctggttgaatctggcggaggactggttcagcctggcggatctctgagactgtcttgtgccgccagcggcttcagcttcagcgacttttggatgagctgggtccgacaggcccctggcaaaggacttgaatgggtcgccacaatcagccaggccggcagcgagaaggactacgtggactctgtgaagggcagattcaccatcagccgggacaacgccaagaagtccctgtacctccagatgaacagcctgagagccgaggacaccgccgtgtactattgtgcctctggcgtgtacagcttcgactacagaggccagggcaccctggtcacagtctcttctggtaccggcggaggcggatctggcggcggaggtagcggtggcggaggatctgaattcgacatccagatgacccagagccccagcagcctgtctgccagcgtgggcgacagagtgaccatcacctgtagagccagccagggcatcagctcttggctggcctggtatcagcagaagcccgagaaggcccccaagagcctgatctacgccgcctctagtctccagagcggcgtgcccagcagattttctggcagcggctccggcaccgacttcaccctgacaatcagctccctccagcccgaggacttcgccacctactactgccagcagtacaacagctacccccccacctttggcggaggcaccaaggtggaaatcaagctcgaggacctgaagaacgtgttcccacctgaggtggccgtgttcgagcctagcgaggccgagatcagccacacccagaaagccaccctcgtgtgcctggctaccggcttctaccccgaccatgtggaactgtcttggtgggtcaacggcaaagaggtgcacagcggcgtgtgtaccgacccccagccactgaaagaacagcccgccctgaacgacagccggtactgcctgagcagcagactgagagtgtccgccaccttctggcagaacccccggaaccacttcagatgccaggtgcagttctacggcctgagcgagaacgacgagtggacccaggacagagccaagcccgtgacccagatcgtgtctgccgaagcctggggcagagccgatgatgtgattaagatccactggcaggaaaagaagtccaacaccatcctgggcagccaggaaggcaacaccatgaagaccaacgacacctacatgaagttcagctggctgaccgtgcccgagaagtccctggacaaagaacacagatgcatcgtgcggcacgaaaacaacaagaacggcgtggaccaggaaatcatcttcccacccatcaagaccgatgtgattacaatggaccccaaggacaactgctccaaggacgccaacgataccctgctgctccagctgaccaacaccagcgcctactacatgtacttgttgctgctgctgaagtccgtggtgtacttcgccatcatcacatgctgcctgctgatggctatggtcaagcggaaggacagccggggaagggccaagcgatctggatctggagcaacaaacttctcactactcaaacaagcaggtgacgtggaggagaatcccgggcctactagtatggactggatttggcgcatccttttccttgtcggcgctgctaccggcgcgcattccttcgaagaagtgcaactggtggaatcaggcggcggactggtgcagcctggcgagtctctgagactgagctgtgtggcctccggcttcaccttcagccggtacaagatgaactgggtgcgccaggcccctggcaagggactggaatgggtgtcctacatcagccgcagcggcagagacatctactacgccgacagcgtgaagggccggttcaccatcagcagagacaacgccaagaacagcctgtacctccagatgaactccctgcgggacgaggacaccgccgtgtactactgtgccggaaccgtgaccacctattactacttcggcatggacgtgtggggccacggcaccaccgtgacagtgtcatctacgcgtatccagaaccctgatcctgccgtgtaccagctgcgggatagcaagagcagcgacaagagcgtgtgtctgttcaccgacttcgacagccagaccaacgtgtcccagagcaaggactccgacgtgtacatcaccgataagtgcgtgctggacatgcggagcatggacttcaagagcaactccgccgtggcctggtccaacaagtccgatttcgcctgcgccaacgccttcaacaacagcattatccccgaggacacattcttcccaagccccgagagcagcgactccaccgaccacgtgaagcccaaagagacagagaacaccaagcagcccagcaagagctgccacaagcccaaggccatcgtgcacaccgagaaagtgaacatgatgagcctgaccgtgctgggcctgcggatgctgttcgccaaaaccgtggccgtgaacttcctgctgaccgccaagctgttcttcctcctcaccgcc

SEQ ID NO: 6391 - DNA, 2583 bp, synthetic construct
  source 1..2583: mol_type = other DNA
atggccttaccagtgaccgccttgctcctgccgctggccttgctgctccacgccgccaggccggaagtgcagctggttgaatctggcggaggactggttcagcctggcggatctctgagactgtcttgtgccgccagcggcttcagcttcagcgacttttggatgagctgggtccgacaggcccctggcaaaggacttgaatgggtcgccacaatcagccaggccggcagcgagaaggactacgtggactctgtgaagggcagattcaccatcagccgggacaacgccaagaagtccctgtacctccagatgaacagcctgagagccgaggacaccgccgtgtactattgtgcctctggcgtgtacagcttcgactacagaggccagggcaccctggtcacagtctcttctggtaccggcggaggcggatctggcggcggaggtagcggtggcggaggatctgaattcgacatccagatgacccagagccccagcagcctgtctgccagcgtgggcgacagagtgaccatcacctgtagagccagccagggcatcagctcttggctggcctggtatcagcagaagcccgagaaggcccccaagagcctgatctacgccgcctctagtctccagagcggcgtgcccagcagattttctggcagcggctccggcaccgacttcaccctgacaatcagctccctccagcccgaggacttcgccacctactactgccagcagtacaacagctaccctcccacctttggcggaggcaccaaggtggaaatcaagctcgaggacctgaagaacgtgttcccacctgaggtggccgtgttcgagcctagcgaggccgagatcagccacacccagaaagccaccctcgtgtgcctggctaccggcttctaccccgaccatgtggaactgtcttggtgggtcaacggcaaagaggtgcacagcggcgtgtgtaccgacccccagccactgaaagaacagcccgccctgaacgacagccggtactgcctgagcagcagactgagagtgtccgccaccttctggcagaacccccggaaccacttcagatgccaggtgcagttctacggcctgagcgagaacgacgagtggacccaggacagagccaagcccgtgacccagatcgtgtctgccgaagcctggggcagagccgatgatgtgattaagatccactggcaggaaaagaagtccaacaccatcctgggcagccaggaaggcaacaccatgaagaccaacgacacctacatgaagttcagctggctgaccgtgcccgagaagtccctggacaaagaacacagatgcatcgtgcggcacgaaaacaacaagaacggcgtggaccaggaaatcatcttcccacccatcaagaccgatgtgattacaatggaccccaaggacaactgctccaaggacgccaacgataccctgctgctccagctgaccaacaccagcgcctactacatgtacttgttgctgctgctgaagtccgtggtgtacttcgccatcatcacatgctgcctgctgatggctatggtcaagcggaaggacagccggggaagggccaagcgatctggatctggagcaacaaacttctcactactcaaacaagcaggtgacgtggaggagaatcccgggcctactagtatggactggatttggcgcatccttttccttgtcggcgctgctaccggcgcgcattccttcgaagaagtgcaactggtggaatccgggggaggctctgtgcagcctggcgagtctctgagactgagctgtgtggcctccggcttcaccttcagccggtacaagatgaactgggtgcgccaggcccctggcaagggactggaatgggtgtcctacatcagccgcagcggcagagacatctactacgccgacagcgtgaagggccggttcaccatcagcagagacaacgccaagaacagcctgtacctccagatgaactccctgcgggacgaggacaccgccgtgtactactgtgccggaaccgtgaccacctattactacgacttcggcatggacgtgtggggccagggcacaaccgtgacagtgtctagcacgcgtatccagaaccctgatcctgccgtgtaccagctgcgggatagcaagagcagcgacaagagcgtgtgtctgttcaccgacttcgacagccagaccaacgtgtcccagagcaaggactccgacgtgtacatcaccgataagtgcgtgctggacatgcggagcatggacttcaagagcaactccgccgtggcctggtccaacaagtccgatttcgcctgcgccaacgccttcaacaacagcattatccccgaggacacattcttcccaagccccgagagcagcgactccaccgaccacgtgaagcccaaagagacagagaacaccaagcagcccagcaagagctgccacaagcccaaggccatcgtgcacaccgagaaagtgaacatgatgagcctgaccgtgctgggcctgcggatgctgttcgccaaaaccgtggccgtgaacttcctgctgaccgccaagctgttcttcctcctcaccgcc

SEQ ID NO: 6392 - DNA, 2577 bp, synthetic construct
  source 1..2577: mol_type = other DNA
atggccttaccagtgaccgccttgctcctgccgctggccttgctgctccacgccgccaggccggaagtgcagctggttgaatctggcggaggactggttcagcctggcggatctctgagactgtcttgtgccgccagcggcttcagcttcagcgacttttggatgagctgggtccgacaggcccctggcaaaggacttgaatgggtcgccacaatcagccaggccggcagcgagaaggactacgtggactctgtgaagggcagattcaccatcagccgggacaacgccaagaagtccctgtacctccagatgaacagcctgagagccgaggacaccgccgtgtactattgtgcctctggcgtgtacagcttcgactacagaggccagggcaccctggtcacagtctcttctggtaccggcggaggcggatctggcggcggaggtagcggtggcggaggatctgaattccagtctgtgctgacacagcctccatctgcctctggcacacctggacagagagtgaccatcagctgtagcggcagcagaagcaacgtcggcggcaactacgtgttctggtatcagcaggtcccaggcgctacccctaagctgctgatctacagaagcaatcagcggcctagcggcgtgcccgatagatttgccggaagcaagagcggcagctctgccagccttgccatctctggactgagaagcgaggacgaggccgactactactgtgccacctgggatgatagcctgagcggcttcgtgtttggcaccggcaccaaagtgacagtgcttggtctcgaggacctgaagaacgtgttcccacctgaggtggccgtgttcgagcctagcgaggccgagatcagccacacccagaaagccaccctcgtgtgcctggctaccggcttctaccccgaccatgtggaactgtcttggtgggtcaacggcaaagaggtgcacagcggcgtgtgtaccgacccccagccactgaaagaacagcccgccctgaacgacagccggtactgcctgagcagcagactgagagtgtccgccaccttctggcagaacccccggaaccacttcagatgccaggtgcagttctacggcctgagcgagaacgacgagtggacccaggacagagccaagcccgtgacccagatcgtgtctgccgaagcctggggcagagccgatgatgtgattaagatccactggcaggaaaagaagtccaacaccatcctgggcagccaggaaggcaacaccatgaagaccaacgacacctacatgaagttcagctggctgaccgtgcccgagaagtccctggacaaagaacacagatgcatcgtgcggcacgaaaacaacaagaacggcgtggaccaggaaatcatcttcccacccatcaagaccgatgtgattacaatggaccccaaggacaactgctccaaggacgccaacgataccctgctgctccagctgaccaacaccagcgcctactacatgtacttgttgctgctgctgaagtccgtggtgtacttcgccatcatcacatgctgcctgctgatggctatggtcaagcggaaggacagccggggaagggccaagcgatctggatctggagcaacaaacttctcactactcaaacaagcaggtgacgtggaggagaatcccgggcctactagtatggactggatttggcgcatccttttccttgtcggcgctgctaccggcgcgcattccttcgaagttcagctggttgaatctggcggcggactggttaagcctggcggatctctgagactgtcttgtgccgccagcggcttcaccttcagcgattactacatgagctggatcagacaggcccctggcaaaggactggaatgggtgtcctacatcagcagcagcggctccaccatctactacgccgatagcgtgaagggcagattcaccatcagccgggacaacgccaagaacagcctgtacctccagatgaactccctgagagccgaggacaccgccgtgtactattgcgccagaggctacggcaaagcctacgatcaatggggccagggcacactggtcaccgtttcttctacgcgtatccagaaccctgatcctgccgtgtaccagctgcgggatagcaagagcagcgacaagagcgtgtgtctgttcaccgacttcgacagccagaccaacgtgtcccagagcaaggactccgacgtgtacatcaccgataagtgcgtgctggacatgcggagcatggacttcaagagcaactccgccgtggcctggtccaacaagtccgatttcgcctgcgccaacgccttcaacaacagcattatccccgaggacacattcttcccaagccccgagagcagcgactccaccgaccacgtgaagcccaaagagacagagaacaccaagcagcccagcaagagctgccacaagcccaaggccatcgtgcacaccgagaaagtgaacatgatgagcctgaccgtgctgggcctgcggatgctgttcgccaaaaccgtggccgtgaacttcctgctgaccgccaagctgttcttcctcctcaccgcc

SEQ ID NO: 6393 - DNA, 2574 bp, synthetic construct
  source 1..2574: mol_type = other DNA
atggccttaccagtgaccgccttgctcctgccgctggccttgctgctccacgccgccaggccggaagtgcagctggttgaatctggcggaggactggttcagcctggcggatctctgagactgtcttgtgccgccagcggcttcagcttcagcgacttttggatgagctgggtccgacaggcccctggcaaaggacttgaatgggtcgccacaatcagccaggccggcagcgagaaggactacgtggactctgtgaagggcagattcaccatcagccgggacaacgccaagaagtccctgtacctccagatgaacagcctgagagccgaggacaccgccgtgtactattgtgcctctggcgtgtacagcttcgactacagaggccagggcaccctggtcacagtctcttctggtaccggcggaggcggatctggcggcggaggtagcggtggcggaggatctgaattccagtctgtggtcacacagccacctagcatgtctgccgctccaggccagcaagtgaccatctcttgtagcggcggcaacagcaacatcgagcggaactacgtgtcctggtatctgcaactgcctggcacagcccctaagctggtcatcttcgacaacgacagacggcccagcggcatccccgatagattttctggcagcaagagcggcaccagcgccacactgggaattaccggacttcagacaggcgacgaggccgactactactgtggcacatgggactctagcctgagaggctgggttttcggcggaggcacaaagctgacagtgcttggtctcgaggacctgaagaacgtgttcccacctgaggtggccgtgttcgagcctagcgaggccgagatcagccacacccagaaagccaccctcgtgtgcctggctaccggcttctaccccgaccatgtggaactgtcttggtgggtcaacggcaaagaggtgcacagcggcgtgtgtaccgacccccagccactgaaagaacagcccgccctgaacgacagccggtactgcctgagcagcagactgagagtgtccgccaccttctggcagaacccccggaaccacttcagatgccaggtgcagttctacggcctgagcgagaacgacgagtggacccaggacagagccaagcccgtgacccagatcgtgtctgccgaagcctggggcagagccgatgatgtgattaagatccactggcaggaaaagaagtccaacaccatcctgggcagccaggaaggcaacaccatgaagaccaacgacacctacatgaagttcagctggctgaccgtgcccgagaagtccctggacaaagaacacagatgcatcgtgcggcacgaaaacaacaagaacggcgtggaccaggaaatcatcttcccacccatcaagaccgatgtgattacaatggaccccaaggacaactgctccaaggacgccaacgataccctgctgctccagctgaccaacaccagcgcctactacatgtacttgttgctgctgctgaagtccgtggtgtacttcgccatcatcacatgctgcctgctgatggctatggtcaagcggaaggacagccggggaagggccaagcgatctggatctggagcaacaaacttctcactactcaaacaagcaggtgacgtggaggagaatcccgggcctactagtatggactggatttggcgcatccttttccttgtcggcgctgctaccggcgcgcattccttcgaagtgcagctcgttgagtctggcggcggactgattcaacctggcggaagcctgagactgagctgtgccgcttccggcttcaccttcagcaactacgccatgaactgggttcgacaggcccctggcaaaggactggaatgggtgtccaccatcaacggcagaggcagcagcaccatctacgccgattctgtgaagggcagattcaccatcagccgggacaacagcaagaacaccctgtacctccagatgaactccctgagagccgaggacaccgccacctattactgtgcccggtacatcagcagaggactgggcgattcttggggccagggcacactggttacagtgacgcgtatccagaaccctgatcctgccgtgtaccagctgcgggatagcaagagcagcgacaagagcgtgtgtctgttcaccgacttcgacagccagaccaacgtgtcccagagcaaggactccgacgtgtacatcaccgataagtgcgtgctggacatgcggagcatggacttcaagagcaactccgccgtggcctggtccaacaagtccgatttcgcctgcgccaacgccttcaacaacagcattatccccgaggacacattcttcccaagccccgagagcagcgactccaccgaccacgtgaagcccaaagagacagagaacaccaagcagcccagcaagagctgccacaagcccaaggccatcgtgcacaccgagaaagtgaacatgatgagcctgaccgtgctgggcctgcggatgctgttcgccaaaaccgtggccgtgaacttcctgctgaccgccaagctgttcttcctcctcaccgcc

SEQ ID NO: 6394 - DNA, 2577 bp, synthetic construct
  source 1..2577: mol_type = other DNA
atggccttaccagtgaccgccttgctcctgccgctggccttgctgctccacgccgccaggccggaagtgcagctggttgaatctggcggaggactggttcagcctggcggatctctgagactgtcttgtgccgccagcggcttcagcttcagcgacttttggatgagctgggtccgacaggcccctggcaaaggacttgaatgggtcgccacaatcagccaggccggcagcgagaaggactacgtggactctgtgaagggcagattcaccatcagccgggacaacgccaagaagtccctgtacctccagatgaacagcctgagagccgaggacaccgccgtgtactattgtgcctctggcgtgtacagcttcgactacagaggccagggcaccctggtcacagtctcttctggtaccggcggaggcggatctggcggcggaggtagcggtggcggaggatctgaattcgacgtcgtgatgacccagacccctctgagcctgcctgtgtccctgggcgatcaggccagcatcagctgtagaagcagccagagcctggtgcacagcaacggcaacacctacctgcactggtatctccagaagcccggccagagccccaagctgctgatctacaaggtgtccaacagattcagcggcgtgcccgacagattctccggcagcggctctggcaccgacttcaccctgaagatcagccgggtggaagccgaggacctgggcgtgtacttctgtagccagaacacccccgtgccccccaagtttggcagcggcaccaagctggaaatcaagctcgaggacctgaagaacgtgttcccacctgaggtggccgtgttcgagcctagcgaggccgagatcagccacacccagaaagccaccctcgtgtgcctggctaccggcttctaccccgaccatgtggaactgtcttggtgggtcaacggcaaagaggtgcacagcggcgtgtgtaccgacccccagccactgaaagaacagcccgccctgaacgacagccggtactgcctgagcagcagactgagagtgtccgccaccttctggcagaacccccggaaccacttcagatgccaggtgcagttctacggcctgagcgagaacgacgagtggacccaggacagagccaagcccgtgacccagatcgtgtctgccgaagcctggggcagagccgatgatgtgattaagatccactggcaggaaaagaagtccaacaccatcctgggcagccaggaaggcaacaccatgaagaccaacgacacctacatgaagttcagctggctgaccgtgcccgagaagtccctggacaaagaacacagatgcatcgtgcggcacgaaaacaacaagaacggcgtggaccaggaaatcatcttcccacccatcaagaccgatgtgattacaatggaccccaaggacaactgctccaaggacgccaacgataccctgctgctccagctgaccaacaccagcgcctactacatgtacttgttgctgctgctgaagtccgtggtgtacttcgccatcatcacatgctgcctgctgatggctatggtcaagcggaaggacagccggggaagggccaagcgatctggatctggagcaacaaacttctcactactcaaacaagcaggtgacgtggaggagaatcccgggcctactagtatggactggatttggcgcatccttttccttgtcggcgctgctaccggcgcgcattccttcgaacaggtgcagctccagcagtctggcgctgaactcgtgcggcctggcgcttctgtgaagctgtcttgcaaggccagcggctacaccttcaacgactacgagatgcactgggtcaagcagacccctgtgcacggcctgaagtggatcggagccctggaacccaagaccggcgataccgcctacagccagaagttcaagggcaaggccaccctgaccgccgacaagagcagcagcacagcctacatggaactgcggagcctgaccagcgaggacagcgccgtgtactactgcaccagctgctactactacacctacagcggccagggcaccctcgtgacagtgtctgctacgcgtatccagaaccctgatcctgccgtgtaccagctgcgggatagcaagagcagcgacaagagcgtgtgtctgttcaccgacttcgacagccagaccaacgtgtcccagagcaaggactccgacgtgtacatcaccgataagtgcgtgctggacatgcggagcatggacttcaagagcaactccgccgtggcctggtccaacaagtccgatttcgcctgcgccaacgccttcaacaacagcattatccccgaggacacattcttcccaagccccgagagcagcgactccaccgaccacgtgaagcccaaagagacagagaacaccaagcagcccagcaagagctgccacaagcccaaggccatcgtgcacaccgagaaagtgaacatgatgagcctgaccgtgctgggcctgcggatgctgttcgccaaaaccgtggccgtgaacttcctgctgaccgccaagctgttcttcctcctcaccgcc

SEQ ID NO: 6395 - DNA, 2574 bp, synthetic construct
  source 1..2574: mol_type = other DNA
atggccttaccagtgaccgccttgctcctgccgctggccttgctgctccacgccgccaggccggaagtgcagctggttgaatctggcggaggactggttcagcctggcggatctctgagactgtcttgtgccgccagcggcttcagcttcagcgacttttggatgagctgggtccgacaggcccctggcaaaggacttgaatgggtcgccacaatcagccaggccggcagcgagaaggactacgtggactctgtgaagggcagattcaccatcagccgggacaacgccaagaagtccctgtacctccagatgaacagcctgagagccgaggacaccgccgtgtactattgtgcctctggcgtgtacagcttcgactacagaggccagggcaccctggtcacagtctcttctggtaccggcggaggcggatctggcggcggaggtagcggtggcggaggatctgaattcgacatccaactgacccagagccccagcagcctgtctgcctctgtgggcgacagagtgaccatcacctgtagagccagccagggcatcagaaacgacctgggctggtatcagcagaagcccggcaaggcccccaagcggctgatctatgctgccagctccctccagaatggcgtgcccagcagattttccggcagcggctctggcaccgagttcaccctgaccatcagctccctccagcccgaggacttcgccacctactactgcctccagcacaacacctaccccgccttcggccagggcaccaaggtggaaatcaagagactcgaggacctgaagaacgtgttcccacctgaggtggccgtgttcgagcctagcgaggccgagatcagccacacccagaaagccaccctcgtgtgcctggctaccggcttctaccccgaccatgtggaactgtcttggtgggtcaacggcaaagaggtgcacagcggcgtgtgtaccgacccccagccactgaaagaacagcccgccctgaacgacagccggtactgcctgagcagcagactgagagtgtccgccaccttctggcagaacccccggaaccacttcagatgccaggtgcagttctacggcctgagcgagaacgacgagtggacccaggacagagccaagcccgtgacccagatcgtgtctgccgaagcctggggcagagccgatgatgtgattaagatccactggcaggaaaagaagtccaacaccatcctgggcagccaggaaggcaacaccatgaagaccaacgacacctacatgaagttcagctggctgaccgtgcccgagaagtccctggacaaagaacacagatgcatcgtgcggcacgaaaacaacaagaacggcgtggaccaggaaatcatcttcccacccatcaagaccgatgtgattacaatggaccccaaggacaactgctccaaggacgccaacgataccctgctgctccagctgaccaacaccagcgcctactacatgtacttgttgctgctgctgaagtccgtggtgtacttcgccatcatcacatgctgcctgctgatggctatggtcaagcggaaggacagccggggaagggccaagcgatctggatctggagcaacaaacttctcactactcaaacaagcaggtgacgtggaggagaatcccgggcctactagtatggactggatttggcgcatccttttccttgtcggcgctgctaccggcgcgcattccttcgaacaggtgcaactccaggaatctggccctggcctcgtgaagcctagccagaccctgagcctgacctgtaccgtgtctggcggcagcatcagcagcttcaactactactggtcctggatcagacaccaccctggcaagggcctggaatggatcggctacatctactacagcggcagcacctacagcaaccccagcctgaagtcccgcgtgaccatctccgtggacaccagcaagaaccagtttagcctgaccctgtccagcgtgacagccgccgataccgccgtgtactactgcgccagaggctacaactggaactacttcgactactggggccagggaaccctcgtgaccgtgtctagtacgcgtatccagaaccctgatcctgccgtgtaccagctgcgggatagcaagagcagcgacaagagcgtgtgtctgttcaccgacttcgacagccagaccaacgtgtcccagagcaaggactccgacgtgtacatcaccgataagtgcgtgctggacatgcggagcatggacttcaagagcaactccgccgtggcctggtccaacaagtccgatttcgcctgcgccaacgccttcaacaacagcattatccccgaggacacattcttcccaagccccgagagcagcgactccaccgaccacgtgaagcccaaagagacagagaacaccaagcagcccagcaagagctgccacaagcccaaggccatcgtgcacaccgagaaagtgaacatgatgagcctgaccgtgctgggcctgcggatgctgttcgccaaaaccgtggccgtgaacttcctgctgaccgccaagctgttcttcctcctcaccgcc

SEQ ID NO: 6396 - DNA, 2580 bp, synthetic construct
  source 1..2580: mol_type = other DNA
atggccttaccagtgaccgccttgctcctgccgctggccttgctgctccacgccgccaggccggaagtgcagctggttgaatctggcggaggactggttcagcctggcggatctctgagactgtcttgtgccgccagcggcttcagcttcagcgacttttggatgagctgggtccgacaggcccctggcaaaggacttgaatgggtcgccacaatcagccaggccggcagcgagaaggactacgtggactctgtgaagggcagattcaccatcagccgggacaacgccaagaagtccctgtacctccagatgaacagcctgagagccgaggacaccgccgtgtactattgtgcctctggcgtgtacagcttcgactacagaggccagggcaccctggtcacagtctcttctggtaccggcggaggcggatctggcggcggaggtagcggtggcggaggatctgaattcgacgacatcgtgctgacccagagccccgccagcctggccgtgagcctgggccagagcgtgaccatcagctgcagagccagcgagagcgtggagtactacggcaccagcctgatgcagtggtaccagcagaagcccggccagccccccaagctgctgatctacgccaccagcaacgtggagagcggcgtgcccgccagattcagcggcagcggcagcggcaccgacttcagcctgaacatccaccccgtggaggaggacgacatcgccatgtacttctgccagcagagcagaaagctgcccagcaccttcggcggcggcaccaagctggagatcaagctcgaggacctgaagaacgtgttcccacctgaggtggccgtgttcgagcctagcgaggccgagatcagccacacccagaaagccaccctcgtgtgcctggctaccggcttctaccccgaccatgtggaactgtcttggtgggtcaacggcaaagaggtgcacagcggcgtgtgtaccgacccccagccactgaaagaacagcccgccctgaacgacagccggtactgcctgagcagcagactgagagtgtccgccaccttctggcagaacccccggaaccacttcagatgccaggtgcagttctacggcctgagcgagaacgacgagtggacccaggacagagccaagcccgtgacccagatcgtgtctgccgaagcctggggcagagccgatgatgtgattaagatccactggcaggaaaagaagtccaacaccatcctgggcagccaggaaggcaacaccatgaagaccaacgacacctacatgaagttcagctggctgaccgtgcccgagaagtccctggacaaagaacacagatgcatcgtgcggcacgaaaacaacaagaacggcgtggaccaggaaatcatcttcccacccatcaagaccgatgtgattacaatggaccccaaggacaactgctccaaggacgccaacgataccctgctgctccagctgaccaacaccagcgcctactacatgtacttgttgctgctgctgaagtccgtggtgtacttcgccatcatcacatgctgcctgctgatggctatggtcaagcggaaggacagccggggaagggccaagcgatctggatctggagcaacaaacttctcactactcaaacaagcaggtgacgtggaggagaatcccgggcctactagtatggactggatttggcgcatccttttccttgtcggcgctgctaccggcgcgcattccttcgaagacgtgagactgcaggagagcggccccggccaggtgaagcccagccagaccgtgagcctgacctgcagcgtgaccggctacagcatcaccaacggcaaccactggtggaactggatcagacaggtgagcggcagcaagctggagtggatcggctacatcagcagcagcggcagcaccgacagcaaccccagcctgaagagcagaatcagcatcaccagagacaccagcaagaaccagctgttcctgcagctgaacagcgtgaccaccgaggacatcgccacctactactgcgccagaggctactacttcgactactggggccagggcaccaccctgaccgtgagcagcacgcgtatccagaaccctgatcctgccgtgtaccagctgcgggatagcaagagcagcgacaagagcgtgtgtctgttcaccgacttcgacagccagaccaacgtgtcccagagcaaggactccgacgtgtacatcaccgataagtgcgtgctggacatgcggagcatggacttcaagagcaactccgccgtggcctggtccaacaagtccgatttcgcctgcgccaacgccttcaacaacagcattatccccgaggacacattcttcccaagccccgagagcagcgactccaccgaccacgtgaagcccaaagagacagagaacaccaagcagcccagcaagagctgccacaagcccaaggccatcgtgcacaccgagaaagtgaacatgatgagcctgaccgtgctgggcctgcggatgctgttcgccaaaaccgtggccgtgaacttcctgctgaccgccaagctgttcttcctcctcaccgcc

SEQ ID NO: 6397 - DNA, 2577 bp, synthetic construct
  source 1..2577: mol_type = other DNA
atggccttaccagtgaccgccttgctcctgccgctggccttgctgctccacgccgccaggccggaagtgcagctggttgaatctggcggaggactggttcagcctggcggatctctgagactgtcttgtgccgccagcggcttcagcttcagcgacttttggatgagctgggtccgacaggcccctggcaaaggacttgaatgggtcgccacaatcagccaggccggcagcgagaaggactacgtggactctgtgaagggcagattcaccatcagccgggacaacgccaagaagtccctgtacctccagatgaacagcctgagagccgaggacaccgccgtgtactattgtgcctctggcgtgtacagcttcgactacagaggccagggcaccctggtcacagtctcttctggtaccggcggaggcggatctggcggcggaggtagcggtggcggaggatctgaattcgacatccagatgacccagagccccagcagcctgtctgccagcgtgggcgacagagtgaccatcacctgtagagccagccaggacgtgaacaccgccgtggcctggtatcagcagaagcctggcaaggcccccaagctgctgatctacagcgccagcttcctggaaagcggcgtgcccagcagattcagcggaagcagaagcggcaccgacttcaccctgaccatcagctccctccagcccgaggacttcgccacctactactgccagcagcactacaccacccctcccaccttcggccagaccaaggtggaaatcaagagactcgaggacctgaagaacgtgttcccacctgaggtggccgtgttcgagcctagcgaggccgagatcagccacacccagaaagccaccctcgtgtgcctggctaccggcttctaccccgaccatgtggaactgtcttggtgggtcaacggcaaagaggtgcacagcggcgtgtgtaccgacccccagccactgaaagaacagcccgccctgaacgacagccggtactgcctgagcagcagactgagagtgtccgccaccttctggcagaacccccggaaccacttcagatgccaggtgcagttctacggcctgagcgagaacgacgagtggacccaggacagagccaagcccgtgacccagatcgtgtctgccgaagcctggggcagagccgatgatgtgattaagatccactggcaggaaaagaagtccaacaccatcctgggcagccaggaaggcaacaccatgaagaccaacgacacctacatgaagttcagctggctgaccgtgcccgagaagtccctggacaaagaacacagatgcatcgtgcggcacgaaaacaacaagaacggcgtggaccaggaaatcatcttcccacccatcaagaccgatgtgattacaatggaccccaaggacaactgctccaaggacgccaacgataccctgctgctccagctgaccaacaccagcgcctactacatgtacttgttgctgctgctgaagtccgtggtgtacttcgccatcatcacatgctgcctgctgatggctatggtcaagcggaaggacagccggggaagggccaagcgatctggatctggagcaacaaacttctcactactcaaacaagcaggtgacgtggaggagaatcccgggcctactagtatggactggatttggcgcatccttttccttgtcggcgctgctaccggcgcgcattccttcgaagaagtgcaactggtggaatctggcggcggactggtgcagcctggcggatctctgagactgagctgtgccgccagcggcttcaacatcaaggacacctacatccactgggtgcgccaggcccctggaaagggactggaatgggtggcccggatctaccccaccaacggctacaccagatacgccgacagcgtgaagggccggttcaccatcagcgccgacaccagcaagaataccgcctacctccagatgaacagcctgcgggccgaggataccgccgtgtactactgctcaagatggggaggcgacggcttctacgctatggacgtgtggggccagggcacccttgtgaccgtgtcatctacgcgtatccagaaccctgatcctgccgtgtaccagctgcgggatagcaagagcagcgacaagagcgtgtgtctgttcaccgacttcgacagccagaccaacgtgtcccagagcaaggactccgacgtgtacatcaccgataagtgcgtgctggacatgcggagcatggacttcaagagcaactccgccgtggcctggtccaacaagtccgatttcgcctgcgccaacgccttcaacaacagcattatccccgaggacacattcttcccaagccccgagagcagcgactccaccgaccacgtgaagcccaaagagacagagaacaccaagcagcccagcaagagctgccacaagcccaaggccatcgtgcacaccgagaaagtgaacatgatgagcctgaccgtgctgggcctgcggatgctgttcgccaaaaccgtggccgtgaacttcctgctgaccgccaagctgttcttcctcctcaccgcc

SEQ ID NO: 6398 - DNA, 2574 bp, synthetic construct
  source 1..2574: mol_type = other DNA
atggccttaccagtgaccgccttgctcctgccgctggccttgctgctccacgccgccaggccggaagtgcagctggttgaatctggcggaggactggttcagcctggcggatctctgagactgtcttgtgccgccagcggcttcagcttcagcgacttttggatgagctgggtccgacaggcccctggcaaaggacttgaatgggtcgccacaatcagccaggccggcagcgagaaggactacgtggactctgtgaagggcagattcaccatcagccgggacaacgccaagaagtccctgtacctccagatgaacagcctgagagccgaggacaccgccgtgtactattgtgcctctggcgtgtacagcttcgactacagaggccagggcaccctggtcacagtctcttctggtaccggcggaggcggatctggcggcggaggtagcggtggcggaggatctgaattcgaccagagcgtgctgacacagcctcctagcgtgtcagtggcccctggcaagaccgccagaatcccctgcgagggcaactacatcggcagcagcaacgtgcactggtatcagcagaagcccggccaggctcccgtgctcgtgatccacttcgacagcgacagacccagcggcatccccgacagattcagcggcagcaacagcggcaacatggctaccctgaccatcagcagagtggaagccggggacgaggccgactactactgtcaagtgtgggagaaccacggctgggtgttcggcggaggcaccaagctgacagtgctgtctctcgaggacctgaagaacgtgttcccacctgaggtggccgtgttcgagcctagcgaggccgagatcagccacacccagaaagccaccctcgtgtgcctggctaccggcttctaccccgaccatgtggaactgtcttggtgggtcaacggcaaagaggtgcacagcggcgtgtgtaccgacccccagccactgaaagaacagcccgccctgaacgacagccggtactgcctgagcagcagactgagagtgtccgccaccttctggcagaacccccggaaccacttcagatgccaggtgcagttctacggcctgagcgagaacgacgagtggacccaggacagagccaagcccgtgacccagatcgtgtctgccgaagcctggggcagagccgatgatgtgattaagatccactggcaggaaaagaagtccaacaccatcctgggcagccaggaaggcaacaccatgaagaccaacgacacctacatgaagttcagctggctgaccgtgcccgagaagtccctggacaaagaacacagatgcatcgtgcggcacgaaaacaacaagaacggcgtggaccaggaaatcatcttcccacccatcaagaccgatgtgattacaatggaccccaaggacaactgctccaaggacgccaacgataccctgctgctccagctgaccaacaccagcgcctactacatgtacttgttgctgctgctgaagtccgtggtgtacttcgccatcatcacatgctgcctgctgatggctatggtcaagcggaaggacagccggggaagggccaagcgatctggatctggagcaacaaacttctcactactcaaacaagcaggtgacgtggaggagaatcccgggcctactagtatggactggatttggcgcatccttttccttgtcggcgctgctaccggcgcgcattccttcgaagaggtgcaactggtggaaacaggcggcggactggtgcagcctggcgagtctctgagactgagctgtgccgccagcggcttcaccttcagcgactacgagatgaactgggtgcgccaggcccctggaaagggcctggaatgggtgtcctacatcagcagctccggcagcaccatctactacgccgacagcgtgaagggccggtttaccatctaccgggacaacgccaagaacagcctgtacctccagatgaactccctgcgggccgaggacaccgccctgtactattgtgccagagcctggggcgtgggaccccctgattattggggacagggcaccctcgtgaccgtgtcctctacgcgtatccagaaccctgatcctgccgtgtaccagctgcgggatagcaagagcagcgacaagagcgtgtgtctgttcaccgacttcgacagccagaccaacgtgtcccagagcaaggactccgacgtgtacatcaccgataagtgcgtgctggacatgcggagcatggacttcaagagcaactccgccgtggcctggtccaacaagtccgatttcgcctgcgccaacgccttcaacaacagcattatccccgaggacacattcttcccaagccccgagagcagcgactccaccgaccacgtgaagcccaaagagacagagaacaccaagcagcccagcaagagctgccacaagcccaaggccatcgtgcacaccgagaaagtgaacatgatgagcctgaccgtgctgggcctgcggatgctgttcgccaaaaccgtggccgtgaacttcctgctgaccgccaagctgttcttcctcctcaccgcc

SEQ ID NO: 6399 - DNA, 2598 bp, synthetic construct
  source 1..2598: mol_type = other DNA
atggccttaccagtgaccgccttgctcctgccgctggccttgctgctccacgccgccaggccggaagtgcagctggttgaatctggcggaggactggttcagcctggcggatctctgagactgtcttgtgccgccagcggcttcagcttcagcgacttttggatgagctgggtccgacaggcccctggcaaaggacttgaatgggtcgccacaatcagccaggccggcagcgagaaggactacgtggactctgtgaagggcagattcaccatcagccgggacaacgccaagaagtccctgtacctccagatgaacagcctgagagccgaggacaccgccgtgtactattgtgcctctggcgtgtacagcttcgactacagaggccagggcaccctggtcacagtctcttctggtaccggcggaggcggatctggcggcggaggtagcggtggcggaggatctgaattcgacatccagatgacccagagccccagcagcctgtctgccagcgtgggcgataccgtgaccatcacctgtcaggccaacggctacctgaactggtatcagcagcggagaggcaaggcccccaagctgctgatctacgacggcagcaagctggaaagaggcgtgcccagcagattcagcggcagaagatggggccaggagtacaacctgaccatcaacaacctccagcccgaggatattgccacatacttttgccaggtgtacgagttcgtggtgcccggcacacggctggacctgaagagaacagtggctgctcctctcgaggacctgaagaacgtgttcccacctgaggtggccgtgttcgagcctagcgaggccgagatcagccacacccagaaagccaccctcgtgtgcctggctaccggcttctaccccgaccatgtggaactgtcttggtgggtcaacggcaaagaggtgcacagcggcgtgtgtaccgacccccagccactgaaagaacagcccgccctgaacgacagccggtactgcctgagcagcagactgagagtgtccgccaccttctggcagaacccccggaaccacttcagatgccaggtgcagttctacggcctgagcgagaacgacgagtggacccaggacagagccaagcccgtgacccagatcgtgtctgccgaagcctggggcagagccgatgatgtgattaagatccactggcaggaaaagaagtccaacaccatcctgggcagccaggaaggcaacaccatgaagaccaacgacacctacatgaagttcagctggctgaccgtgcccgagaagtccctggacaaagaacacagatgcatcgtgcggcacgaaaacaacaagaacggcgtggaccaggaaatcatcttcccacccatcaagaccgatgtgattacaatggaccccaaggacaactgctccaaggacgccaacgataccctgctgctccagctgaccaacaccagcgcctactacatgtacttgttgctgctgctgaagtccgtggtgtacttcgccatcatcacatgctgcctgctgatggctatggtcaagcggaaggacagccggggaagggccaagcgatctggatctggagcaacaaacttctcactactcaaacaagcaggtgacgtggaggagaatcccgggcctactagtatggactggatttggcgcatccttttccttgtcggcgctgctaccggcgcgcattccttcgaacaggtgcagctgctccagtctggcgctgccgtgacaaagcctggcgcttctgtgcgggtgtcctgtgaagccagcggctacaacatccgggactacttcatccactggtggcggcaggctccaggccagggactccagtgggtgggatggatcaaccccaagaccggccagcccaacaaccccagacagttccagggcagagtgtccctgaccagacacgccagctgggacttcgacaccttcagcttctacatggatctgaaggccctgcggagcgacgataccgccgtgtacttctgcgccagacagagaagcgactactgggatttcgacgtgtggggcagcggcacccaagtgacagtgtctagcgccagcaccaagggacccacgcgtatccagaaccctgatcctgccgtgtaccagctgcgggatagcaagagcagcgacaagagcgtgtgtctgttcaccgacttcgacagccagaccaacgtgtcccagagcaaggactccgacgtgtacatcaccgataagtgcgtgctggacatgcggagcatggacttcaagagcaactccgccgtggcctggtccaacaagtccgatttcgcctgcgccaacgccttcaacaacagcattatccccgaggacacattcttcccaagccccgagagcagcgactccaccgaccacgtgaagcccaaagagacagagaacaccaagcagcccagcaagagctgccacaagcccaaggccatcgtgcacaccgagaaagtgaacatgatgagcctgaccgtgctgggcctgcggatgctgttcgccaaaaccgtggccgtgaacttcctgctgaccgccaagctgttcttcctcctcaccgcc

SEQ ID NO: 6400 - DNA, 2616 bp, synthetic construct
  source 1..2616: mol_type = other DNA
atggccttaccagtgaccgccttgctcctgccgctggccttgctgctccacgccgccaggccggaagtgcagctggttgaatctggcggaggactggttcagcctggcggatctctgagactgtcttgtgccgccagcggcttcagcttcagcgacttttggatgagctgggtccgacaggcccctggcaaaggacttgaatgggtcgccacaatcagccaggccggcagcgagaaggactacgtggactctgtgaagggcagattcaccatcagccgggacaacgccaagaagtccctgtacctccagatgaacagcctgagagccgaggacaccgccgtgtactattgtgcctctggcgtgtacagcttcgactacagaggccagggcaccctggtcacagtctcttctggtaccggcggaggcggatctggcggcggaggtagcggtggcggaggatctgaattccagtctgccctgacacagcctcctagcgcctctggctctcccggccagagcatcaccatcagctgtaccggcaccagcaacaacttcgtgtcctggtatcagcagcacgccggcaaggcccccaagctcgtgatctacgacgtgaacaagcggcccagcggcgtgcccgatagattcagcggcagcaagagcggcaacaccgccagcctgacagtgtctggcctccagaccgatgacgaggccgtgtactactgcggcagcctcgtgggcaactgggacgtgatctttggcggaggcaccaagctgaccgtgctgctcgaggacctgaagaacgtgttcccacctgaggtggccgtgttcgagcctagcgaggccgagatcagccacacccagaaagccaccctcgtgtgcctggctaccggcttctaccccgaccatgtggaactgtcttggtgggtcaacggcaaagaggtgcacagcggcgtgtgtaccgacccccagccactgaaagaacagcccgccctgaacgacagccggtactgcctgagcagcagactgagagtgtccgccaccttctggcagaacccccggaaccacttcagatgccaggtgcagttctacggcctgagcgagaacgacgagtggacccaggacagagccaagcccgtgacccagatcgtgtctgccgaagcctggggcagagccgatgatgtgattaagatccactggcaggaaaagaagtccaacaccatcctgggcagccaggaaggcaacaccatgaagaccaacgacacctacatgaagttcagctggctgaccgtgcccgagaagtccctggacaaagaacacagatgcatcgtgcggcacgaaaacaacaagaacggcgtggaccaggaaatcatcttcccacccatcaagaccgatgtgattacaatggaccccaaggacaactgctccaaggacgccaacgataccctgctgctccagctgaccaacaccagcgcctactacatgtacttgttgctgctgctgaagtccgtggtgtacttcgccatcatcacatgctgcctgctgatggctatggtcaagcggaaggacagccggggaagggccaagcgatctggatctggagcaacaaacttctcactactcaaacaagcaggtgacgtggaggagaatcccgggcctactagtatggactggatttggcgcatccttttccttgtcggcgctgctaccggcgcgcattccttcgaacagccccagctccaggaatctggccccacactggtggaagccagcgagacactgagcctgacctgtgccgtgtccggcgattctaccgccgcctgcaatagcttctggggctgggtgcgccagcctcctggaaagggactggaatgggtgggaagcctgagccactgcgccagctattggaaccggggctggacctaccacaaccccagcctgaagtccagactgaccctggccctggacacccccaagaacctggtgttcctgaagctgaacagcgtgacagccgccgacaccgccacctactactgtgccagatttggcggcgaggtgctgcggtacaccgactggcctaaacctgcctgggtggacctgtggggcagaggaacactcgtgaccgtgtccagcacgcgtatccagaaccctgatcctgccgtgtaccagctgcgggatagcaagagcagcgacaagagcgtgtgtctgttcaccgacttcgacagccagaccaacgtgtcccagagcaaggactccgacgtgtacatcaccgataagtgcgtgctggacatgcggagcatggacttcaagagcaactccgccgtggcctggtccaacaagtccgatttcgcctgcgccaacgccttcaacaacagcattatccccgaggacacattcttcccaagccccgagagcagcgactccaccgaccacgtgaagcccaaagagacagagaacaccaagcagcccagcaagagctgccacaagcccaaggccatcgtgcacaccgagaaagtgaacatgatgagcctgaccgtgctgggcctgcggatgctgttcgccaaaaccgtggccgtgaacttcctgctgaccgccaagctgttcttcctcctcaccgcc

SEQ ID NO: 6401 - DNA, 2571 bp, synthetic construct
  source 1..2571: mol_type = other DNA
atggccttaccagtgaccgccttgctcctgccgctggccttgctgctccacgccgccaggccggaagtgcagctggttgaatctggcggaggactggttcagcctggcggatctctgagactgtcttgtgccgccagcggcttcagcttcagcgacttttggatgagctgggtccgacaggcccctggcaaaggacttgaatgggtcgccacaatcagccaggccggcagcgagaaggactacgtggactctgtgaagggcagattcaccatcagccgggacaacgccaagaagtccctgtacctccagatgaacagcctgagagccgaggacaccgccgtgtactattgtgcctctggcgtgtacagcttcgactacagaggccagggcaccctggtcacagtctcttctggtaccggcggaggcggatctggcggcggaggtagcggtggcggaggatctgaattcgagatcgtgctgacacagagccctggcaccctgagcctgtctccaggcgagacagccatcatcagctgccggacaagccagtacggcagcctggcctggtatcagcagaggccaggacaggcccccagactcgtgatctacagcggcagcacaagagccgccggaatccccgatagattcagcggctccagatggggacccgactacaacctgaccatcagcaacctggaaagcggcgacttcggcgtgtactactgccagcagtacgagttcttcggccagggcaccaaggtgcaggtggacatcaaaagactcgaggacctgaagaacgtgttcccacctgaggtggccgtgttcgagcctagcgaggccgagatcagccacacccagaaagccaccctcgtgtgcctggctaccggcttctaccccgaccatgtggaactgtcttggtgggtcaacggcaaagaggtgcacagcggcgtgtgtaccgacccccagccactgaaagaacagcccgccctgaacgacagccggtactgcctgagcagcagactgagagtgtccgccaccttctggcagaacccccggaaccacttcagatgccaggtgcagttctacggcctgagcgagaacgacgagtggacccaggacagagccaagcccgtgacccagatcgtgtctgccgaagcctggggcagagccgatgatgtgattaagatccactggcaggaaaagaagtccaacaccatcctgggcagccaggaaggcaacaccatgaagaccaacgacacctacatgaagttcagctggctgaccgtgcccgagaagtccctggacaaagaacacagatgcatcgtgcggcacgaaaacaacaagaacggcgtggaccaggaaatcatcttcccacccatcaagaccgatgtgattacaatggaccccaaggacaactgctccaaggacgccaacgataccctgctgctccagctgaccaacaccagcgcctactacatgtacttgttgctgctgctgaagtccgtggtgtacttcgccatcatcacatgctgcctgctgatggctatggtcaagcggaaggacagccggggaagggccaagcgatctggatctggagcaacaaacttctcactactcaaacaagcaggtgacgtggaggagaatcccgggcctactagtatggactggatttggcgcatccttttccttgtcggcgctgctaccggcgcgcattccttcgaacaggtgcagctggtgcagtctggcggccagatgaagaaacccggcgagagcatgagaatcagctgtcgggcctccggctacgagttcatcgactgcaccctgaactggatcagactggcccctggcaagcggcctgagtggatgggatggctgaagcctagaggcggagccgtgaactacgccagacctctccagggcagagtgaccatgaccagggacgtgtacagcgataccgccttcctggaactgcggagcctgaccgtggatgataccgccgtgtacttctgcaccagaggcaagaactgcgattacaactgggacttcgagcactggggcagaggcacccctgtgatcgtgtctagcacgcgtatccagaaccctgatcctgccgtgtaccagctgcgggatagcaagagcagcgacaagagcgtgtgtctgttcaccgacttcgacagccagaccaacgtgtcccagagcaaggactccgacgtgtacatcaccgataagtgcgtgctggacatgcggagcatggacttcaagagcaactccgccgtggcctggtccaacaagtccgatttcgcctgcgccaacgccttcaacaacagcattatccccgaggacacattcttcccaagccccgagagcagcgactccaccgaccacgtgaagcccaaagagacagagaacaccaagcagcccagcaagagctgccacaagcccaaggccatcgtgcacaccgagaaagtgaacatgatgagcctgaccgtgctgggcctgcggatgctgttcgccaaaaccgtggccgtgaacttcctgctgaccgccaagctgttcttcctcctcaccgcc

SEQ ID NO: 6402 - DNA, 2601 bp, synthetic construct
  source 1..2601: mol_type = other DNA
atggccttaccagtgaccgccttgctcctgccgctggccttgctgctccacgccgccaggccggaagtgcagctggttgaatctggcggaggactggttcagcctggcggatctctgagactgtcttgtgccgccagcggcttcagcttcagcgacttttggatgagctgggtccgacaggcccctggcaaaggacttgaatgggtcgccacaatcagccaggccggcagcgagaaggactacgtggactctgtgaagggcagattcaccatcagccgggacaacgccaagaagtccctgtacctccagatgaacagcctgagagccgaggacaccgccgtgtactattgtgcctctggcgtgtacagcttcgactacagaggccagggcaccctggtcacagtctcttctggtaccggcggaggcggatctggcggcggaggtagcggtggcggaggatctgaattcgagctggtgctgacacagagccctggcaccctgtctctgtctgccggcgaaagagccaccctgagctgtagagccagccagagcgtgtcctctggcagcctggcttggtatcagcagaagccaggccaggcccccagactgctgatctacggcgcttctaccagagccaccggcatccccgatagattcagcggctctggctccggcaccgacttcaccctgacaatcggcagactggaacccgaggacctggccgtgtactactgccagcagtacggcaccagcccctacacattcggccagggcaccaagctggaaatcctcgaggacctgaagaacgtgttcccacctgaggtggccgtgttcgagcctagcgaggccgagatcagccacacccagaaagccaccctcgtgtgcctggctaccggcttctaccccgaccatgtggaactgtcttggtgggtcaacggcaaagaggtgcacagcggcgtgtgtaccgacccccagccactgaaagaacagcccgccctgaacgacagccggtactgcctgagcagcagactgagagtgtccgccaccttctggcagaacccccggaaccacttcagatgccaggtgcagttctacggcctgagcgagaacgacgagtggacccaggacagagccaagcccgtgacccagatcgtgtctgccgaagcctggggcagagccgatgatgtgattaagatccactggcaggaaaagaagtccaacaccatcctgggcagccaggaaggcaacaccatgaagaccaacgacacctacatgaagttcagctggctgaccgtgcccgagaagtccctggacaaagaacacagatgcatcgtgcggcacgaaaacaacaagaacggcgtggaccaggaaatcatcttcccacccatcaagaccgatgtgattacaatggaccccaaggacaactgctccaaggacgccaacgataccctgctgctccagctgaccaacaccagcgcctactacatgtacttgttgctgctgctgaagtccgtggtgtacttcgccatcatcacatgctgcctgctgatggctatggtcaagcggaaggacagccggggaagggccaagcgatctggatctggagcaacaaacttctcactactcaaacaagcaggtgacgtggaggagaatcccgggcctactagtatggactggatttggcgcatccttttccttgtcggcgctgctaccggcgcgcattccttcgaactggaacagagcggagccgaagtgaagaaacccggcagcagcgtgcaggtgtcctgcaaagcaagcggcggcaccttctctatgtacggcttcaactgggtgcgccaggctcctggacacggcctggaatggatgggcggcatcatccccatcttcggcacctccaactacgcccagaaattccggggcagagtgaccttcaccgccgaccaggccacaagcaccgcctacatggaactgaccaacctgcggagcgacgacaccgccgtgtattattgcgccagagacttcggccccgactgggaggatggcgacagctacgatggcagcggcagaggcttcttcgacttctggggccagggaacccttgtgaccgtgtcctcaacgcgtatccagaaccctgatcctgccgtgtaccagctgcgggatagcaagagcagcgacaagagcgtgtgtctgttcaccgacttcgacagccagaccaacgtgtcccagagcaaggactccgacgtgtacatcaccgataagtgcgtgctggacatgcggagcatggacttcaagagcaactccgccgtggcctggtccaacaagtccgatttcgcctgcgccaacgccttcaacaacagcattatccccgaggacacattcttcccaagccccgagagcagcgactccaccgaccacgtgaagcccaaagagacagagaacaccaagcagcccagcaagagctgccacaagcccaaggccatcgtgcacaccgagaaagtgaacatgatgagcctgaccgtgctgggcctgcggatgctgttcgccaaaaccgtggccgtgaacttcctgctgaccgccaagctgttcttcctcctcaccgcc

SEQ ID NO: 6403 - DNA, 2541 bp, synthetic construct
  source 1..2541: mol_type = other DNA
atggccttaccagtgaccgccttgctcctgccgctggccttgctgctccacgccgccaggccggaagtgcagctggttgaatctggcggaggactggttcagcctggcggatctctgagactgtcttgtgccgccagcggcttcagcttcagcgacttttggatgagctgggtccgacaggcccctggcaaaggacttgaatgggtcgccacaatcagccaggccggcagcgagaaggactacgtggactctgtgaagggcagattcaccatcagccgggacaacgccaagaagtccctgtacctccagatgaacagcctgagagccgaggacaccgccgtgtactattgtgcctctggcgtgtacagcttcgactacagaggccagggcaccctggtcacagtctcttctggtaccggcggaggcggatctggcggcggaggtagcggtggcggaggatctgaattcgacatccagatgacccagagccccagcagcctgtctgccagcgtgggcgacagagtgaccatcacctgtcaggccagccaggacatcaacaactacctgaactggtatcagcagaagcccggcaaggcccccaagctgctgatctacgacgccagcaatctgcagaccggcgtgcccagcagattttccggctctggcagcggcaccgacttcaccttcaccatcgaggacattgccacctactactgccagcagtacaccttcggccctggcaccaaggtggacatcaaactcgaggacctgaagaacgtgttcccacctgaggtggccgtgttcgagcctagcgaggccgagatcagccacacccagaaagccaccctcgtgtgcctggctaccggcttctaccccgaccatgtggaactgtcttggtgggtcaacggcaaagaggtgcacagcggcgtgtgtaccgacccccagccactgaaagaacagcccgccctgaacgacagccggtactgcctgagcagcagactgagagtgtccgccaccttctggcagaacccccggaaccacttcagatgccaggtgcagttctacggcctgagcgagaacgacgagtggacccaggacagagccaagcccgtgacccagatcgtgtctgccgaagcctggggcagagccgatgatgtgattaagatccactggcaggaaaagaagtccaacaccatcctgggcagccaggaaggcaacaccatgaagaccaacgacacctacatgaagttcagctggctgaccgtgcccgagaagtccctggacaaagaacacagatgcatcgtgcggcacgaaaacaacaagaacggcgtggaccaggaaatcatcttcccacccatcaagaccgatgtgattacaatggaccccaaggacaactgctccaaggacgccaacgataccctgctgctccagctgaccaacaccagcgcctactacatgtacttgttgctgctgctgaagtccgtggtgtacttcgccatcatcacatgctgcctgctgatggctatggtcaagcggaaggacagccggggaagggccaagcgatctggatctggagcaacaaacttctcactactcaaacaagcaggtgacgtggaggagaatcccgggcctactagtatggactggatttggcgcatccttttccttgtcggcgctgctaccggcgcgcattccttcgaagaagtgcaactgctggaatctggcggcggactggtgcagcctggcggatctctgagactgagctgtgccgccagcggcttcacctttagctggtacagcatgacctgggtgcgccaggcccctggcaaaggactggaatgggtgtccagcatcgtgccctggggcgatttcacccagtacgccgatagcgtgaagggccggttcaccatcagccgggacaacagcaagaacaccctgtacctgcagatgaacagcctgcgggccgaggacaccgccgtgtactattgtgccaagggacctggctggggcagcttcgatctgtggggcagaggaacccttgtgaccgtgtccagcacgcgtatccagaaccctgatcctgccgtgtaccagctgcgggatagcaagagcagcgacaagagcgtgtgtctgttcaccgacttcgacagccagaccaacgtgtcccagagcaaggactccgacgtgtacatcaccgataagtgcgtgctggacatgcggagcatggacttcaagagcaactccgccgtggcctggtccaacaagtccgatttcgcctgcgccaacgccttcaacaacagcattatccccgaggacacattcttcccaagccccgagagcagcgactccaccgaccacgtgaagcccaaagagacagagaacaccaagcagcccagcaagagctgccacaagcccaaggccatcgtgcacaccgagaaagtgaacatgatgagcctgaccgtgctgggcctgcggatgctgttcgccaaaaccgtggccgtgaacttcctgctgaccgccaagctgttcttcctcctcaccgcc

SEQ ID NO: 6404 - DNA, 2571 bp, synthetic construct
  source 1..2571: mol_type = other DNA
atggccttaccagtgaccgccttgctcctgccgctggccttgctgctccacgccgccaggccggaagtgcagctggttgaatctggcggaggactggttcagcctggcggatctctgagactgtcttgtgccgccagcggcttcagcttcagcgacttttggatgagctgggtccgacaggcccctggcaaaggacttgaatgggtcgccacaatcagccaggccggcagcgagaaggactacgtggactctgtgaagggcagattcaccatcagccgggacaacgccaagaagtccctgtacctccagatgaacagcctgagagccgaggacaccgccgtgtactattgtgcctctggcgtgtacagcttcgactacagaggccagggcaccctggtcacagtctcttctggtaccggcggaggcggatctggcggcggaggtagcggtggcggaggatctgaattcgacatccagatgacccagagccccagcagcctgtctgccagcgtgggcgacagagtgaccatcacctgtaccgccagcctgagcgtgtccagcacctacctgcactggtatcagcagaagcccggcagcagccccaagctgtggatctacagcaccagcaacctggcctccggcgtgcccagcagattttctggcagcggctctggcaccagctacaccctgaccatcagctccctccagcccgaggacttcgccacctactactgccaccagtaccacagaagccccctgacctttggcggaggcaccaaggtggaaatcaagagactcgaggacctgaagaacgtgttcccacctgaggtggccgtgttcgagcctagcgaggccgagatcagccacacccagaaagccaccctcgtgtgcctggctaccggcttctaccccgaccatgtggaactgtcttggtgggtcaacggcaaagaggtgcacagcggcgtgtgtaccgacccccagccactgaaagaacagcccgccctgaacgacagccggtactgcctgagcagcagactgagagtgtccgccaccttctggcagaacccccggaaccacttcagatgccaggtgcagttctacggcctgagcgagaacgacgagtggacccaggacagagccaagcccgtgacccagatcgtgtctgccgaagcctggggcagagccgatgatgtgattaagatccactggcaggaaaagaagtccaacaccatcctgggcagccaggaaggcaacaccatgaagaccaacgacacctacatgaagttcagctggctgaccgtgcccgagaagtccctggacaaagaacacagatgcatcgtgcggcacgaaaacaacaagaacggcgtggaccaggaaatcatcttcccacccatcaagaccgatgtgattacaatggaccccaaggacaactgctccaaggacgccaacgataccctgctgctccagctgaccaacaccagcgcctactacatgtacttgttgctgctgctgaagtccgtggtgtacttcgccatcatcacatgctgcctgctgatggctatggtcaagcggaaggacagccggggaagggccaagcgatctggatctggagcaacaaacttctcactactcaaacaagcaggtgacgtggaggagaatcccgggcctactagtatggactggatttggcgcatccttttccttgtcggcgctgctaccggcgcgcattccttcgaagaagtgcaactggtggaatctggcggcggactggtgcagcctggcggatctctgagactgagctgtgccgccagcggcttcagcctgaccaaatacggcgtgcactgggtgcgccaggcccctggaaaaggactggaatgggtgggagtgaagtgggctggcggctccaccgactacaacagcgccctgatgagccggttcaccatcagcaaggacaacgccaagaacagcctgtacctccagatgaactccctgcgggccgaggacaccgccgtgtactactgtgccagagatcaccgggacgctatggactactggggccagggaacactcgtgaccgtgtcctctacgcgtatccagaaccctgatcctgccgtgtaccagctgcgggatagcaagagcagcgacaagagcgtgtgtctgttcaccgacttcgacagccagaccaacgtgtcccagagcaaggactccgacgtgtacatcaccgataagtgcgtgctggacatgcggagcatggacttcaagagcaactccgccgtggcctggtccaacaagtccgatttcgcctgcgccaacgccttcaacaacagcattatccccgaggacacattcttcccaagccccgagagcagcgactccaccgaccacgtgaagcccaaagagacagagaacaccaagcagcccagcaagagctgccacaagcccaaggccatcgtgcacaccgagaaagtgaacatgatgagcctgaccgtgctgggcctgcggatgctgttcgccaaaaccgtggccgtgaacttcctgctgaccgccaagctgttcttcctcctcaccgcc

SEQ ID NO: 6405 - DNA, 2583 bp, synthetic construct
  source 1..2583: mol_type = other DNA
atggccttaccagtgaccgccttgctcctgccgctggccttgctgctccacgccgccaggccggaagtgcagctggttgaatctggcggaggactggttcagcctggcggatctctgagactgtcttgtgccgccagcggcttcagcttcagcgacttttggatgagctgggtccgacaggcccctggcaaaggacttgaatgggtcgccacaatcagccaggccggcagcgagaaggactacgtggactctgtgaagggcagattcaccatcagccgggacaacgccaagaagtccctgtacctccagatgaacagcctgagagccgaggacaccgccgtgtactattgtgcctctggcgtgtacagcttcgactacagaggccagggcaccctggtcacagtctcttctggtaccggcggaggcggatctggcggcggaggtagcggtggcggaggatctgaattcgacatccagatgacccagagccccagcagcctgtctgccagcgtgggcgacagagtgaccatcacatgcaaggccagccaggacgtgggaacagccgtggcctggtatcagcagaagcctggcaaggcccccaagctgctgatctacagcgccagctacagatccaccggcgtgcccagcagattttccggctctggcagcggcaccgacttcaccctgaccatctctagcctccagcccgaggacttcgccacctactactgccagcaccactactccgccccctggacatttggcggaggcaccaaggtggaaatcaagctcgaggacctgaagaacgtgttcccacctgaggtggccgtgttcgagcctagcgaggccgagatcagccacacccagaaagccaccctcgtgtgcctggctaccggcttctaccccgaccatgtggaactgtcttggtgggtcaacggcaaagaggtgcacagcggcgtgtgtaccgacccccagccactgaaagaacagcccgccctgaacgacagccggtactgcctgagcagcagactgagagtgtccgccaccttctggcagaacccccggaaccacttcagatgccaggtgcagttctacggcctgagcgagaacgacgagtggacccaggacagagccaagcccgtgacccagatcgtgtctgccgaagcctggggcagagccgatgatgtgattaagatccactggcaggaaaagaagtccaacaccatcctgggcagccaggaaggcaacaccatgaagaccaacgacacctacatgaagttcagctggctgaccgtgcccgagaagtccctggacaaagaacacagatgcatcgtgcggcacgaaaacaacaagaacggcgtggaccaggaaatcatcttcccacccatcaagaccgatgtgattacaatggaccccaaggacaactgctccaaggacgccaacgataccctgctgctccagctgaccaacaccagcgcctactacatgtacttgttgctgctgctgaagtccgtggtgtacttcgccatcatcacatgctgcctgctgatggctatggtcaagcggaaggacagccggggaagggccaagcgatctggatctggagcaacaaacttctcactactcaaacaagcaggtgacgtggaggagaatcccgggcctactagtatggactggatttggcgcatccttttccttgtcggcgctgctaccggcgcgcattccttcgaagaagtgcaactggtggaatcaggcggcggactggtgcagcctggcggatctctgagactgagctgtgccgccagcggcttcaccttcagcagaaacggcatgagctgggtgcgccaggcccctggaaaaggactggaatgggtggcaaccgtgtccagcggcggcagctacatctactacgccgacagcgtgaagggccggttcaccatctccagagacaacgccaagaacagcctgtacctccagatgaactccctgcgggccgaggacaccgccgtgtactattgtgccagacagggcaccaccgccctggctaccagattcttcgatgtgtggggccagggcaccctcgtgaccgtgtcatctacgcgtatccagaaccctgatcctgccgtgtaccagctgcgggatagcaagagcagcgacaagagcgtgtgtctgttcaccgacttcgacagccagaccaacgtgtcccagagcaaggactccgacgtgtacatcaccgataagtgcgtgctggacatgcggagcatggacttcaagagcaactccgccgtggcctggtccaacaagtccgatttcgcctgcgccaacgccttcaacaacagcattatccccgaggacacattcttcccaagccccgagagcagcgactccaccgaccacgtgaagcccaaagagacagagaacaccaagcagcccagcaagagctgccacaagcccaaggccatcgtgcacaccgagaaagtgaacatgatgagcctgaccgtgctgggcctgcggatgctgttcgccaaaaccgtggccgtgaacttcctgctgaccgccaagctgttcttcctcctcaccgcc

SEQ ID NO: 6406 - DNA, 2571 bp, synthetic construct
  source 1..2571: mol_type = other DNA
atggccttaccagtgaccgccttgctcctgccgctggccttgctgctccacgccgccaggccggaagtgcagctggttgaatctggcggaggactggttcagcctggcggatctctgagactgtcttgtgccgccagcggcttcagcttcagcgacttttggatgagctgggtccgacaggcccctggcaaaggacttgaatgggtcgccacaatcagccaggccggcagcgagaaggactacgtggactctgtgaagggcagattcaccatcagccgggacaacgccaagaagtccctgtacctccagatgaacagcctgagagccgaggacaccgccgtgtactattgtgcctctggcgtgtacagcttcgactacagaggccagggcaccctggtcacagtctcttctggtaccggcggaggcggatctggcggcggaggtagcggtggcggaggatctgaattcgacatccagatgacccagagcccccctagcctgtctgcctctgtgggcggcaaagtgaccatcacatgcaaggccagccaggacatcgaccgctacatggcctggtatcaggacaagcccggcaagggacccaagctgctgatccacgataccagcaccctccagcccggcatccccagcagattttctggcagcggctccggcagagactacagcttcagcatcagcaacctggaacccgaggacattgccacctactactgcctccagtacgacaacctgtggaccttcggcggaggcaccaagctggaaatcaagagactcgaggacctgaagaacgtgttcccacctgaggtggccgtgttcgagcctagcgaggccgagatcagccacacccagaaagccaccctcgtgtgcctggctaccggcttctaccccgaccatgtggaactgtcttggtgggtcaacggcaaagaggtgcacagcggcgtgtgtaccgacccccagccactgaaagaacagcccgccctgaacgacagccggtactgcctgagcagcagactgagagtgtccgccaccttctggcagaacccccggaaccacttcagatgccaggtgcagttctacggcctgagcgagaacgacgagtggacccaggacagagccaagcccgtgacccagatcgtgtctgccgaagcctggggcagagccgatgatgtgattaagatccactggcaggaaaagaagtccaacaccatcctgggcagccaggaaggcaacaccatgaagaccaacgacacctacatgaagttcagctggctgaccgtgcccgagaagtccctggacaaagaacacagatgcatcgtgcggcacgaaaacaacaagaacggcgtggaccaggaaatcatcttcccacccatcaagaccgatgtgattacaatggaccccaaggacaactgctccaaggacgccaacgataccctgctgctccagctgaccaacaccagcgcctactacatgtacttgttgctgctgctgaagtccgtggtgtacttcgccatcatcacatgctgcctgctgatggctatggtcaagcggaaggacagccggggaagggccaagcgatctggatctggagcaacaaacttctcactactcaaacaagcaggtgacgtggaggagaatcccgggcctactagtatggactggatttggcgcatccttttccttgtcggcgctgctaccggcgcgcattccttcgaacaggtgcaactggtgcagagcggagccgagcttgtgaagcctggcgcttccgtgaagatgagctgcaaagccagcggctacatcttcaccaactacaacatccactgggtcaagaagtccccaggccagggcctggaatggatcggagccatctaccccggaaacggcgacgccccttacagccagaagttccaggacagagccaccctgaccgccgacaccagcagcagcaccacctacatggaactgagcagcctgaccagcgaggacagcgccgtgtactattgcgtgcgggccaactgggatgtggccttcgcctattggggccagggcacactggtgtccgtgtcctctacgcgtatccagaaccctgatcctgccgtgtaccagctgcgggatagcaagagcagcgacaagagcgtgtgtctgttcaccgacttcgacagccagaccaacgtgtcccagagcaaggactccgacgtgtacatcaccgataagtgcgtgctggacatgcggagcatggacttcaagagcaactccgccgtggcctggtccaacaagtccgatttcgcctgcgccaacgccttcaacaacagcattatccccgaggacacattcttcccaagccccgagagcagcgactccaccgaccacgtgaagcccaaagagacagagaacaccaagcagcccagcaagagctgccacaagcccaaggccatcgtgcacaccgagaaagtgaacatgatgagcctgaccgtgctgggcctgcggatgctgttcgccaaaaccgtggccgtgaacttcctgctgaccgccaagctgttcttcctcctcaccgcc

SEQ ID NO: 6407 - DNA, 2574 bp, synthetic construct
  source 1..2574: mol_type = other DNA
atggccttaccagtgaccgccttgctcctgccgctggccttgctgctccacgccgccaggccggaagtgcagctggttgaatctggcggaggactggttcagcctggcggatctctgagactgtcttgtgccgccagcggcttcagcttcagcgacttttggatgagctgggtccgacaggcccctggcaaaggacttgaatgggtcgccacaatcagccaggccggcagcgagaaggactacgtggactctgtgaagggcagattcaccatcagccgggacaacgccaagaagtccctgtacctccagatgaacagcctgagagccgaggacaccgccgtgtactattgtgcctctggcgtgtacagcttcgactacagaggccagggcaccctggtcacagtctcttctggtaccggcggaggcggatctggcggcggaggtagcggtggcggaggatctgaattcgacatccagatgacccagagccctgccagcctgtctgcctctgtgggcgagacagtgaccatcacctgtcgggtgtccggcaacatccacaactacctggcctggtatcagcagaagcagggcaagagcccccaactgctggtgtacaacgccaagaccctggccgatggcgtgcccagcagattttctggctctggcagcggcacccagtacagcctgaagatcaacagcctccagcccgaggacttcggcagctactactgccagcacttctggtccaacccctacaccttcggcggaggcaccaagctggaaatcaagctcgaggacctgaagaacgtgttcccacctgaggtggccgtgttcgagcctagcgaggccgagatcagccacacccagaaagccaccctcgtgtgcctggctaccggcttctaccccgaccatgtggaactgtcttggtgggtcaacggcaaagaggtgcacagcggcgtgtgtaccgacccccagccactgaaagaacagcccgccctgaacgacagccggtactgcctgagcagcagactgagagtgtccgccaccttctggcagaacccccggaaccacttcagatgccaggtgcagttctacggcctgagcgagaacgacgagtggacccaggacagagccaagcccgtgacccagatcgtgtctgccgaagcctggggcagagccgatgatgtgattaagatccactggcaggaaaagaagtccaacaccatcctgggcagccaggaaggcaacaccatgaagaccaacgacacctacatgaagttcagctggctgaccgtgcccgagaagtccctggacaaagaacacagatgcatcgtgcggcacgaaaacaacaagaacggcgtggaccaggaaatcatcttcccacccatcaagaccgatgtgattacaatggaccccaaggacaactgctccaaggacgccaacgataccctgctgctccagctgaccaacaccagcgcctactacatgtacttgttgctgctgctgaagtccgtggtgtacttcgccatcatcacatgctgcctgctgatggctatggtcaagcggaaggacagccggggaagggccaagcgatctggatctggagcaacaaacttctcactactcaaacaagcaggtgacgtggaggagaatcccgggcctactagtatggactggatttggcgcatccttttccttgtcggcgctgctaccggcgcgcattccttcgaacaggtgcaactccagcagtctggcgcttccgtgaaggtgtcctgcaaggccagcgaactcgtgcggcctggcacaggctacgccttcaccaattacctgatcgagtgggtcaagcagaggcccggacagggcctggaatggatcggagtgattaacccaggcagcggcggcaccaactacaacgagaagttcaagggcaaggccaccctgaccgccgacaagagcagcagcacagcctacatgcaactgagcagcctgaccagcgacgacagcgccgtgtacttctgcgcccggtacagaagctacgactggtacttcgacgtgtggggagccggcaccaccgtgacagtgtcatctacgcgtatccagaaccctgatcctgccgtgtaccagctgcgggatagcaagagcagcgacaagagcgtgtgtctgttcaccgacttcgacagccagaccaacgtgtcccagagcaaggactccgacgtgtacatcaccgataagtgcgtgctggacatgcggagcatggacttcaagagcaactccgccgtggcctggtccaacaagtccgatttcgcctgcgccaacgccttcaacaacagcattatccccgaggacacattcttcccaagccccgagagcagcgactccaccgaccacgtgaagcccaaagagacagagaacaccaagcagcccagcaagagctgccacaagcccaaggccatcgtgcacaccgagaaagtgaacatgatgagcctgaccgtgctgggcctgcggatgctgttcgccaaaaccgtggccgtgaacttcctgctgaccgccaagctgttcttcctcctcaccgcc

SEQ ID NO: 6408 - DNA, 2571 bp, synthetic construct
  source 1..2571: mol_type = other DNA
atggccttaccagtgaccgccttgctcctgccgctggccttgctgctccacgccgccaggccggaagtgcagctggttgaatctggcggaggactggttcagcctggcggatctctgagactgtcttgtgccgccagcggcttcagcttcagcgacttttggatgagctgggtccgacaggcccctggcaaaggacttgaatgggtcgccacaatcagccaggccggcagcgagaaggactacgtggactctgtgaagggcagattcaccatcagccgggacaacgccaagaagtccctgtacctccagatgaacagcctgagagccgaggacaccgccgtgtactattgtgcctctggcgtgtacagcttcgactacagaggccagggcaccctggtcacagtctcttctggtaccggcggaggcggatctggcggcggaggtagcggtggcggaggatctgaattcgacatccagatgacccagagcttcagcagcctgagcgccagcgtgggcgacagagtgaccatcacctgtagagccagccaggacatcagcaactacctgaactggtatcagcagaagcccggcaaggcccccaagctgctgatctactacaccagcagactgcacagcggcgtgcccagcagattttctggcagcggctccggcaccgactacaccctgacaatcagctccctgcagcccgaggacttcgctacctacttctgtcagcaaggcaacaccctgccctggacctttggcggaggcaccaagctggaaatcaagagactcgaggacctgaagaacgtgttcccacctgaggtggccgtgttcgagcctagcgaggccgagatcagccacacccagaaagccaccctcgtgtgcctggctaccggcttctaccccgaccatgtggaactgtcttggtgggtcaacggcaaagaggtgcacagcggcgtgtgtaccgacccccagccactgaaagaacagcccgccctgaacgacagccggtactgcctgagcagcagactgagagtgtccgccaccttctggcagaacccccggaaccacttcagatgccaggtgcagttctacggcctgagcgagaacgacgagtggacccaggacagagccaagcccgtgacccagatcgtgtctgccgaagcctggggcagagccgatgatgtgattaagatccactggcaggaaaagaagtccaacaccatcctgggcagccaggaaggcaacaccatgaagaccaacgacacctacatgaagttcagctggctgaccgtgcccgagaagtccctggacaaagaacacagatgcatcgtgcggcacgaaaacaacaagaacggcgtggaccaggaaatcatcttcccacccatcaagaccgatgtgattacaatggaccccaaggacaactgctccaaggacgccaacgataccctgctgctccagctgaccaacaccagcgcctactacatgtacttgttgctgctgctgaagtccgtggtgtacttcgccatcatcacatgctgcctgctgatggctatggtcaagcggaaggacagccggggaagggccaagcgatctggatctggagcaacaaacttctcactactcaaacaagcaggtgacgtggaggagaatcccgggcctactagtatggactggatttggcgcatccttttccttgtcggcgctgctaccggcgcgcattccttcgaagaagtgcaactggtgcagtccggcggagggctggtgcagagcggaggatctctgagactgagctgcagagccagcggctacaccttcacccggtactggatgctgtgggtgcgccagaggccaggcaagggactggaatgggtggccgagatcaacccccggaacgaccggaccaactacaacgagaagttcaagacccggttcaccatcagcgtggacagaagcaagaacaccctgtacctgcagatggacagcctgcgggccgaggataccgccgtgtacttttgtgctctgggaggcggctacgctatggactactggggccagggaacccttgtgaccgtgtcctctacgcgtatccagaaccctgatcctgccgtgtaccagctgcgggatagcaagagcagcgacaagagcgtgtgtctgttcaccgacttcgacagccagaccaacgtgtcccagagcaaggactccgacgtgtacatcaccgataagtgcgtgctggacatgcggagcatggacttcaagagcaactccgccgtggcctggtccaacaagtccgatttcgcctgcgccaacgccttcaacaacagcattatccccgaggacacattcttcccaagccccgagagcagcgactccaccgaccacgtgaagcccaaagagacagagaacaccaagcagcccagcaagagctgccacaagcccaaggccatcgtgcacaccgagaaagtgaacatgatgagcctgaccgtgctgggcctgcggatgctgttcgccaaaaccgtggccgtgaacttcctgctgaccgccaagctgttcttcctcctcaccgcc

SEQ ID NO: 6409 - DNA, 2574 bp, synthetic construct
  source 1..2574: mol_type = other DNA
atggccttaccagtgaccgccttgctcctgccgctggccttgctgctccacgccgccaggccggaagtgcagctggttgaatctggcggaggactggttcagcctggcggatctctgagactgtcttgtgccgccagcggcttcagcttcagcgacttttggatgagctgggtccgacaggcccctggcaaaggacttgaatgggtcgccacaatcagccaggccggcagcgagaaggactacgtggactctgtgaagggcagattcaccatcagccgggacaacgccaagaagtccctgtacctccagatgaacagcctgagagccgaggacaccgccgtgtactattgtgcctctggcgtgtacagcttcgactacagaggccagggcaccctggtcacagtctcttctggtaccggcggaggcggatctggcggcggaggtagcggtggcggaggatctgaattcgacatccagatgacacagtctccggcgtcactgtccgcctccgtgggggagactgtgactattatttgtagggcatcagttaacatctactcttatttggcctggtaccagcagaagcaaggcaagagtcctcagctgctggtgtataatgcgaagatcctggcagagggcgtgccgagccggttctccggcagcggctcaggtacccaattttccctcaagatcaattcactgcagccagaggactttggcagttactattgtcaacaccactacggcacattcactttcgggtccggtacaaaattggagattaagcgactcgaggacctgaagaacgtgttcccacctgaggtggccgtgttcgagcctagcgaggccgagatcagccacacccagaaagccaccctcgtgtgcctggctaccggcttctaccccgaccatgtggaactgtcttggtgggtcaacggcaaagaggtgcacagcggcgtgtgtaccgacccccagccactgaaagaacagcccgccctgaacgacagccggtactgcctgagcagcagactgagagtgtccgccaccttctggcagaacccccggaaccacttcagatgccaggtgcagttctacggcctgagcgagaacgacgagtggacccaggacagagccaagcccgtgacccagatcgtgtctgccgaagcctggggcagagccgatgatgtgattaagatccactggcaggaaaagaagtccaacaccatcctgggcagccaggaaggcaacaccatgaagaccaacgacacctacatgaagttcagctggctgaccgtgcccgagaagtccctggacaaagaacacagatgcatcgtgcggcacgaaaacaacaagaacggcgtggaccaggaaatcatcttcccacccatcaagaccgatgtgattacaatggaccccaaggacaactgctccaaggacgccaacgataccctgctgctccagctgaccaacaccagcgcctactacatgtacttgttgctgctgctgaagtccgtggtgtacttcgccatcatcacatgctgcctgctgatggctatggtcaagcggaaggacagccggggaagggccaagcgatctggatctggagcaacaaacttctcactactcaaacaagcaggtgacgtggaggagaatcccgggcctactagtatggactggatttggcgcatccttttccttgtcggcgctgctaccggcgcgcattccttcgaacaggtacagttgaaagaaagcgggcctggactggtagcgccttcccaatctctctccatcacgtgcaccatctctggcttctccctgacttcctatggagttcactgggtgaggcagccccccggcaagggactggaatggctggtcgtcatctggtccgacgggtccacaacctacaactccgctctgaaaagtcggctctctatttctaaagataatagcaagagccaggtgtttctgaaaatgaactctctgcagaccgatgatacggccatttactactgcgcttcacactatggctcaaccttggcattcgcttcctggggccacggaacactggtgaccgtttccgcagccacgcgtatccagaaccctgatcctgccgtgtaccagctgcgggatagcaagagcagcgacaagagcgtgtgtctgttcaccgacttcgacagccagaccaacgtgtcccagagcaaggactccgacgtgtacatcaccgataagtgcgtgctggacatgcggagcatggacttcaagagcaactccgccgtggcctggtccaacaagtccgatttcgcctgcgccaacgccttcaacaacagcattatccccgaggacacattcttcccaagccccgagagcagcgactccaccgaccacgtgaagcccaaagagacagagaacaccaagcagcccagcaagagctgccacaagcccaaggccatcgtgcacaccgagaaagtgaacatgatgagcctgaccgtgctgggcctgcggatgctgttcgccaaaaccgtggccgtgaacttcctgctgaccgccaagctgttcttcctcctcaccgcc

SEQ ID NO: 6410 - DNA, 2598 bp, synthetic construct
  source 1..2598: mol_type = other DNA
atggccttaccagtgaccgccttgctcctgccgctggccttgctgctccacgccgccaggccggaagtgcagctggttgaatctggcggaggactggttcagcctggcggatctctgagactgtcttgtgccgccagcggcttcagcttcagcgacttttggatgagctgggtccgacaggcccctggcaaaggacttgaatgggtcgccacaatcagccaggccggcagcgagaaggactacgtggactctgtgaagggcagattcaccatcagccgggacaacgccaagaagtccctgtacctccagatgaacagcctgagagccgaggacaccgccgtgtactattgtgcctctggcgtgtacagcttcgactacagaggccagggcaccctggtcacagtctcttctggtaccggcggaggcggatctggcggcggaggtagcggtggcggaggatctgaattcgacattgtgatgacccagtctcacaaattcatgtccacatcagtaggagacagggtcagcgtcacctgcaaggccagtcagaatgtgggtaataatgtagcctggtatcaacagaaaccagggcaatctcctaaagtactgatttactcggcatcctaccggtacagtggagtccctgatcgcttcacaggcagtggatctgggacagatttcactctcaccatcagtaatgtgcagtctgaagacttggcagagtatttctgtcagcaatataacacctatccattcacgttcggctcggggacaaagttggaaataaaactcgaggacctgaagaacgtgttcccacctgaggtggccgtgttcgagcctagcgaggccgagatcagccacacccagaaagccaccctcgtgtgcctggctaccggcttctaccccgaccatgtggaactgtcttggtgggtcaacggcaaagaggtgcacagcggcgtgtgtaccgacccccagccactgaaagaacagcccgccctgaacgacagccggtactgcctgagcagcagactgagagtgtccgccaccttctggcagaacccccggaaccacttcagatgccaggtgcagttctacggcctgagcgagaacgacgagtggacccaggacagagccaagcccgtgacccagatcgtgtctgccgaagcctggggcagagccgatgatgtgattaagatccactggcaggaaaagaagtccaacaccatcctgggcagccaggaaggcaacaccatgaagaccaacgacacctacatgaagttcagctggctgaccgtgcccgagaagtccctggacaaagaacacagatgcatcgtgcggcacgaaaacaacaagaacggcgtggaccaggaaatcatcttcccacccatcaagaccgatgtgattacaatggaccccaaggacaactgctccaaggacgccaacgataccctgctgctccagctgaccaacaccagcgcctactacatgtacttgttgctgctgctgaagtccgtggtgtacttcgccatcatcacatgctgcctgctgatggctatggtcaagcggaaggacagccggggaagggccaagcgatctggatctggagcaacaaacttctcactactcaaacaagcaggtgacgtggaggagaatcccgggcctactagtatggactggatttggcgcatccttttccttgtcggcgctgctaccggcgcgcattccttcgaagaggtacagctggaggaaagcggtggaggactggtgcaacctggagggtctatgaagctctcttgcgtagcttctgggttcacgttctccaattactggatgaactgggtgcggcagtcccccgagaaaggcctggaatgggtagcagaaattcggttcaagtcccataactatgctacacactttgccgagtctgtcaaaggccggttcactattagtcgagacgacagcaagtcttcagtctacctgcagatgaataacttgcgggcagaggacacaggtatctactactgcaccaggagaatcggcaactccgactatgactggtggtactttgacgtctggggagcaggcaccagcgtgacggtgagttcagcctcaacgcgtatccagaaccctgatcctgccgtgtaccagctgcgggatagcaagagcagcgacaagagcgtgtgtctgttcaccgacttcgacagccagaccaacgtgtcccagagcaaggactccgacgtgtacatcaccgataagtgcgtgctggacatgcggagcatggacttcaagagcaactccgccgtggcctggtccaacaagtccgatttcgcctgcgccaacgccttcaacaacagcattatccccgaggacacattcttcccaagccccgagagcagcgactccaccgaccacgtgaagcccaaagagacagagaacaccaagcagcccagcaagagctgccacaagcccaaggccatcgtgcacaccgagaaagtgaacatgatgagcctgaccgtgctgggcctgcggatgctgttcgccaaaaccgtggccgtgaacttcctgctgaccgccaagctgttcttcctcctcaccgcc

SEQ ID NO: 6411 - DNA, 2577 bp, synthetic construct
  source 1..2577: mol_type = other DNA
atggccttaccagtgaccgccttgctcctgccgctggccttgctgctccacgccgccaggccggaagtgcagctggttgaatctggcggaggactggttcagcctggcggatctctgagactgtcttgtgccgccagcggcttcagcttcagcgacttttggatgagctgggtccgacaggcccctggcaaaggacttgaatgggtcgccacaatcagccaggccggcagcgagaaggactacgtggactctgtgaagggcagattcaccatcagccgggacaacgccaagaagtccctgtacctccagatgaacagcctgagagccgaggacaccgccgtgtactattgtgcctctggcgtgtacagcttcgactacagaggccagggcaccctggtcacagtctcttctggtaccggcggaggcggatctggcggcggaggtagcggtggcggaggatctgaattcgaccagatcgtgctgacccagtcccccgctattatgtccgcatcaccgggcgaaaaagtgacgatctcctgtagcgcttcatctagcgtctcctacatgtattggtatcaacagaaacctgggtctagcccaaagccgtggatctacagaaccagtaaccttgccagtggggtgccagcccgcttcagcggtagtggcagtggaacttcctatagcctcacaataagcaacatggaggctgaagatgccgctgcctattactgccagcagtaccacagttacccaaccacgttcggcgggggaactaagctcgaagtaaaactcgaggacctgaagaacgtgttcccacctgaggtggccgtgttcgagcctagcgaggccgagatcagccacacccagaaagccaccctcgtgtgcctggctaccggcttctaccccgaccatgtggaactgtcttggtgggtcaacggcaaagaggtgcacagcggcgtgtgtaccgacccccagccactgaaagaacagcccgccctgaacgacagccggtactgcctgagcagcagactgagagtgtccgccaccttctggcagaacccccggaaccacttcagatgccaggtgcagttctacggcctgagcgagaacgacgagtggacccaggacagagccaagcccgtgacccagatcgtgtctgccgaagcctggggcagagccgatgatgtgattaagatccactggcaggaaaagaagtccaacaccatcctgggcagccaggaaggcaacaccatgaagaccaacgacacctacatgaagttcagctggctgaccgtgcccgagaagtccctggacaaagaacacagatgcatcgtgcggcacgaaaacaacaagaacggcgtggaccaggaaatcatcttcccacccatcaagaccgatgtgattacaatggaccccaaggacaactgctccaaggacgccaacgataccctgctgctccagctgaccaacaccagcgcctactacatgtacttgttgctgctgctgaagtccgtggtgtacttcgccatcatcacatgctgcctgctgatggctatggtcaagcggaaggacagccggggaagggccaagcgatctggatctggagcaacaaacttctcactactcaaacaagcaggtgacgtggaggagaatcccgggcctactagtatggactggatttggcgcatccttttccttgtcggcgctgctaccggcgcgcattccttcgaagaggtgcagctggtggaatctgggggcggcctggtccaacctaagggatcactcaagctctcttgtgcggccagcggattctctttcaatacctatgctatgaattgggtgagacaggcgcccggaaagggcctcgaatggatagcccatatccggtcaaaatcaaacaatttcgcaacctactatgcggactccgtgaaggaccgattttccatctcccgagatgcctccgagaatattctgttcctgcagatgaataacctcaagacagaggacaccgccatgtactactgtgtgcgccagggcggtgactttcccatggattactgggggcaggggaccagcgtgaccgtgagctctacgcgtatccagaaccctgatcctgccgtgtaccagctgcgggatagcaagagcagcgacaagagcgtgtgtctgttcaccgacttcgacagccagaccaacgtgtcccagagcaaggactccgacgtgtacatcaccgataagtgcgtgctggacatgcggagcatggacttcaagagcaactccgccgtggcctggtccaacaagtccgatttcgcctgcgccaacgccttcaacaacagcattatccccgaggacacattcttcccaagccccgagagcagcgactccaccgaccacgtgaagcccaaagagacagagaacaccaagcagcccagcaagagctgccacaagcccaaggccatcgtgcacaccgagaaagtgaacatgatgagcctgaccgtgctgggcctgcggatgctgttcgccaaaaccgtggccgtgaacttcctgctgaccgccaagctgttcttcctcctcaccgcc

SEQ ID NO: 6412 - DNA, 2574 bp, synthetic construct
  source 1..2574: mol_type = other DNA
atggccttaccagtgaccgccttgctcctgccgctggccttgctgctccacgccgccaggccggaagtgcagctggttgaatctggcggaggactggttcagcctggcggatctctgagactgtcttgtgccgccagcggcttcagcttcagcgacttttggatgagctgggtccgacaggcccctggcaaaggacttgaatgggtcgccacaatcagccaggccggcagcgagaaggactacgtggactctgtgaagggcagattcaccatcagccgggacaacgccaagaagtccctgtacctccagatgaacagcctgagagccgaggacaccgccgtgtactattgtgcctctggcgtgtacagcttcgactacagaggccagggcaccctggtcacagtctcttctggtaccggcggaggcggatctggcggcggaggtagcggtggcggaggatctgaattcgacgacatccagatgacccagagcagcagcagcttcagcgtgagcctgggcgacagagtgaccatcacctgcatggccagcgaggacatctacatcagactggcctggtaccagcagaagcccggcaacgcccccagactgctgatcagcgccgccaccagcctggagaccggcgtgcccagcagattcagcggcagcggcagcggcaaggactacaccctgagcatcaccagcctgcagaccgaggacgtgggcacctactactgccagcagtactggagcagcccctggaccttcggcggcggcaccaagctggagatcaacctcgaggacctgaagaacgtgttcccacctgaggtggccgtgttcgagcctagcgaggccgagatcagccacacccagaaagccaccctcgtgtgcctggctaccggcttctaccccgaccatgtggaactgtcttggtgggtcaacggcaaagaggtgcacagcggcgtgtgtaccgacccccagccactgaaagaacagcccgccctgaacgacagccggtactgcctgagcagcagactgagagtgtccgccaccttctggcagaacccccggaaccacttcagatgccaggtgcagttctacggcctgagcgagaacgacgagtggacccaggacagagccaagcccgtgacccagatcgtgtctgccgaagcctggggcagagccgatgatgtgattaagatccactggcaggaaaagaagtccaacaccatcctgggcagccaggaaggcaacaccatgaagaccaacgacacctacatgaagttcagctggctgaccgtgcccgagaagtccctggacaaagaacacagatgcatcgtgcggcacgaaaacaacaagaacggcgtggaccaggaaatcatcttcccacccatcaagaccgatgtgattacaatggaccccaaggacaactgctccaaggacgccaacgataccctgctgctccagctgaccaacaccagcgcctactacatgtacttgttgctgctgctgaagtccgtggtgtacttcgccatcatcacatgctgcctgctgatggctatggtcaagcggaaggacagccggggaagggccaagcgatctggatctggagcaacaaacttctcactactcaaacaagcaggtgacgtggaggagaatcccgggcctactagtatggactggatttggcgcatccttttccttgtcggcgctgctaccggcgcgcattccttcgaagacgtgcagctgcaggagagcggccccggcctggtgaagcccagccagagcctgagcctgacctgcaccgtgaccggctacagcatcaccagcgactacacctggaactggatcagacagttccccggcaacaagctggagtggatgggctacatcacctacagcggcagcaccagctacaaccccagcctgaagagcagaaacagcatcaccagagacaccagcaagaaccagttcttcctgcagctgaacagcgtgaccaccgaggacaccgccacctactactgcgccagactgggcagaagatacacaatggactactggggccagggcaccagcgtgaccgtgagcagcacgcgtatccagaaccctgatcctgccgtgtaccagctgcgggatagcaagagcagcgacaagagcgtgtgtctgttcaccgacttcgacagccagaccaacgtgtcccagagcaaggactccgacgtgtacatcaccgataagtgcgtgctggacatgcggagcatggacttcaagagcaactccgccgtggcctggtccaacaagtccgatttcgcctgcgccaacgccttcaacaacagcattatccccgaggacacattcttcccaagccccgagagcagcgactccaccgaccacgtgaagcccaaagagacagagaacaccaagcagcccagcaagagctgccacaagcccaaggccatcgtgcacaccgagaaagtgaacatgatgagcctgaccgtgctgggcctgcggatgctgttcgccaaaaccgtggccgtgaacttcctgctgaccgccaagctgttcttcctcctcaccgcc

SEQ ID NO: 6413 - DNA, 2583 bp, synthetic construct
  source 1..2583: mol_type = other DNA
atggccttaccagtgaccgccttgctcctgccgctggccttgctgctccacgccgccaggccggaagtgcagctggttgaatctggcggaggactggttcagcctggcggatctctgagactgtcttgtgccgccagcggcttcagcttcagcgacttttggatgagctgggtccgacaggcccctggcaaaggacttgaatgggtcgccacaatcagccaggccggcagcgagaaggactacgtggactctgtgaagggcagattcaccatcagccgggacaacgccaagaagtccctgtacctccagatgaacagcctgagagccgaggacaccgccgtgtactattgtgcctctggcgtgtacagcttcgactacagaggccagggcaccctggtcacagtctcttctggtaccggcggaggcggatctggcggcggaggtagcggtggcggaggatctgaattcgacgacatccagatgacccagagccccagcagcctgtctgccagcgtgggcgacagagtgaccatcacctgtagagccagccagagcatcagcagctacctgaactggtatcagcagaagcccggcaaggcccccaaactgctgatctacgacgccagcaacctggaaaccggcgtgcccagcagattttccggcagcggctctggcaccgacttcaccttcaccatcagctccctccagcccgaggacattgccacctactactgccagcagtacgacaacctgcccctgacctttggcggaggcaccaaggtggacatcaagagactcgaggacctgaagaacgtgttcccacctgaggtggccgtgttcgagcctagcgaggccgagatcagccacacccagaaagccaccctcgtgtgcctggctaccggcttctaccccgaccatgtggaactgtcttggtgggtcaacggcaaagaggtgcacagcggcgtgtgtaccgacccccagccactgaaagaacagcccgccctgaacgacagccggtactgcctgagcagcagactgagagtgtccgccaccttctggcagaacccccggaaccacttcagatgccaggtgcagttctacggcctgagcgagaacgacgagtggacccaggacagagccaagcccgtgacccagatcgtgtctgccgaagcctggggcagagccgatgatgtgattaagatccactggcaggaaaagaagtccaacaccatcctgggcagccaggaaggcaacaccatgaagaccaacgacacctacatgaagttcagctggctgaccgtgcccgagaagtccctggacaaagaacacagatgcatcgtgcggcacgaaaacaacaagaacggcgtggaccaggaaatcatcttcccacccatcaagaccgatgtgattacaatggaccccaaggacaactgctccaaggacgccaacgataccctgctgctccagctgaccaacaccagcgcctactacatgtacttgttgctgctgctgaagtccgtggtgtacttcgccatcatcacatgctgcctgctgatggctatggtcaagcggaaggacagccggggaagggccaagcgatctggatctggagcaacaaacttctcactactcaaacaagcaggtgacgtggaggagaatcccgggcctactagtatggactggatttggcgcatccttttccttgtcggcgctgctaccggcgcgcattccttcgaacaggtgcaactggtggaatctggcggcggagtggtgcagcctggcagaagcctgagactgagctgtgccgccagcggcttcacctttagcagctacgccatgcactgggtgcgccaggcccctggaaaaggcctggaatgggtggccgtgatctcctacgacggctccaacaagtattacgccgacagcgtgaagggccggttcaccatctccagagacaacagcaagaacaccctgtacctccagatgaacagcctgcgggccgaggacaccgccgtgtactattgtgccagggctcacaacagcagctcttggagcttcgactactggggccagggcaccctcgtgaccgtgtcatctacgcgtatccagaaccctgatcctgccgtgtaccagctgcgggatagcaagagcagcgacaagagcgtgtgtctgttcaccgacttcgacagccagaccaacgtgtcccagagcaaggactccgacgtgtacatcaccgataagtgcgtgctggacatgcggagcatggacttcaagagcaactccgccgtggcctggtccaacaagtccgatttcgcctgcgccaacgccttcaacaacagcattatccccgaggacacattcttcccaagccccgagagcagcgactccaccgaccacgtgaagcccaaagagacagagaacaccaagcagcccagcaagagctgccacaagcccaaggccatcgtgcacaccgagaaagtgaacatgatgagcctgaccgtgctgggcctgcggatgctgttcgccaaaaccgtggccgtgaacttcctgctgaccgccaagctgttcttcctcctcaccgcc

SEQ ID NO: 6414 - DNA, 2610 bp, synthetic construct
  source 1..2610: mol_type = other DNA
atggccttaccagtgaccgccttgctcctgccgctggccttgctgctccacgccgccaggccggaagtgcagctggttgaatctggcggaggactggttcagcctggcggatctctgagactgtcttgtgccgccagcggcttcagcttcagcgacttttggatgagctgggtccgacaggcccctggcaaaggacttgaatgggtcgccacaatcagccaggccggcagcgagaaggactacgtggactctgtgaagggcagattcaccatcagccgggacaacgccaagaagtccctgtacctccagatgaacagcctgagagccgaggacaccgccgtgtactattgtgcctctggcgtgtacagcttcgactacagaggccagggcaccctggtcacagtctcttctggtaccggcggaggcggatctggcggcggaggtagcggtggcggaggatctgaattcgacgacgtcgtgatgacccagagccctctgagcctgcctgtgtccctgggcgatcaggccagcatctcctgcagatccagccagagactggtgcacagcaacggcaacacctacctgcactggtatctgcagaagcccggccagagccccaagctgctgatctaccgggtgtccaacagattccccggcgtgcccgatagattcagcggctctggcagcggcaccgacttcaccctgaagatcagccgggtggaagccgaggacctgggcatctatttctgcagccagagcacccacgtgccctacacctttggcggaggcaccaagctggaaatcaagcggctcgaggacctgaagaacgtgttcccacctgaggtggccgtgttcgagcctagcgaggccgagatcagccacacccagaaagccaccctcgtgtgcctggctaccggcttctaccccgaccatgtggaactgtcttggtgggtcaacggcaaagaggtgcacagcggcgtgtgtaccgacccccagccactgaaagaacagcccgccctgaacgacagccggtactgcctgagcagcagactgagagtgtccgccaccttctggcagaacccccggaaccacttcagatgccaggtgcagttctacggcctgagcgagaacgacgagtggacccaggacagagccaagcccgtgacccagatcgtgtctgccgaagcctggggcagagccgatgatgtgattaagatccactggcaggaaaagaagtccaacaccatcctgggcagccaggaaggcaacaccatgaagaccaacgacacctacatgaagttcagctggctgaccgtgcccgagaagtccctggacaaagaacacagatgcatcgtgcggcacgaaaacaacaagaacggcgtggaccaggaaatcatcttcccacccatcaagaccgatgtgattacaatggaccccaaggacaactgctccaaggacgccaacgataccctgctgctccagctgaccaacaccagcgcctactacatgtacttgttgctgctgctgaagtccgtggtgtacttcgccatcatcacatgctgcctgctgatggctatggtcaagcggaaggacagccggggaagggccaagcgatctggatctggagcaacaaacttctcactactcaaacaagcaggtgacgtggaggagaatcccgggcctactagtatggactggatttggcgcatccttttccttgtcggcgctgctaccggcgcgcattccttcgaagaagtgcggctgcagcagtctggccccgacctgattaagcctggggccagcgtgaagatgagctgcaaggccagcggctacaccttcaccggctacgtgatgcactgggtcaagcagaggccaggccagggcctggaatggatcggcttcatcaacccctacaacgacgacatccagagcaacgagcggttccggggcaaggccaccctgaccagcgataagagcagcaccaccgcctacatggaactgagcagcctgacctccgaggacagcgccgtgtactactgtgctaggggagccggctacaacttcgacggggcctacagattcttcgacttttggggccagggcaccacactgaccgtgtcctctacgcgtatccagaaccctgatcctgccgtgtaccagctgcgggatagcaagagcagcgacaagagcgtgtgtctgttcaccgacttcgacagccagaccaacgtgtcccagagcaaggactccgacgtgtacatcaccgataagtgcgtgctggacatgcggagcatggacttcaagagcaactccgccgtggcctggtccaacaagtccgatttcgcctgcgccaacgccttcaacaacagcattatccccgaggacacattcttcccaagccccgagagcagcgactccaccgaccacgtgaagcccaaagagacagagaacaccaagcagcccagcaagagctgccacaagcccaaggccatcgtgcacaccgagaaagtgaacatgatgagcctgaccgtgctgggcctgcggatgctgttcgccaaaaccgtggccgtgaacttcctgctgaccgccaagctgttcttcctcctcaccgcc

SEQ ID NO: 6415 - DNA, 2583 bp, synthetic construct
  source 1..2583: mol_type = other DNA
atggccttaccagtgaccgccttgctcctgccgctggccttgctgctccacgccgccaggccggaagtgcagctggttgaatctggcggaggactggttcagcctggcggatctctgagactgtcttgtgccgccagcggcttcagcttcagcgacttttggatgagctgggtccgacaggcccctggcaaaggacttgaatgggtcgccacaatcagccaggccggcagcgagaaggactacgtggactctgtgaagggcagattcaccatcagccgggacaacgccaagaagtccctgtacctccagatgaacagcctgagagccgaggacaccgccgtgtactattgtgcctctggcgtgtacagcttcgactacagaggccagggcaccctggtcacagtctcttctggtaccggcggaggcggatctggcggcggaggtagcggtggcggaggatctgaattcgacagctacgagctgacccagcctcctagcgtgtccgtgtctcctggacagaccgccaccatctcttgcagcggcgatcaactgggcgggaagtacggccactggtatcagaagaagcccggccagagccccgtgctggtgctgtaccaggacagaaaacggcctgccggcatccccgagagattcagcggaagcagcagcggcaacaccatcaccctgaccatcagcggcacccaggccgtggatgaggccgactactactgccaggcttgggacaccaatctgggcggcgtgttcggcggaggcaccaaagtgacagtgctgggacagctcgaggacctgaagaacgtgttcccacctgaggtggccgtgttcgagcctagcgaggccgagatcagccacacccagaaagccaccctcgtgtgcctggctaccggcttctaccccgaccatgtggaactgtcttggtgggtcaacggcaaagaggtgcacagcggcgtgtgtaccgacccccagccactgaaagaacagcccgccctgaacgacagccggtactgcctgagcagcagactgagagtgtccgccaccttctggcagaacccccggaaccacttcagatgccaggtgcagttctacggcctgagcgagaacgacgagtggacccaggacagagccaagcccgtgacccagatcgtgtctgccgaagcctggggcagagccgatgatgtgattaagatccactggcaggaaaagaagtccaacaccatcctgggcagccaggaaggcaacaccatgaagaccaacgacacctacatgaagttcagctggctgaccgtgcccgagaagtccctggacaaagaacacagatgcatcgtgcggcacgaaaacaacaagaacggcgtggaccaggaaatcatcttcccacccatcaagaccgatgtgattacaatggaccccaaggacaactgctccaaggacgccaacgataccctgctgctccagctgaccaacaccagcgcctactacatgtacttgttgctgctgctgaagtccgtggtgtacttcgccatcatcacatgctgcctgctgatggctatggtcaagcggaaggacagccggggaagggccaagcgatctggatctggagcaacaaacttctcactactcaaacaagcaggtgacgtggaggagaatcccgggcctactagtatggactggatttggcgcatccttttccttgtcggcgctgctaccggcgcgcattccttcgaacaggtgcaactggtggaaagcggagccgaagtgaagaaacctggggccagcgtgaaggtgtcctgcaaggccagcggctacacctttaccggctactacatgcactgggtgcgccaggctccaggccagggactggaatggatgggccggatcaaccccaatagcggcggcaccaactacgcccagaaattccagggcagagtgaccatgaccagagacaccagcatcagcaccgcctacatggaactgagccggctgagaagcgacgacaccgccgtgtactactgcgccagccctagaggcagaggcagcgccttcgatatttggggccagggcacactcgtgaccgtgtcctctacgcgtatccagaaccctgatcctgccgtgtaccagctgcgggatagcaagagcagcgacaagagcgtgtgtctgttcaccgacttcgacagccagaccaacgtgtcccagagcaaggactccgacgtgtacatcaccgataagtgcgtgctggacatgcggagcatggacttcaagagcaactccgccgtggcctggtccaacaagtccgatttcgcctgcgccaacgccttcaacaacagcattatccccgaggacacattcttcccaagccccgagagcagcgactccaccgaccacgtgaagcccaaagagacagagaacaccaagcagcccagcaagagctgccacaagcccaaggccatcgtgcacaccgagaaagtgaacatgatgagcctgaccgtgctgggcctgcggatgctgttcgccaaaaccgtggccgtgaacttcctgctgaccgccaagctgttcttcctcctcaccgcc

SEQ ID NO: 6416 - DNA, 2592 bp, synthetic construct
  source 1..2592: mol_type = other DNA
atggccttaccagtgaccgccttgctcctgccgctggccttgctgctccacgccgccaggccggaagtgcagctggttgaatctggcggaggactggttcagcctggcggatctctgagactgtcttgtgccgccagcggcttcagcttcagcgacttttggatgagctgggtccgacaggcccctggcaaaggacttgaatgggtcgccacaatcagccaggccggcagcgagaaggactacgtggactctgtgaagggcagattcaccatcagccgggacaacgccaagaagtccctgtacctccagatgaacagcctgagagccgaggacaccgccgtgtactattgtgcctctggcgtgtacagcttcgactacagaggccagggcaccctggtcacagtctcttctggtaccggcggaggcggatctggcggcggaggtagcggtggcggaggatctgaattcgacaacttcatgctgacccagccccacagcgtgtccgagagccctggcaagaccgtgaccatctcctgcaccagaagcagcggctctatcgccagcaaatacgtgcagtggtatcagcagaggcccggcagcagccctaccaccgtgatctacgaggacaaccagaggcctagcggcgtgcccgatagattcagcggcagcatcgacaccagcagcaacagcgccagcctgaccatcagcggcctgagaacagaggacgaggccgactactactgccacagctacgacagcaacaaccactccgtgttcggcggaggcaccaaagtgacagtgctgggacagctcgaggacctgaagaacgtgttcccacctgaggtggccgtgttcgagcctagcgaggccgagatcagccacacccagaaagccaccctcgtgtgcctggctaccggcttctaccccgaccatgtggaactgtcttggtgggtcaacggcaaagaggtgcacagcggcgtgtgtaccgacccccagccactgaaagaacagcccgccctgaacgacagccggtactgcctgagcagcagactgagagtgtccgccaccttctggcagaacccccggaaccacttcagatgccaggtgcagttctacggcctgagcgagaacgacgagtggacccaggacagagccaagcccgtgacccagatcgtgtctgccgaagcctggggcagagccgatgatgtgattaagatccactggcaggaaaagaagtccaacaccatcctgggcagccaggaaggcaacaccatgaagaccaacgacacctacatgaagttcagctggctgaccgtgcccgagaagtccctggacaaagaacacagatgcatcgtgcggcacgaaaacaacaagaacggcgtggaccaggaaatcatcttcccacccatcaagaccgatgtgattacaatggaccccaaggacaactgctccaaggacgccaacgataccctgctgctccagctgaccaacaccagcgcctactacatgtacttgttgctgctgctgaagtccgtggtgtacttcgccatcatcacatgctgcctgctgatggctatggtcaagcggaaggacagccggggaagggccaagcgatctggatctggagcaacaaacttctcactactcaaacaagcaggtgacgtggaggagaatcccgggcctactagtatggactggatttggcgcatccttttccttgtcggcgctgctaccggcgcgcattccttcgaagaagtgcaactggtggaaagcgggggaggcgtggtgcagccaggcggatctctgagactgagctgtgccgccagcggcttcaccttcagcagctacgccatgagctgggtgcgccaggcccctggaaaaggcctggaatgggtgtccgccatctctggctctggcggcagcacctactacgccgatagcgtgaagggccggttcagcatcagccgggacaacagcaagaacaccctgtacctccagatgaacagcctgcgggccgaggacaccgccgtgtactactgtgccagaaccagaagctccggggccttcgacatctggggccagggaacactcgtgaccgtgtcctctacgcgtatccagaaccctgatcctgccgtgtaccagctgcgggatagcaagagcagcgacaagagcgtgtgtctgttcaccgacttcgacagccagaccaacgtgtcccagagcaaggactccgacgtgtacatcaccgataagtgcgtgctggacatgcggagcatggacttcaagagcaactccgccgtggcctggtccaacaagtccgatttcgcctgcgccaacgccttcaacaacagcattatccccgaggacacattcttcccaagccccgagagcagcgactccaccgaccacgtgaagcccaaagagacagagaacaccaagcagcccagcaagagctgccacaagcccaaggccatcgtgcacaccgagaaagtgaacatgatgagcctgaccgtgctgggcctgcggatgctgttcgccaaaaccgtggccgtgaacttcctgctgaccgccaagctgttcttcctcctcaccgcc

SEQ ID NO: 6417 - DNA, 2577 bp, synthetic construct
  source 1..2577: mol_type = other DNA
atggccttaccagtgaccgccttgctcctgccgctggccttgctgctccacgccgccaggccggaagtgcagctggttgaatctggcggaggactggttcagcctggcggatctctgagactgtcttgtgccgccagcggcttcagcttcagcgacttttggatgagctgggtccgacaggcccctggcaaaggacttgaatgggtcgccacaatcagccaggccggcagcgagaaggactacgtggactctgtgaagggcagattcaccatcagccgggacaacgccaagaagtccctgtacctccagatgaacagcctgagagccgaggacaccgccgtgtactattgtgcctctggcgtgtacagcttcgactacagaggccagggcaccctggtcacagtctcttctggtaccggcggaggcggatctggcggcggaggtagcggtggcggaggatctgaattcgacatccagatgaaccagagccccagcagcctgagcgccagcctgggcgataccatcaccatcacctgtcacgccagccagaacatcaacgtgtggctgagctggtatcagcagaagcccggcaacatccccaagctgctgatctacaaggccagcaacctgcacaccggcgtgcccagcagattttctggcagcggctctggcaccggcttcaccattaccatcagctccctccagcccgaggacattgccacctactactgccagcagggccagagctacccctggacatttggcggaggcaccaagctggaaatcaagagactcgaggacctgaagaacgtgttcccacctgaggtggccgtgttcgagcctagcgaggccgagatcagccacacccagaaagccaccctcgtgtgcctggctaccggcttctaccccgaccatgtggaactgtcttggtgggtcaacggcaaagaggtgcacagcggcgtgtgtaccgacccccagccactgaaagaacagcccgccctgaacgacagccggtactgcctgagcagcagactgagagtgtccgccaccttctggcagaacccccggaaccacttcagatgccaggtgcagttctacggcctgagcgagaacgacgagtggacccaggacagagccaagcccgtgacccagatcgtgtctgccgaagcctggggcagagccgatgatgtgattaagatccactggcaggaaaagaagtccaacaccatcctgggcagccaggaaggcaacaccatgaagaccaacgacacctacatgaagttcagctggctgaccgtgcccgagaagtccctggacaaagaacacagatgcatcgtgcggcacgaaaacaacaagaacggcgtggaccaggaaatcatcttcccacccatcaagaccgatgtgattacaatggaccccaaggacaactgctccaaggacgccaacgataccctgctgctccagctgaccaacaccagcgcctactacatgtacttgttgctgctgctgaagtccgtggtgtacttcgccatcatcacatgctgcctgctgatggctatggtcaagcggaaggacagccggggaagggccaagcgatctggatctggagcaacaaacttctcactactcaaacaagcaggtgacgtggaggagaatcccgggcctactagtatggactggatttggcgcatccttttccttgtcggcgctgctaccggcgcgcattccttcgaagaagtgcaactccagcagagcggcccagagcttgtgaagcctggcgcttccgtgaagattagctgcaaagccagcggctacagcttcaccggctacttcatgaactgggtcaagcagagccacggcaagagcctggagtacatcggcagattcaacccctacaacggcgagacactgtacaaccagaagttcaagggcaaggccaccctgaccgtggacaagagcagcagcaccgtgcacatggaactgctgagcgtgaccagcgaggacagcgccgtgtactactgtggcagaagcggcaacgacgacgctatggactattggggccagggcaccagcgtgaccgtgtctagtgctacgcgtatccagaaccctgatcctgccgtgtaccagctgcgggatagcaagagcagcgacaagagcgtgtgtctgttcaccgacttcgacagccagaccaacgtgtcccagagcaaggactccgacgtgtacatcaccgataagtgcgtgctggacatgcggagcatggacttcaagagcaactccgccgtggcctggtccaacaagtccgatttcgcctgcgccaacgccttcaacaacagcattatccccgaggacacattcttcccaagccccgagagcagcgactccaccgaccacgtgaagcccaaagagacagagaacaccaagcagcccagcaagagctgccacaagcccaaggccatcgtgcacaccgagaaagtgaacatgatgagcctgaccgtgctgggcctgcggatgctgttcgccaaaaccgtggccgtgaacttcctgctgaccgccaagctgttcttcctcctcaccgcc

SEQ ID NO: 6418 - DNA, 2580 bp, synthetic construct
  source 1..2580: mol_type = other DNA
atggccttaccagtgaccgccttgctcctgccgctggccttgctgctccacgccgccaggccggaagtgcagctggttgaatctggcggaggactggttcagcctggcggatctctgagactgtcttgtgccgccagcggcttcagcttcagcgacttttggatgagctgggtccgacaggcccctggcaaaggacttgaatgggtcgccacaatcagccaggccggcagcgagaaggactacgtggactctgtgaagggcagattcaccatcagccgggacaacgccaagaagtccctgtacctccagatgaacagcctgagagccgaggacaccgccgtgtactattgtgcctctggcgtgtacagcttcgactacagaggccagggcaccctggtcacagtctcttctggtaccggcggaggcggatctggcggcggaggtagcggtggcggaggatctgaattcgagatcgtgctgacacagagccctgccaccctgtctctgagccctggcgaaagagccaccctgagctgtagagccagccagagcgtgcggagctacctggcctggtatcagcagaagcctggacaggcccccagactgctgatctacgacgccagcaatcgggccacaggcatccccgccagattttctggctctggcagcggcaccgacttcaccctgacaatcagcagcctggaacccgaggacttcgccgtgtactactgccagcagcggagcaactggccccctacctttggacagggcaccaaggtggaaatcaagctcgaggacctgaagaacgtgttcccacctgaggtggccgtgttcgagcctagcgaggccgagatcagccacacccagaaagccaccctcgtgtgcctggctaccggcttctaccccgaccatgtggaactgtcttggtgggtcaacggcaaagaggtgcacagcggcgtgtgtaccgacccccagccactgaaagaacagcccgccctgaacgacagccggtactgcctgagcagcagactgagagtgtccgccaccttctggcagaacccccggaaccacttcagatgccaggtgcagttctacggcctgagcgagaacgacgagtggacccaggacagagccaagcccgtgacccagatcgtgtctgccgaagcctggggcagagccgatgatgtgattaagatccactggcaggaaaagaagtccaacaccatcctgggcagccaggaaggcaacaccatgaagaccaacgacacctacatgaagttcagctggctgaccgtgcccgagaagtccctggacaaagaacacagatgcatcgtgcggcacgaaaacaacaagaacggcgtggaccaggaaatcatcttcccacccatcaagaccgatgtgattacaatggaccccaaggacaactgctccaaggacgccaacgataccctgctgctccagctgaccaacaccagcgcctactacatgtacttgttgctgctgctgaagtccgtggtgtacttcgccatcatcacatgctgcctgctgatggctatggtcaagcggaaggacagccggggaagggccaagcgatctggatctggagcaacaaacttctcactactcaaacaagcaggtgacgtggaggagaatcccgggcctactagtatggactggatttggcgcatccttttccttgtcggcgctgctaccggcgcgcattccttcgaacaactccaggtgcaggaatctggccccggactcgtgaagcccagcgagacactgagcctgacctgtaccgtgtccggcggcagcatcagcaacagctacttctcctggggctggatcagacagccccctggcaagggcctggaatggatcggcagcttctactacggcgagaaaacctactacaaccccagcctgaagtccagagccaccatcagcatcgacaccagcaagagccagttctccctgaagctgagcagcgtgacagccgccgacaccgccgtgtattattgccccagaggccccaccatgatccggggcgtgatcgactcttggggccagggaacactcgtgaccgtgtcctctacgcgtatccagaaccctgatcctgccgtgtaccagctgcgggatagcaagagcagcgacaagagcgtgtgtctgttcaccgacttcgacagccagaccaacgtgtcccagagcaaggactccgacgtgtacatcaccgataagtgcgtgctggacatgcggagcatggacttcaagagcaactccgccgtggcctggtccaacaagtccgatttcgcctgcgccaacgccttcaacaacagcattatccccgaggacacattcttcccaagccccgagagcagcgactccaccgaccacgtgaagcccaaagagacagagaacaccaagcagcccagcaagagctgccacaagcccaaggccatcgtgcacaccgagaaagtgaacatgatgagcctgaccgtgctgggcctgcggatgctgttcgccaaaaccgtggccgtgaacttcctgctgaccgccaagctgttcttcctcctcaccgcc

SEQ ID NO: 6419 - DNA, 2607 bp, synthetic construct
  source 1..2607: mol_type = other DNA
atggccttaccagtgaccgccttgctcctgccgctggccttgctgctccacgccgccaggccggaagtgcagctggttgaatctggcggaggactggttcagcctggcggatctctgagactgtcttgtgccgccagcggcttcagcttcagcgacttttggatgagctgggtccgacaggcccctggcaaaggacttgaatgggtcgccacaatcagccaggccggcagcgagaaggactacgtggactctgtgaagggcagattcaccatcagccgggacaacgccaagaagtccctgtacctccagatgaacagcctgagagccgaggacaccgccgtgtactattgtgcctctggcgtgtacagcttcgactacagaggccagggcaccctggtcacagtctcttctggtaccggcggaggcggatctggcggcggaggtagcggtggcggaggatctgaattcgacatcgtgatgacccagacccccctgagcctgcctgtgacacctggcgagcctgccagcatctcctgcagaagcagcagaagcctgctggacagcgacgacggcaacacctacctggactggtatctgcagaaacccggccagagcccccaactgctgatctacaccctgagctacagagccagcggcgtgcccgatagattttccggctctggcagcggcaccgacttcaccctgaagatcagccgggtggaagccgaggacgtgggcgtgtactactgtatgcagcgggtggaatttcccatcaccttcggccagggcaccagactggaaatcaagagactcgaggacctgaagaacgtgttcccacctgaggtggccgtgttcgagcctagcgaggccgagatcagccacacccagaaagccaccctcgtgtgcctggctaccggcttctaccccgaccatgtggaactgtcttggtgggtcaacggcaaagaggtgcacagcggcgtgtgtaccgacccccagccactgaaagaacagcccgccctgaacgacagccggtactgcctgagcagcagactgagagtgtccgccaccttctggcagaacccccggaaccacttcagatgccaggtgcagttctacggcctgagcgagaacgacgagtggacccaggacagagccaagcccgtgacccagatcgtgtctgccgaagcctggggcagagccgatgatgtgattaagatccactggcaggaaaagaagtccaacaccatcctgggcagccaggaaggcaacaccatgaagaccaacgacacctacatgaagttcagctggctgaccgtgcccgagaagtccctggacaaagaacacagatgcatcgtgcggcacgaaaacaacaagaacggcgtggaccaggaaatcatcttcccacccatcaagaccgatgtgattacaatggaccccaaggacaactgctccaaggacgccaacgataccctgctgctccagctgaccaacaccagcgcctactacatgtacttgttgctgctgctgaagtccgtggtgtacttcgccatcatcacatgctgcctgctgatggctatggtcaagcggaaggacagccggggaagggccaagcgatctggatctggagcaacaaacttctcactactcaaacaagcaggtgacgtggaggagaatcccgggcctactagtatggactggatttggcgcatccttttccttgtcggcgctgctaccggcgcgcattccttcgaacaggtgcaactggtggaatctggcgggggagtggtgcagcctggcagatccctgagactgagctgtgccgccagcggcttcatcttcagcagatacggaatgcactgggtgcgccaggcccctggcaagggactgaaatgggtggccgtgatttggtacgacggcagcaacaagctgtacgccgacagcgtgaagggccggttcaccatcagcagagacaacagcaagaacaccctgtacctgcagatgaacagcctgcgggccgaggacaccgccgtgtactattgcgccagagactactacgacaacagccggcaccactggggcttcgactattggggccagggaacccttgtgaccgtgtcctctacgcgtatccagaaccctgatcctgccgtgtaccagctgcgggatagcaagagcagcgacaagagcgtgtgtctgttcaccgacttcgacagccagaccaacgtgtcccagagcaaggactccgacgtgtacatcaccgataagtgcgtgctggacatgcggagcatggacttcaagagcaactccgccgtggcctggtccaacaagtccgatttcgcctgcgccaacgccttcaacaacagcattatccccgaggacacattcttcccaagccccgagagcagcgactccaccgaccacgtgaagcccaaagagacagagaacaccaagcagcccagcaagagctgccacaagcccaaggccatcgtgcacaccgagaaagtgaacatgatgagcctgaccgtgctgggcctgcggatgctgttcgccaaaaccgtggccgtgaacttcctgctgaccgccaagctgttcttcctcctcaccgcc

SEQ ID NO: 6420 - DNA, 2577 bp, synthetic construct
  source 1..2577: mol_type = other DNA
atggccttaccagtgaccgccttgctcctgccgctggccttgctgctccacgccgccaggccggaagtgcagctggttgaatctggcggaggactggttcagcctggcggatctctgagactgtcttgtgccgccagcggcttcagcttcagcgacttttggatgagctgggtccgacaggcccctggcaaaggacttgaatgggtcgccacaatcagccaggccggcagcgagaaggactacgtggactctgtgaagggcagattcaccatcagccgggacaacgccaagaagtccctgtacctccagatgaacagcctgagagccgaggacaccgccgtgtactattgtgcctctggcgtgtacagcttcgactacagaggccagggcaccctggtcacagtctcttctggtaccggcggaggcggatctggcggcggaggtagcggtggcggaggatctgaattcgagatccagatgacccagagccccagcagcatgtctgccagcctgggcgacaccatcaccatcacatgccaggccacccaggacatcttcaagaacctgaactggtatcagcagaagcccggcaagccccccagcctgctgatctactatgccaccgaactggccgagggcgtgcccagcagattttctggcagcggcagcggctccgactacagcctgaccatcagcaacctggaaagcgaggacttcgccgcctactactgcctccagttcttcgagttcccattcaccttcggctccggcaccaagctggaaatgaagctcgaggacctgaagaacgtgttcccacctgaggtggccgtgttcgagcctagcgaggccgagatcagccacacccagaaagccaccctcgtgtgcctggctaccggcttctaccccgaccatgtggaactgtcttggtgggtcaacggcaaagaggtgcacagcggcgtgtgtaccgacccccagccactgaaagaacagcccgccctgaacgacagccggtactgcctgagcagcagactgagagtgtccgccaccttctggcagaacccccggaaccacttcagatgccaggtgcagttctacggcctgagcgagaacgacgagtggacccaggacagagccaagcccgtgacccagatcgtgtctgccgaagcctggggcagagccgatgatgtgattaagatccactggcaggaaaagaagtccaacaccatcctgggcagccaggaaggcaacaccatgaagaccaacgacacctacatgaagttcagctggctgaccgtgcccgagaagtccctggacaaagaacacagatgcatcgtgcggcacgaaaacaacaagaacggcgtggaccaggaaatcatcttcccacccatcaagaccgatgtgattacaatggaccccaaggacaactgctccaaggacgccaacgataccctgctgctccagctgaccaacaccagcgcctactacatgtacttgttgctgctgctgaagtccgtggtgtacttcgccatcatcacatgctgcctgctgatggctatggtcaagcggaaggacagccggggaagggccaagcgatctggatctggagcaacaaacttctcactactcaaacaagcaggtgacgtggaggagaatcccgggcctactagtatggactggatttggcgcatccttttccttgtcggcgctgctaccggcgcgcattccttcgaacaggtgcaactccagcagtctggcgctgagcttgtgcggcctggcacctctgtgaaggtgtcctgtaaagccagcggctacgtgttcaccaactactggatcgagtggatcaagcagcggccaggccagggcctggaatggatcggcgtgatgaatccaggcagcggcgagacaacctacaacgagaagttcaagggcaaggccaccctgaccgccgacaagagcagcagcacagcctacatgcaactgtcctccctgaccagcgtggacagcgccgtgtacttctgcgccagggaccacgaccgggactactacgctatggactactggggccagggcaccagcgtgaccgtgtcatctacgcgtatccagaaccctgatcctgccgtgtaccagctgcgggatagcaagagcagcgacaagagcgtgtgtctgttcaccgacttcgacagccagaccaacgtgtcccagagcaaggactccgacgtgtacatcaccgataagtgcgtgctggacatgcggagcatggacttcaagagcaactccgccgtggcctggtccaacaagtccgatttcgcctgcgccaacgccttcaacaacagcattatccccgaggacacattcttcccaagccccgagagcagcgactccaccgaccacgtgaagcccaaagagacagagaacaccaagcagcccagcaagagctgccacaagcccaaggccatcgtgcacaccgagaaagtgaacatgatgagcctgaccgtgctgggcctgcggatgctgttcgccaaaaccgtggccgtgaacttcctgctgaccgccaagctgttcttcctcctcaccgcc

SEQ ID NO: 6421 - DNA, 2568 bp, synthetic construct
  source 1..2568: mol_type = other DNA
atggccttaccagtgaccgccttgctcctgccgctggccttgctgctccacgccgccaggccggaagtgcagctggttgaatctggcggaggactggttcagcctggcggatctctgagactgtcttgtgccgccagcggcttcagcttcagcgacttttggatgagctgggtccgacaggcccctggcaaaggacttgaatgggtcgccacaatcagccaggccggcagcgagaaggactacgtggactctgtgaagggcagattcaccatcagccgggacaacgccaagaagtccctgtacctccagatgaacagcctgagagccgaggacaccgccgtgtactattgtgcctctggcgtgtacagcttcgactacagaggccagggcaccctggtcacagtctcttctggtaccggcggaggcggatctggcggcggaggtagcggtggcggaggatctgaattcgacatcctgctgacacagagccccgccatcctgtccgtgtctccaggcgagagagtgtcctttagctgccgggccagccagaacatcggcaccagcatccactggtatcagcagcggaccaacggcagccccagactgctgattaagtacgccagcgagtccgtgtccggcatccccagcagattttctggcagcggctccggcaccgacttcaccctgagcatcaacagcgtggaaagcgaggacattgccgactactactgccagcacaccaatagctggcccaccacctttggcggaggcaccaagctggaaatcaagagactcgaggacctgaagaacgtgttcccacctgaggtggccgtgttcgagcctagcgaggccgagatcagccacacccagaaagccaccctcgtgtgcctggctaccggcttctaccccgaccatgtggaactgtcttggtgggtcaacggcaaagaggtgcacagcggcgtgtgtaccgacccccagccactgaaagaacagcccgccctgaacgacagccggtactgcctgagcagcagactgagagtgtccgccaccttctggcagaacccccggaaccacttcagatgccaggtgcagttctacggcctgagcgagaacgacgagtggacccaggacagagccaagcccgtgacccagatcgtgtctgccgaagcctggggcagagccgatgatgtgattaagatccactggcaggaaaagaagtccaacaccatcctgggcagccaggaaggcaacaccatgaagaccaacgacacctacatgaagttcagctggctgaccgtgcccgagaagtccctggacaaagaacacagatgcatcgtgcggcacgaaaacaacaagaacggcgtggaccaggaaatcatcttcccacccatcaagaccgatgtgattacaatggaccccaaggacaactgctccaaggacgccaacgataccctgctgctccagctgaccaacaccagcgcctactacatgtacttgttgctgctgctgaagtccgtggtgtacttcgccatcatcacatgctgcctgctgatggctatggtcaagcggaaggacagccggggaagggccaagcgatctggatctggagcaacaaacttctcactactcaaacaagcaggtgacgtggaggagaatcccgggcctactagtatggactggatttggcgcatccttttccttgtcggcgctgctaccggcgcgcattccttcgaacaggtgcaactccagcagtccgacgccgagcttgtgaagcctggcgcttccgtgaagattagctgcaaggccagcggctacaccttcaccgaccacgccattcactgggtcaagcagaagcccgagcagggcctggaatggatcggctacttcagccccggcaacggcgacatcaagtacaacgagaagttcaagggcaaggccaccctgaccgccgacaagagcagcagcacagcctacatgcaactgaacagcctgaccagcgaggactccgccgtgtacttctgcaagcggagctacggcaactacgactactggggccagggcaccacactgaccgtgtctagtacgcgtatccagaaccctgatcctgccgtgtaccagctgcgggatagcaagagcagcgacaagagcgtgtgtctgttcaccgacttcgacagccagaccaacgtgtcccagagcaaggactccgacgtgtacatcaccgataagtgcgtgctggacatgcggagcatggacttcaagagcaactccgccgtggcctggtccaacaagtccgatttcgcctgcgccaacgccttcaacaacagcattatccccgaggacacattcttcccaagccccgagagcagcgactccaccgaccacgtgaagcccaaagagacagagaacaccaagcagcccagcaagagctgccacaagcccaaggccatcgtgcacaccgagaaagtgaacatgatgagcctgaccgtgctgggcctgcggatgctgttcgccaaaaccgtggccgtgaacttcctgctgaccgccaagctgttcttcctcctcaccgcc

SEQ ID NO: 6422 - DNA, 2583 bp, synthetic construct
  source 1..2583: mol_type = other DNA
atggccttaccagtgaccgccttgctcctgccgctggccttgctgctccacgccgccaggccggaagtgcagctggttgaatctggcggaggactggttcagcctggcggatctctgagactgtcttgtgccgccagcggcttcagcttcagcgacttttggatgagctgggtccgacaggcccctggcaaaggacttgaatgggtcgccacaatcagccaggccggcagcgagaaggactacgtggactctgtgaagggcagattcaccatcagccgggacaacgccaagaagtccctgtacctccagatgaacagcctgagagccgaggacaccgccgtgtactattgtgcctctggcgtgtacagcttcgactacagaggccagggcaccctggtcacagtctcttctggtaccggcggaggcggatctggcggcggaggtagcggtggcggaggatctgaattcgacatcgtgatgacccagagccccgatagcctggccgtgtctctgggagagagagccaccatcaactgcaagagcagccagagcctgctgaacagcggcgaccagaagaactacctgacctggtatcagcagaagcccggccagccccccaagctgctgatctactgggccagcaccagagaaagcggcgtgcccgatagattcagcggcagcggaagtggcaccgacttcaccctgaccatcagttctcttcaggccgaggacgtggccgtgtactactgccagaacgactacagctaccccctgaccttcggccagggcaccaaggtggaaatcaagctcgaggacctgaagaacgtgttcccacctgaggtggccgtgttcgagcctagcgaggccgagatcagccacacccagaaagccaccctcgtgtgcctggctaccggcttctaccccgaccatgtggaactgtcttggtgggtcaacggcaaagaggtgcacagcggcgtgtgtaccgacccccagccactgaaagaacagcccgccctgaacgacagccggtactgcctgagcagcagactgagagtgtccgccaccttctggcagaacccccggaaccacttcagatgccaggtgcagttctacggcctgagcgagaacgacgagtggacccaggacagagccaagcccgtgacccagatcgtgtctgccgaagcctggggcagagccgatgatgtgattaagatccactggcaggaaaagaagtccaacaccatcctgggcagccaggaaggcaacaccatgaagaccaacgacacctacatgaagttcagctggctgaccgtgcccgagaagtccctggacaaagaacacagatgcatcgtgcggcacgaaaacaacaagaacggcgtggaccaggaaatcatcttcccacccatcaagaccgatgtgattacaatggaccccaaggacaactgctccaaggacgccaacgataccctgctgctccagctgaccaacaccagcgcctactacatgtacttgttgctgctgctgaagtccgtggtgtacttcgccatcatcacatgctgcctgctgatggctatggtcaagcggaaggacagccggggaagggccaagcgatctggatctggagcaacaaacttctcactactcaaacaagcaggtgacgtggaggagaatcccgggcctactagtatggactggatttggcgcatccttttccttgtcggcgctgctaccggcgcgcattccttcgaacaggtgcagctggtgcagtctggggccgaagtgaagaaaaccggcagcagcgtgaaggtgtcctgcaaggccagcggctacacctttaccgaccacgccattcacgtgtggcggcaggctccaggacaggccctggaatggatgggccacttcagccccggcaacaccgacatcaagtacaacgacaagttcaagggcagagtgaccctgaccgtggaccgcagcatgagcaccgcctacatggaactgagcagcctgcggagcgaggacaccgccatgtactattgcaagaccagcaccttctttttcgactactggggccagggaacaatggtcaccgtgtccagcacgcgtatccagaaccctgatcctgccgtgtaccagctgcgggatagcaagagcagcgacaagagcgtgtgtctgttcaccgacttcgacagccagaccaacgtgtcccagagcaaggactccgacgtgtacatcaccgataagtgcgtgctggacatgcggagcatggacttcaagagcaactccgccgtggcctggtccaacaagtccgatttcgcctgcgccaacgccttcaacaacagcattatccccgaggacacattcttcccaagccccgagagcagcgactccaccgaccacgtgaagcccaaagagacagagaacaccaagcagcccagcaagagctgccacaagcccaaggccatcgtgcacaccgagaaagtgaacatgatgagcctgaccgtgctgggcctgcggatgctgttcgccaaaaccgtggccgtgaacttcctgctgaccgccaagctgttcttcctcctcaccgcc

SEQ ID NO: 6423 - DNA, 2580 bp, synthetic construct
  source 1..2580: mol_type = other DNA
atggccttaccagtgaccgccttgctcctgccgctggccttgctgctccacgccgccaggccggaagtgcagctggttgaatctggcggaggactggttcagcctggcggatctctgagactgtcttgtgccgccagcggcttcagcttcagcgacttttggatgagctgggtccgacaggcccctggcaaaggacttgaatgggtcgccacaatcagccaggccggcagcgagaaggactacgtggactctgtgaagggcagattcaccatcagccgggacaacgccaagaagtccctgtacctccagatgaacagcctgagagccgaggacaccgccgtgtactattgtgcctctggcgtgtacagcttcgactacagaggccagggcaccctggtcacagtctcttctggtaccggcggaggcggatctggcggcggaggtagcggtggcggaggatctgaattcgacatccagatgacccagagccccagcagcctgtctgccagcgtgggcgacagagtgaccatcacatgcaaggccagccaggacgtgtccattgccgtggcctggtatcagcagaagcccggcaaggcccccaaggtgctgatctacagcgccagctacagatacaccggcgtgcccgacagattcagcggctctggcagcggcaccgacttcaccttcaccatcagctccctccagcccgaggatattgccgtgtactactgccagcagcactacatcacccccctgacctttggcggaggcaccaaggtggaaatcaagctcgaggacctgaagaacgtgttcccacctgaggtggccgtgttcgagcctagcgaggccgagatcagccacacccagaaagccaccctcgtgtgcctggctaccggcttctaccccgaccatgtggaactgtcttggtgggtcaacggcaaagaggtgcacagcggcgtgtgtaccgacccccagccactgaaagaacagcccgccctgaacgacagccggtactgcctgagcagcagactgagagtgtccgccaccttctggcagaacccccggaaccacttcagatgccaggtgcagttctacggcctgagcgagaacgacgagtggacccaggacagagccaagcccgtgacccagatcgtgtctgccgaagcctggggcagagccgatgatgtgattaagatccactggcaggaaaagaagtccaacaccatcctgggcagccaggaaggcaacaccatgaagaccaacgacacctacatgaagttcagctggctgaccgtgcccgagaagtccctggacaaagaacacagatgcatcgtgcggcacgaaaacaacaagaacggcgtggaccaggaaatcatcttcccacccatcaagaccgatgtgattacaatggaccccaaggacaactgctccaaggacgccaacgataccctgctgctccagctgaccaacaccagcgcctactacatgtacttgttgctgctgctgaagtccgtggtgtacttcgccatcatcacatgctgcctgctgatggctatggtcaagcggaaggacagccggggaagggccaagcgatctggatctggagcaacaaacttctcactactcaaacaagcaggtgacgtggaggagaatcccgggcctactagtatggactggatttggcgcatccttttccttgtcggcgctgctaccggcgcgcattccttcgaacagatccaactggtgcagagcggccacgaagtgaagaaacctggggccagcgtgaaggtgtcctgcaaagccagcggctacacctttaccaactacggcatgaactgggtgcgccaggcccctggacagggcctggaatggatgggctggatcaacaccaagaccggcgagcccacctacgccgaagagttcaagggcagattcgtgttcagcctggaaaccagcgcctccaccgcctacctccagatcagctctctgaaggccgaggacaccgccatgtacttttgcggcagaggcggctacggcagcagctactggtacttcgatgtgtggggccagggcaccaccgtgaccgtgtcatctacgcgtatccagaaccctgatcctgccgtgtaccagctgcgggatagcaagagcagcgacaagagcgtgtgtctgttcaccgacttcgacagccagaccaacgtgtcccagagcaaggactccgacgtgtacatcaccgataagtgcgtgctggacatgcggagcatggacttcaagagcaactccgccgtggcctggtccaacaagtccgatttcgcctgcgccaacgccttcaacaacagcattatccccgaggacacattcttcccaagccccgagagcagcgactccaccgaccacgtgaagcccaaagagacagagaacaccaagcagcccagcaagagctgccacaagcccaaggccatcgtgcacaccgagaaagtgaacatgatgagcctgaccgtgctgggcctgcggatgctgttcgccaaaaccgtggccgtgaacttcctgctgaccgccaagctgttcttcctcctcaccgcc

SEQ ID NO: 6424 - DNA, 2586 bp, synthetic construct
  source 1..2586: mol_type = other DNA
atggccttaccagtgaccgccttgctcctgccgctggccttgctgctccacgccgccaggccggaagtgcagctggttgaatctggcggaggactggttcagcctggcggatctctgagactgtcttgtgccgccagcggcttcagcttcagcgacttttggatgagctgggtccgacaggcccctggcaaaggacttgaatgggtcgccacaatcagccaggccggcagcgagaaggactacgtggactctgtgaagggcagattcaccatcagccgggacaacgccaagaagtccctgtacctccagatgaacagcctgagagccgaggacaccgccgtgtactattgtgcctctggcgtgtacagcttcgactacagaggccagggcaccctggtcacagtctcttctggtaccggcggaggcggatctggcggcggaggtagcggtggcggaggatctgaattcgacatcgtgatgacccagagccccgatagcctggccgtgtctctgggagagagagccaccatcaactgccgggccagcaagagcgtgtccaccagcggctacagctacatgcactggtatcagcagaagcccggccagccccccaagctgctgatctacctggcctccaacctggaaagcggcgtgcccgatagattcagcggcagcggctctggcaccgacttcaccctgaccatcagttctcttcaggccgaggacgtggccgtgtactactgccagcacagcagagagctgccctacaccttcggccagggcaccaagctggaaatcaagctcgaggacctgaagaacgtgttcccacctgaggtggccgtgttcgagcctagcgaggccgagatcagccacacccagaaagccaccctcgtgtgcctggctaccggcttctaccccgaccatgtggaactgtcttggtgggtcaacggcaaagaggtgcacagcggcgtgtgtaccgacccccagccactgaaagaacagcccgccctgaacgacagccggtactgcctgagcagcagactgagagtgtccgccaccttctggcagaacccccggaaccacttcagatgccaggtgcagttctacggcctgagcgagaacgacgagtggacccaggacagagccaagcccgtgacccagatcgtgtctgccgaagcctggggcagagccgatgatgtgattaagatccactggcaggaaaagaagtccaacaccatcctgggcagccaggaaggcaacaccatgaagaccaacgacacctacatgaagttcagctggctgaccgtgcccgagaagtccctggacaaagaacacagatgcatcgtgcggcacgaaaacaacaagaacggcgtggaccaggaaatcatcttcccacccatcaagaccgatgtgattacaatggaccccaaggacaactgctccaaggacgccaacgataccctgctgctccagctgaccaacaccagcgcctactacatgtacttgttgctgctgctgaagtccgtggtgtacttcgccatcatcacatgctgcctgctgatggctatggtcaagcggaaggacagccggggaagggccaagcgatctggatctggagcaacaaacttctcactactcaaacaagcaggtgacgtggaggagaatcccgggcctactagtatggactggatttggcgcatccttttccttgtcggcgctgctaccggcgcgcattccttcgaacaggtgcaactccaggaatctggccctggccttgtgaagcccagcgagacactgagcctgacctgtaccgtgtccggcggcagcatcagctcttacggcgtgcactggattcggcagcctccaggcaagggcctggaatggatcggcgtgatctggacctccggcgtgaccgactacaacagcgccctgatgggcagagtgaccatctccgtggacaccagcaagaaccagttcagcctgaagctgagcagcgtgacagccgccgataccgccgtgtattattgcgccagagatggcgactacgaccgctacacaatggactactggggccagggaacccttgtgaccgtgtcctctacgcgtatccagaaccctgatcctgccgtgtaccagctgcgggatagcaagagcagcgacaagagcgtgtgtctgttcaccgacttcgacagccagaccaacgtgtcccagagcaaggactccgacgtgtacatcaccgataagtgcgtgctggacatgcggagcatggacttcaagagcaactccgccgtggcctggtccaacaagtccgatttcgcctgcgccaacgccttcaacaacagcattatccccgaggacacattcttcccaagccccgagagcagcgactccaccgaccacgtgaagcccaaagagacagagaacaccaagcagcccagcaagagctgccacaagcccaaggccatcgtgcacaccgagaaagtgaacatgatgagcctgaccgtgctgggcctgcggatgctgttcgccaaaaccgtggccgtgaacttcctgctgaccgccaagctgttcttcctcctcaccgcc

SEQ ID NO: 6425 - DNA, 2586 bp, synthetic construct
  source 1..2586: mol_type = other DNA
atggccttaccagtgaccgccttgctcctgccgctggccttgctgctccacgccgccaggccggaagtgcagctggttgaatctggcggaggactggttcagcctggcggatctctgagactgtcttgtgccgccagcggcttcagcttcagcgacttttggatgagctgggtccgacaggcccctggcaaaggacttgaatgggtcgccacaatcagccaggccggcagcgagaaggactacgtggactctgtgaagggcagattcaccatcagccgggacaacgccaagaagtccctgtacctccagatgaacagcctgagagccgaggacaccgccgtgtactattgtgcctctggcgtgtacagcttcgactacagaggccagggcaccctggtcacagtctcttctggtaccggcggaggcggatctggcggcggaggtagcggtggcggaggatctgaattcgacatccagatgacccagagccccagcagcctgtctgccagcgtgggcgacagagtgaccatcacctgtagagccagccagagcatcggcaccagcctgcactggtatcagcagaagcctggcaaggcccccaagctgctgattaagttcgccagcagactgcagagcggcgtgcccagcagattttctggcagcggctccggcaccgacttcaccctgacaatcagctccctgcagcccgaggacttcgccacctactactgccagcagagccccggcttccctccaacctttggacagggcaccaagctggaaatcaagcggctcgaggacctgaagaacgtgttcccacctgaggtggccgtgttcgagcctagcgaggccgagatcagccacacccagaaagccaccctcgtgtgcctggctaccggcttctaccccgaccatgtggaactgtcttggtgggtcaacggcaaagaggtgcacagcggcgtgtgtaccgacccccagccactgaaagaacagcccgccctgaacgacagccggtactgcctgagcagcagactgagagtgtccgccaccttctggcagaacccccggaaccacttcagatgccaggtgcagttctacggcctgagcgagaacgacgagtggacccaggacagagccaagcccgtgacccagatcgtgtctgccgaagcctggggcagagccgatgatgtgattaagatccactggcaggaaaagaagtccaacaccatcctgggcagccaggaaggcaacaccatgaagaccaacgacacctacatgaagttcagctggctgaccgtgcccgagaagtccctggacaaagaacacagatgcatcgtgcggcacgaaaacaacaagaacggcgtggaccaggaaatcatcttcccacccatcaagaccgatgtgattacaatggaccccaaggacaactgctccaaggacgccaacgataccctgctgctccagctgaccaacaccagcgcctactacatgtacttgttgctgctgctgaagtccgtggtgtacttcgccatcatcacatgctgcctgctgatggctatggtcaagcggaaggacagccggggaagggccaagcgatctggatctggagcaacaaacttctcactactcaaacaagcaggtgacgtggaggagaatcccgggcctactagtatggactggatttggcgcatccttttccttgtcggcgctgctaccggcgcgcattccttcgaacaggtgcaactggtggaatctggcggcggacttgtgaagccaggcggcagcctgagactgagctgtgccgccagcggcttcagcatcaccaccagcggctactactggacctggatcagacagttccccggcaagggcctggaatggatgggctacatcggctacaacagcaagacctactacaaccccgccctgaagtcccggatcaccatcagcagagacaacgccaagaacagcctgtacctgcagatgaactccctgagagccgaggataccgccgtgtactactgcgccagatccctgtacggcggctacaaggacgccttcgatagctggggccagggaacccttgtgaccgtgtctagcacgcgtatccagaaccctgatcctgccgtgtaccagctgcgggatagcaagagcagcgacaagagcgtgtgtctgttcaccgacttcgacagccagaccaacgtgtcccagagcaaggactccgacgtgtacatcaccgataagtgcgtgctggacatgcggagcatggacttcaagagcaactccgccgtggcctggtccaacaagtccgatttcgcctgcgccaacgccttcaacaacagcattatccccgaggacacattcttcccaagccccgagagcagcgactccaccgaccacgtgaagcccaaagagacagagaacaccaagcagcccagcaagagctgccacaagcccaaggccatcgtgcacaccgagaaagtgaacatgatgagcctgaccgtgctgggcctgcggatgctgttcgccaaaaccgtggccgtgaacttcctgctgaccgccaagctgttcttcctcctcaccgcc

SEQ ID NO: 6426 - DNA, 2601 bp, synthetic construct
  source 1..2601: mol_type = other DNA
atggccttaccagtgaccgccttgctcctgccgctggccttgctgctccacgccgccaggccggaagtgcagctggttgaatctggcggaggactggttcagcctggcggatctctgagactgtcttgtgccgccagcggcttcagcttcagcgacttttggatgagctgggtccgacaggcccctggcaaaggacttgaatgggtcgccacaatcagccaggccggcagcgagaaggactacgtggactctgtgaagggcagattcaccatcagccgggacaacgccaagaagtccctgtacctccagatgaacagcctgagagccgaggacaccgccgtgtactattgtgcctctggcgtgtacagcttcgactacagaggccagggcaccctggtcacagtctcttctggtaccggcggaggcggatctggcggcggaggtagcggtggcggaggatctgaattcgacgagatcgtgctgacccagagccctctgagcctgcctgtgacacctggcgagcctgccagcatctcctgtagaagcagccagagcctgctgcacagcatcggctacaactacctggactggtatctccagaagcccggccagagcccccaactgctgatctacctgggcagcaacagagccagcggcgtgcccgatagattttccggcagcggctccggcaccgacttcaccctgaagatcagccgggtggaagccgaggacgtgggcgtgtactactgtatgcaggccctccagacccccctgacctttggcggaggcaccaaggtggaaatcaagcggctcgaggacctgaagaacgtgttcccacctgaggtggccgtgttcgagcctagcgaggccgagatcagccacacccagaaagccaccctcgtgtgcctggctaccggcttctaccccgaccatgtggaactgtcttggtgggtcaacggcaaagaggtgcacagcggcgtgtgtaccgacccccagccactgaaagaacagcccgccctgaacgacagccggtactgcctgagcagcagactgagagtgtccgccaccttctggcagaacccccggaaccacttcagatgccaggtgcagttctacggcctgagcgagaacgacgagtggacccaggacagagccaagcccgtgacccagatcgtgtctgccgaagcctggggcagagccgatgatgtgattaagatccactggcaggaaaagaagtccaacaccatcctgggcagccaggaaggcaacaccatgaagaccaacgacacctacatgaagttcagctggctgaccgtgcccgagaagtccctggacaaagaacacagatgcatcgtgcggcacgaaaacaacaagaacggcgtggaccaggaaatcatcttcccacccatcaagaccgatgtgattacaatggaccccaaggacaactgctccaaggacgccaacgataccctgctgctccagctgaccaacaccagcgcctactacatgtacttgttgctgctgctgaagtccgtggtgtacttcgccatcatcacatgctgcctgctgatggctatggtcaagcggaaggacagccggggaagggccaagcgatctggatctggagcaacaaacttctcactactcaaacaagcaggtgacgtggaggagaatcccgggcctactagtatggactggatttggcgcatccttttccttgtcggcgctgctaccggcgcgcattccttcgaagaagtgcaactggtggaaagcggaggcggcgtggtgcagcctggaagaagcctgagactgagctgtgccgccagcggcttcaccttccggtcctacggaatgcactgggtgcgccaggcccctggcaaaggactggaatgggtggccgtgatctcctacgacggctccaacaagtactacaccgacagcgtgaacggcagattcaccatcagcagagacaacagcaagaacaccctgtacctccagatgaacagcctgcgggccgaggacaccgccgtgtactattgtgctagaggcggaggctactacgagacaagcggccctgattactggggccagggcacactcgtgaccgtgtctagtacgcgtatccagaaccctgatcctgccgtgtaccagctgcgggatagcaagagcagcgacaagagcgtgtgtctgttcaccgacttcgacagccagaccaacgtgtcccagagcaaggactccgacgtgtacatcaccgataagtgcgtgctggacatgcggagcatggacttcaagagcaactccgccgtggcctggtccaacaagtccgatttcgcctgcgccaacgccttcaacaacagcattatccccgaggacacattcttcccaagccccgagagcagcgactccaccgaccacgtgaagcccaaagagacagagaacaccaagcagcccagcaagagctgccacaagcccaaggccatcgtgcacaccgagaaagtgaacatgatgagcctgaccgtgctgggcctgcggatgctgttcgccaaaaccgtggccgtgaacttcctgctgaccgccaagctgttcttcctcctcaccgcc

SEQ ID NO: 6427 - DNA, 2595 bp, synthetic construct
  source 1..2595: mol_type = other DNA
atggccttaccagtgaccgccttgctcctgccgctggccttgctgctccacgccgccaggccggaagtgcagctggttgaatctggcggaggactggttcagcctggcggatctctgagactgtcttgtgccgccagcggcttcagcttcagcgacttttggatgagctgggtccgacaggcccctggcaaaggacttgaatgggtcgccacaatcagccaggccggcagcgagaaggactacgtggactctgtgaagggcagattcaccatcagccgggacaacgccaagaagtccctgtacctccagatgaacagcctgagagccgaggacaccgccgtgtactattgtgcctctggcgtgtacagcttcgactacagaggccagggcaccctggtcacagtctcttctggtaccggcggaggcggatctggcggcggaggtagcggtggcggaggatctgaattcgacgacgtcgtgatgacccagagccctctgagcctgcctgtgacacctggcgagcctgccagcatctcctgtagaagcagccagagcctgctgcacagcatcggctacaactacctgcactggtttctccagaagcccggccagagcccccaactgctgatctacctgggcagcaacagagccagcggcgtgcccgatagattttccggcagcggctccggcaccgacttcaccctgaagatcagccgggtggaagccgaggacgtgggcgtgtactactgtatgcaggccctccagacccctcccacctttggacagggcaccagactggaaatcaagcggctcgaggacctgaagaacgtgttcccacctgaggtggccgtgttcgagcctagcgaggccgagatcagccacacccagaaagccaccctcgtgtgcctggctaccggcttctaccccgaccatgtggaactgtcttggtgggtcaacggcaaagaggtgcacagcggcgtgtgtaccgacccccagccactgaaagaacagcccgccctgaacgacagccggtactgcctgagcagcagactgagagtgtccgccaccttctggcagaacccccggaaccacttcagatgccaggtgcagttctacggcctgagcgagaacgacgagtggacccaggacagagccaagcccgtgacccagatcgtgtctgccgaagcctggggcagagccgatgatgtgattaagatccactggcaggaaaagaagtccaacaccatcctgggcagccaggaaggcaacaccatgaagaccaacgacacctacatgaagttcagctggctgaccgtgcccgagaagtccctggacaaagaacacagatgcatcgtgcggcacgaaaacaacaagaacggcgtggaccaggaaatcatcttcccacccatcaagaccgatgtgattacaatggaccccaaggacaactgctccaaggacgccaacgataccctgctgctccagctgaccaacaccagcgcctactacatgtacttgttgctgctgctgaagtccgtggtgtacttcgccatcatcacatgctgcctgctgatggctatggtcaagcggaaggacagccggggaagggccaagcgatctggatctggagcaacaaacttctcactactcaaacaagcaggtgacgtggaggagaatcccgggcctactagtatggactggatttggcgcatccttttccttgtcggcgctgctaccggcgcgcattccttcgaacaactccaactccaggaaagcggccctggcctcgtgaagcctagcggcacactgagcctgacatgtgccgtgtctggcggcagcatcagcagcagcaactggtggtcttgggtgcgccagcctcctggcaagggcctggaatggatcggcgaaatctaccacagcggcagcaccaactacaaccccagcctgaagtccagagtgaccatcagcgtggacaagagcaagaaccagttctccctgaagctgagcagcgtgacagccgccgataccgccgtgtactattgcgtgggcagcccctacggcgactacgtgctggattattggggccagggcaccctcgtgaccgtgtctagtacgcgtatccagaaccctgatcctgccgtgtaccagctgcgggatagcaagagcagcgacaagagcgtgtgtctgttcaccgacttcgacagccagaccaacgtgtcccagagcaaggactccgacgtgtacatcaccgataagtgcgtgctggacatgcggagcatggacttcaagagcaactccgccgtggcctggtccaacaagtccgatttcgcctgcgccaacgccttcaacaacagcattatccccgaggacacattcttcccaagccccgagagcagcgactccaccgaccacgtgaagcccaaagagacagagaacaccaagcagcccagcaagagctgccacaagcccaaggccatcgtgcacaccgagaaagtgaacatgatgagcctgaccgtgctgggcctgcggatgctgttcgccaaaaccgtggccgtgaacttcctgctgaccgccaagctgttcttcctcctcaccgcc

SEQ ID NO: 6428 - DNA, 2589 bp, synthetic construct
  source 1..2589: mol_type = other DNA
atggccttaccagtgaccgccttgctcctgccgctggccttgctgctccacgccgccaggccggaagtgcagctggttgaatctggcggaggactggttcagcctggcggatctctgagactgtcttgtgccgccagcggcttcagcttcagcgacttttggatgagctgggtccgacaggcccctggcaaaggacttgaatgggtcgccacaatcagccaggccggcagcgagaaggactacgtggactctgtgaagggcagattcaccatcagccgggacaacgccaagaagtccctgtacctccagatgaacagcctgagagccgaggacaccgccgtgtactattgtgcctctggcgtgtacagcttcgactacagaggccagggcaccctggtcacagtctcttctggtaccggcggaggcggatctggcggcggaggtagcggtggcggaggatctgaattcgacgagatcgtgctgacacagagccctggcaccctgagcctgtctctgggagagagagccacactgagctgtcgggccagccagtctatcagcagcagcttcctggcctggtatcagcagaagcccggccaggcccctaagctgctgatctacgccgccagcacaagagccaccggcatccccgatagattcagcggctctggcagcggcaccgacttcaccctgaccatcagcagactggaacccgaggacttcgccgtgtactactgccagcagtacggcagaagcctgagcttcggcggaggcaccaaggtggaagtgaagctcgaggacctgaagaacgtgttcccacctgaggtggccgtgttcgagcctagcgaggccgagatcagccacacccagaaagccaccctcgtgtgcctggctaccggcttctaccccgaccatgtggaactgtcttggtgggtcaacggcaaagaggtgcacagcggcgtgtgtaccgacccccagccactgaaagaacagcccgccctgaacgacagccggtactgcctgagcagcagactgagagtgtccgccaccttctggcagaacccccggaaccacttcagatgccaggtgcagttctacggcctgagcgagaacgacgagtggacccaggacagagccaagcccgtgacccagatcgtgtctgccgaagcctggggcagagccgatgatgtgattaagatccactggcaggaaaagaagtccaacaccatcctgggcagccaggaaggcaacaccatgaagaccaacgacacctacatgaagttcagctggctgaccgtgcccgagaagtccctggacaaagaacacagatgcatcgtgcggcacgaaaacaacaagaacggcgtggaccaggaaatcatcttcccacccatcaagaccgatgtgattacaatggaccccaaggacaactgctccaaggacgccaacgataccctgctgctccagctgaccaacaccagcgcctactacatgtacttgttgctgctgctgaagtccgtggtgtacttcgccatcatcacatgctgcctgctgatggctatggtcaagcggaaggacagccggggaagggccaagcgatctggatctggagcaacaaacttctcactactcaaacaagcaggtgacgtggaggagaatcccgggcctactagtatggactggatttggcgcatccttttccttgtcggcgctgctaccggcgcgcattccttcgaacaggtgcaactccagcagtctggccccggactcgtgaagcctagccagacactgagcctgacctgcgccatcagcggcgatagcgtgtccggcaatagcgccacctggaactggatcagacagagcccatctcggggcctggaatggctgggccggacctactaccgcagcaagtggaaccacgactacgccgagagcgtgaagtcccggatcaccatcaaccccgacaccagcaagaaccagttctccttgcaactgaacagcgtgacccccgaggacacagccgtgtattattgcgccagaggcgacagcagctcttggtacgccttcgactattggggccagggcaccctcgtgaccgtgtctagtacgcgtatccagaaccctgatcctgccgtgtaccagctgcgggatagcaagagcagcgacaagagcgtgtgtctgttcaccgacttcgacagccagaccaacgtgtcccagagcaaggactccgacgtgtacatcaccgataagtgcgtgctggacatgcggagcatggacttcaagagcaactccgccgtggcctggtccaacaagtccgatttcgcctgcgccaacgccttcaacaacagcattatccccgaggacacattcttcccaagccccgagagcagcgactccaccgaccacgtgaagcccaaagagacagagaacaccaagcagcccagcaagagctgccacaagcccaaggccatcgtgcacaccgagaaagtgaacatgatgagcctgaccgtgctgggcctgcggatgctgttcgccaaaaccgtggccgtgaacttcctgctgaccgccaagctgttcttcctcctcaccgcc

SEQ ID NO: 6429 - DNA, 2586 bp, synthetic construct
  source 1..2586: mol_type = other DNA
atggccttaccagtgaccgccttgctcctgccgctggccttgctgctccacgccgccaggccggaagtgcagctggttgaatctggcggaggactggttcagcctggcggatctctgagactgtcttgtgccgccagcggcttcagcttcagcgacttttggatgagctgggtccgacaggcccctggcaaaggacttgaatgggtcgccacaatcagccaggccggcagcgagaaggactacgtggactctgtgaagggcagattcaccatcagccgggacaacgccaagaagtccctgtacctccagatgaacagcctgagagccgaggacaccgccgtgtactattgtgcctctggcgtgtacagcttcgactacagaggccagggcaccctggtcacagtctcttctggtaccggcggaggcggatctggcggcggaggtagcggtggcggaggatctgaattcgaccagagcgtcgtgacacagcctcctagcgtgtcagtggcccctggcaagaccgccagaatcacctgtggccggaacaacatcggcagcaagagcgtgcactggtatcagcagaagcccggccaggctcctgtgctggtggtgtacgacgacagcgacagacccagcggcatccccgagagattcagcggcagcaactccggcaataccgccaccctgaccatcagcagagtggaagccggcgacgaggccgactactactgccaagtgtgggacagcagcagcgatcacgtggtgtttggcggaggcaccaagctgacagtgctgggtctcgaggacctgaagaacgtgttcccacctgaggtggccgtgttcgagcctagcgaggccgagatcagccacacccagaaagccaccctcgtgtgcctggctaccggcttctaccccgaccatgtggaactgtcttggtgggtcaacggcaaagaggtgcacagcggcgtgtgtaccgacccccagccactgaaagaacagcccgccctgaacgacagccggtactgcctgagcagcagactgagagtgtccgccaccttctggcagaacccccggaaccacttcagatgccaggtgcagttctacggcctgagcgagaacgacgagtggacccaggacagagccaagcccgtgacccagatcgtgtctgccgaagcctggggcagagccgatgatgtgattaagatccactggcaggaaaagaagtccaacaccatcctgggcagccaggaaggcaacaccatgaagaccaacgacacctacatgaagttcagctggctgaccgtgcccgagaagtccctggacaaagaacacagatgcatcgtgcggcacgaaaacaacaagaacggcgtggaccaggaaatcatcttcccacccatcaagaccgatgtgattacaatggaccccaaggacaactgctccaaggacgccaacgataccctgctgctccagctgaccaacaccagcgcctactacatgtacttgttgctgctgctgaagtccgtggtgtacttcgccatcatcacatgctgcctgctgatggctatggtcaagcggaaggacagccggggaagggccaagcgatctggatctggagcaacaaacttctcactactcaaacaagcaggtgacgtggaggagaatcccgggcctactagtatggactggatttggcgcatccttttccttgtcggcgctgctaccggcgcgcattccttcgaagtgcaactggtgcagtctggcggaggggtcatgcggcctggcggatctctgagactgtcttgtgccgccagcggcttcaccttcgacgactacggcatgagctgggtgcgccaggcccctggaaaaggcctggaatgggtgtccggcatcaactggaatggcggcagcaccggctacgccgattctgtgcggggcagattcaccatcagccgggacaacgccaagaacagcctgtacctgcagatgaactccctgcgggccgaggacaccgccctgtactattgcgccagagagcggggctacggctaccacgaccctcacgattattggggccagggcacccttgttaccgtgtcctctacgcgtatccagaaccctgatcctgccgtgtaccagctgcgggatagcaagagcagcgacaagagcgtgtgtctgttcaccgacttcgacagccagaccaacgtgtcccagagcaaggactccgacgtgtacatcaccgataagtgcgtgctggacatgcggagcatggacttcaagagcaactccgccgtggcctggtccaacaagtccgatttcgcctgcgccaacgccttcaacaacagcattatccccgaggacacattcttcccaagccccgagagcagcgactccaccgaccacgtgaagcccaaagagacagagaacaccaagcagcccagcaagagctgccacaagcccaaggccatcgtgcacaccgagaaagtgaacatgatgagcctgaccgtgctgggcctgcggatgctgttcgccaaaaccgtggccgtgaacttcctgctgaccgccaagctgttcttcctcctcaccgcc

SEQ ID NO: 6430 - DNA, 2625 bp, synthetic construct
  source 1..2625: mol_type = other DNA
atggccttaccagtgaccgccttgctcctgccgctggccttgctgctccacgccgccaggccggaagtgcagctggttgaatctggcggaggactggttcagcctggcggatctctgagactgtcttgtgccgccagcggcttcagcttcagcgacttttggatgagctgggtccgacaggcccctggcaaaggacttgaatgggtcgccacaatcagccaggccggcagcgagaaggactacgtggactctgtgaagggcagattcaccatcagccgggacaacgccaagaagtccctgtacctccagatgaacagcctgagagccgaggacaccgccgtgtactattgtgcctctggcgtgtacagcttcgactacagaggccagggcaccctggtcacagtctcttctggtaccggcggaggcggatctggcggcggaggtagcggtggcggaggatctgaattcgaacagaaactcatcagtgaagaagacctggaattccaggctgtcgtgacacagcctcctagcgcctctggcacaccaggccagagagtgaccatctcctgtagcggcagcagcagcaacatcggcagcaacaccgtgaactggtatcagcaggtgcccggcaccgctcccaagctgctgatctacagcaacaaccagcggcccagcggcgtgcccgatagattttctggcagcaagagcggcaccagcgccagcctggctatctctggactccagtccgaggacgaggccgactactattgcgccgcctgggacgatagcctgaacggctgggtgttcggcggaggcaccaagctgacagtgctgctcgaggacctgaagaacgtgttcccacctgaggtggccgtgttcgagcctagcgaggccgagatcagccacacccagaaagccaccctcgtgtgcctggctaccggcttctaccccgaccatgtggaactgtcttggtgggtcaacggcaaagaggtgcacagcggcgtgtgtaccgacccccagccactgaaagaacagcccgccctgaacgacagccggtactgcctgagcagcagactgagagtgtccgccaccttctggcagaacccccggaaccacttcagatgccaggtgcagttctacggcctgagcgagaacgacgagtggacccaggacagagccaagcccgtgacccagatcgtgtctgccgaagcctggggcagagccgatgatgtgattaagatccactggcaggaaaagaagtccaacaccatcctgggcagccaggaaggcaacaccatgaagaccaacgacacctacatgaagttcagctggctgaccgtgcccgagaagtccctggacaaagaacacagatgcatcgtgcggcacgaaaacaacaagaacggcgtggaccaggaaatcatcttcccacccatcaagaccgatgtgattacaatggaccccaaggacaactgctccaaggacgccaacgataccctgctgctccagctgaccaacaccagcgcctactacatgtacttgttgctgctgctgaagtccgtggtgtacttcgccatcatcacatgctgcctgctgatggctatggtcaagcggaaggacagccggggaagggccaagcgatctggatctggagcaacaaacttctcactactcaaacaagcaggtgacgtggaggagaatcccgggcctactagtatggactggatttggcgcatccttttccttgtcggcgctgctaccggcgcgcattccttcgaacagatgcaactggtgcagagcggagccgaagtgaaagagcctggcgagagcctgcggatctcctgcaagggcagcggctacagcttcaccaatttctggatctcttgggtgcgccagatgcccggcaagggcctggaatggatgggcagagtggaccccggctactcctacagcacctacagccctagcttccagggccacgtgaccatcagcgccgacaagagcaccagcaccgcctacctccagtggaacagcctgaaggccagcgacaccgccatgtactactgcgccagagtgcagtacagcggctattacgattggttcgacccctggggccagggcacactcgtgacagtgtcaagcacgcgtatccagaaccctgatcctgccgtgtaccagctgcgggatagcaagagcagcgacaagagcgtgtgtctgttcaccgacttcgacagccagaccaacgtgtcccagagcaaggactccgacgtgtacatcaccgataagtgcgtgctggacatgcggagcatggacttcaagagcaactccgccgtggcctggtccaacaagtccgatttcgcctgcgccaacgccttcaacaacagcattatccccgaggacacattcttcccaagccccgagagcagcgactccaccgaccacgtgaagcccaaagagacagagaacaccaagcagcccagcaagagctgccacaagcccaaggccatcgtgcacaccgagaaagtgaacatgatgagcctgaccgtgctgggcctgcggatgctgttcgccaaaaccgtggccgtgaacttcctgctgaccgccaagctgttcttcctcctcaccgcc

SEQ ID NO: 6431 - DNA, 2607 bp, synthetic construct
  source 1..2607: mol_type = other DNA
atggccttaccagtgaccgccttgctcctgccgctggccttgctgctccacgccgccaggccggaagtgcagctggttgaatctggcggaggactggttcagcctggcggatctctgagactgtcttgtgccgccagcggcttcagcttcagcgacttttggatgagctgggtccgacaggcccctggcaaaggacttgaatgggtcgccacaatcagccaggccggcagcgagaaggactacgtggactctgtgaagggcagattcaccatcagccgggacaacgccaagaagtccctgtacctccagatgaacagcctgagagccgaggacaccgccgtgtactattgtgcctctggcgtgtacagcttcgactacagaggccagggcaccctggtcacagtctcttctggtaccggcggaggcggatctggcggcggaggtagcggtggcggaggatctgaattcgaacagaaactcatcagtgaagaagacctggaattcgacatccagatgacccagagccccagcacactgagcgccagcgtgggcgacagagtgaccatcacctgtcgggccagccagaacatcaacaagtggctggcctggtatcagcagaggcccggaaaagccccccagctgctgatctacaaggccagcagcctggaaagcggcgtgcccagcagattttctggcagcggctctggcaccgagtacaccctgaccatcagctccctccagcccgacgacttcgccacctactactgccagcagtacaacagctacgccaccttcggccagggcaccaaggtggaaatcaagagactcgaggacctgaagaacgtgttcccacctgaggtggccgtgttcgagcctagcgaggccgagatcagccacacccagaaagccaccctcgtgtgcctggctaccggcttctaccccgaccatgtggaactgtcttggtgggtcaacggcaaagaggtgcacagcggcgtgtgtaccgacccccagccactgaaagaacagcccgccctgaacgacagccggtactgcctgagcagcagactgagagtgtccgccaccttctggcagaacccccggaaccacttcagatgccaggtgcagttctacggcctgagcgagaacgacgagtggacccaggacagagccaagcccgtgacccagatcgtgtctgccgaagcctggggcagagccgatgatgtgattaagatccactggcaggaaaagaagtccaacaccatcctgggcagccaggaaggcaacaccatgaagaccaacgacacctacatgaagttcagctggctgaccgtgcccgagaagtccctggacaaagaacacagatgcatcgtgcggcacgaaaacaacaagaacggcgtggaccaggaaatcatcttcccacccatcaagaccgatgtgattacaatggaccccaaggacaactgctccaaggacgccaacgataccctgctgctccagctgaccaacaccagcgcctactacatgtacttgttgctgctgctgaagtccgtggtgtacttcgccatcatcacatgctgcctgctgatggctatggtcaagcggaaggacagccggggaagggccaagcgatctggatctggagcaacaaacttctcactactcaaacaagcaggtgacgtggaggagaatcccgggcctactagtatggactggatttggcgcatccttttccttgtcggcgctgctaccggcgcgcattccttcgaacaggtgcagctggtgcagtctggggccgaagtgaagaagcctggcgagagcctgaagatcagctgcaagggctccggctacaacttctctaacaagtggatcggctgggtgcgccagctgcctggcagaggactggaatggatcgccatcatctaccccggctacagcgacatcacctacagccccagcttccagggccgcgtgacaatcagcgccgacaccagcatcaacaccgcctacctgcactggcacagcctgaaggccagcgacaccgccatgtactactgcgtgcggcatacagccctggctggcttcgattattggggcctgggcaccctcgtgaccgtgtctagtacgcgtatccagaaccctgatcctgccgtgtaccagctgcgggatagcaagagcagcgacaagagcgtgtgtctgttcaccgacttcgacagccagaccaacgtgtcccagagcaaggactccgacgtgtacatcaccgataagtgcgtgctggacatgcggagcatggacttcaagagcaactccgccgtggcctggtccaacaagtccgatttcgcctgcgccaacgccttcaacaacagcattatccccgaggacacattcttcccaagccccgagagcagcgactccaccgaccacgtgaagcccaaagagacagagaacaccaagcagcccagcaagagctgccacaagcccaaggccatcgtgcacaccgagaaagtgaacatgatgagcctgaccgtgctgggcctgcggatgctgttcgccaaaaccgtggccgtgaacttcctgctgaccgccaagctgttcttcctcctcaccgcc

SEQ ID NO: 6432 - DNA, 2580 bp, synthetic construct
  source 1..2580: mol_type = other DNA
atggccttaccagtgaccgccttgctcctgccgctggccttgctgctccacgccgccaggccggaagtgcagctggttgaatctggcggaggactggttcagcctggcggatctctgagactgtcttgtgccgccagcggcttcagcttcagcgacttttggatgagctgggtccgacaggcccctggcaaaggacttgaatgggtcgccacaatcagccaggccggcagcgagaaggactacgtggactctgtgaagggcagattcaccatcagccgggacaacgccaagaagtccctgtacctccagatgaacagcctgagagccgaggacaccgccgtgtactattgtgcctctggcgtgtacagcttcgactacagaggccagggcaccctggtcacagtctcttctggtaccggcggaggcggatctggcggcggaggtagcggtggcggaggatctgaattcatcgtgctgacacagagccctgcttctctggccgtgtctctgggacagagagccaccatcagctgtagagccagcgagagcgtggacaactacggcaacaccttcatgcactggtatcagcagaagcccggccagcctcctaagctgctgatctacagagccagcaacctggaaagcggcatccccgccagattttctggcagcggcagcagaaccgacttcaccctgaccatcaatcccgtggaagccgacgacgtggcaacctactactgccagcagagcaacgaggaccctcctacatttggagccggcaccaagctggaactgaaactcgaggacctgaagaacgtgttcccacctgaggtggccgtgttcgagcctagcgaggccgagatcagccacacccagaaagccaccctcgtgtgcctggctaccggcttctaccccgaccatgtggaactgtcttggtgggtcaacggcaaagaggtgcacagcggcgtgtgtaccgacccccagccactgaaagaacagcccgccctgaacgacagccggtactgcctgagcagcagactgagagtgtccgccaccttctggcagaacccccggaaccacttcagatgccaggtgcagttctacggcctgagcgagaacgacgagtggacccaggacagagccaagcccgtgacccagatcgtgtctgccgaagcctggggcagagccgatgatgtgattaagatccactggcaggaaaagaagtccaacaccatcctgggcagccaggaaggcaacaccatgaagaccaacgacacctacatgaagttcagctggctgaccgtgcccgagaagtccctggacaaagaacacagatgcatcgtgcggcacgaaaacaacaagaacggcgtggaccaggaaatcatcttcccacccatcaagaccgatgtgattacaatggaccccaaggacaactgctccaaggacgccaacgataccctgctgctccagctgaccaacaccagcgcctactacatgtacttgttgctgctgctgaagtccgtggtgtacttcgccatcatcacatgctgcctgctgatggctatggtcaagcggaaggacagccggggaagggccaagcgatctggatctggagcaacaaacttctcactactcaaacaagcaggtgacgtggaggagaatcccgggcctactagtatggactggatttggcgcatccttttccttgtcggcgctgctaccggcgcgcattccttcgaacagattcagctggtgcagtctggccccgagctgaagaaacctggcgagacagtgaagatcagctgcaaggccagcggctacatcttcaccaattacggcatgaactgggtcaagcaggcccctggcaagagcttcaagtggatgggctggatcaacacctacaccggcgagagcacatacagcgccgacttcaagggcagattcgccttcagcctggaaaccagcgccagcacagcctacctgcacatcaacgacctgaagaacgaggacaccgccacctacttttgcgccagaagcggcggctacgaccctatggattattggggccagggcaccagcgtgaccgtttcttctacgcgtatccagaaccctgatcctgccgtgtaccagctgcgggatagcaagagcagcgacaagagcgtgtgtctgttcaccgacttcgacagccagaccaacgtgtcccagagcaaggactccgacgtgtacatcaccgataagtgcgtgctggacatgcggagcatggacttcaagagcaactccgccgtggcctggtccaacaagtccgatttcgcctgcgccaacgccttcaacaacagcattatccccgaggacacattcttcccaagccccgagagcagcgactccaccgaccacgtgaagcccaaagagacagagaacaccaagcagcccagcaagagctgccacaagcccaaggccatcgtgcacaccgagaaagtgaacatgatgagcctgaccgtgctgggcctgcggatgctgttcgccaaaaccgtggccgtgaacttcctgctgaccgccaagctgttcttcctcctcaccgcc

SEQ ID NO: 6433 - DNA, 2577 bp, synthetic construct
  source 1..2577: mol_type = other DNA
atggccttaccagtgaccgccttgctcctgccgctggccttgctgctccacgccgccaggccggaagtgcagctggttgaatctggcggaggactggttcagcctggcggatctctgagactgtcttgtgccgccagcggcttcagcttcagcgacttttggatgagctgggtccgacaggcccctggcaaaggacttgaatgggtcgccacaatcagccaggccggcagcgagaaggactacgtggactctgtgaagggcagattcaccatcagccgggacaacgccaagaagtccctgtacctccagatgaacagcctgagagccgaggacaccgccgtgtactattgtgcctctggcgtgtacagcttcgactacagaggccagggcaccctggtcacagtctcttctggtaccggcggaggcggatctggcggcggaggtagcggtggcggaggatctgaattcgagatcgtgctgacacagagccctggcaccctgagcctgtctccaggcgaaagagccacactgagctgtcgggccagccagagcgtgtccaatacctacctggcctggtatcaccagaggcccggacaggctccccggctgctgatctatggcgcttctagcagagccaccggcatccccgatagattcagcggctctggcagcggcaccgacttcgccctgacaatcagctccctggaacccgaggacttcgccgtgtactactgccagcagtacagcaactcctggaccttcggccagggcaccaaggtggaaatcaagagactcgaggacctgaagaacgtgttcccacctgaggtggccgtgttcgagcctagcgaggccgagatcagccacacccagaaagccaccctcgtgtgcctggctaccggcttctaccccgaccatgtggaactgtcttggtgggtcaacggcaaagaggtgcacagcggcgtgtgtaccgacccccagccactgaaagaacagcccgccctgaacgacagccggtactgcctgagcagcagactgagagtgtccgccaccttctggcagaacccccggaaccacttcagatgccaggtgcagttctacggcctgagcgagaacgacgagtggacccaggacagagccaagcccgtgacccagatcgtgtctgccgaagcctggggcagagccgatgatgtgattaagatccactggcaggaaaagaagtccaacaccatcctgggcagccaggaaggcaacaccatgaagaccaacgacacctacatgaagttcagctggctgaccgtgcccgagaagtccctggacaaagaacacagatgcatcgtgcggcacgaaaacaacaagaacggcgtggaccaggaaatcatcttcccacccatcaagaccgatgtgattacaatggaccccaaggacaactgctccaaggacgccaacgataccctgctgctccagctgaccaacaccagcgcctactacatgtacttgttgctgctgctgaagtccgtggtgtacttcgccatcatcacatgctgcctgctgatggctatggtcaagcggaaggacagccggggaagggccaagcgatctggatctggagcaacaaacttctcactactcaaacaagcaggtgacgtggaggagaatcccgggcctactagtatggactggatttggcgcatccttttccttgtcggcgctgctaccggcgcgcattccttcgaacaggtgcaactggtggaatctggcgggggagtggtgcagcctggcagaagcctgagactgtcttgtgccgccagcggcttcaccttcagcagctacgacatgcactgggtgcgccaggcccctggcaaaggactggaatgggtggccgtgatctcctacgacggcaccaacgagtattacgccgacagcgtgaagggccggttcaccatctccagagacaccagcaagaacaccctgtacctccagatgaacagcctgcgggccgaggacacagccgtgtattattgcgccagagagcggtacttcgactggtccttcgactactggggccagggaaccctggtgtccgtgtctagtacgcgtatccagaaccctgatcctgccgtgtaccagctgcgggatagcaagagcagcgacaagagcgtgtgtctgttcaccgacttcgacagccagaccaacgtgtcccagagcaaggactccgacgtgtacatcaccgataagtgcgtgctggacatgcggagcatggacttcaagagcaactccgccgtggcctggtccaacaagtccgatttcgcctgcgccaacgccttcaacaacagcattatccccgaggacacattcttcccaagccccgagagcagcgactccaccgaccacgtgaagcccaaagagacagagaacaccaagcagcccagcaagagctgccacaagcccaaggccatcgtgcacaccgagaaagtgaacatgatgagcctgaccgtgctgggcctgcggatgctgttcgccaaaaccgtggccgtgaacttcctgctgaccgccaagctgttcttcctcctcaccgcc

SEQ ID NO: 6434 - DNA, 2574 bp, synthetic construct
  source 1..2574: mol_type = other DNA
atggccttaccagtgaccgccttgctcctgccgctggccttgctgctccacgccgccaggccggaagtgcagctggttgaatctggcggaggactggttcagcctggcggatctctgagactgtcttgtgccgccagcggcttcagcttcagcgacttttggatgagctgggtccgacaggcccctggcaaaggacttgaatgggtcgccacaatcagccaggccggcagcgagaaggactacgtggactctgtgaagggcagattcaccatcagccgggacaacgccaagaagtccctgtacctccagatgaacagcctgagagccgaggacaccgccgtgtactattgtgcctctggcgtgtacagcttcgactacagaggccagggcaccctggtcacagtctcttctggtaccggcggaggcggatctggcggcggaggtagcggtggcggaggatctgaattcgagctgacacaggaccctgctgtgtctgttgccctgggccagacagtgcggattacctgtcaaggcgacagcctgagaagcaactacgccaactggtatcagcagaagcccggacaggctcccgtgctggttatctacggccagaacaacagacccagcggcatccccgatagattcagcggctctagctctggcaataccgccagcctgacaatcactggcgctcaggctgccgatgaggccgactactactgcgatagcagagtgtccaccggcaatcacgtggtgtttggcggcggaacaaagctgacagtgctcggacaactcgaggacctgaagaacgtgttcccacctgaggtggccgtgttcgagcctagcgaggccgagatcagccacacccagaaagccaccctcgtgtgcctggctaccggcttctaccccgaccatgtggaactgtcttggtgggtcaacggcaaagaggtgcacagcggcgtgtgtaccgacccccagccactgaaagaacagcccgccctgaacgacagccggtactgcctgagcagcagactgagagtgtccgccaccttctggcagaacccccggaaccacttcagatgccaggtgcagttctacggcctgagcgagaacgacgagtggacccaggacagagccaagcccgtgacccagatcgtgtctgccgaagcctggggcagagccgatgatgtgattaagatccactggcaggaaaagaagtccaacaccatcctgggcagccaggaaggcaacaccatgaagaccaacgacacctacatgaagttcagctggctgaccgtgcccgagaagtccctggacaaagaacacagatgcatcgtgcggcacgaaaacaacaagaacggcgtggaccaggaaatcatcttcccacccatcaagaccgatgtgattacaatggaccccaaggacaactgctccaaggacgccaacgataccctgctgctccagctgaccaacaccagcgcctactacatgtacttgttgctgctgctgaagtccgtggtgtacttcgccatcatcacatgctgcctgctgatggctatggtcaagcggaaggacagccggggaagggccaagcgatctggatctggagcaacaaacttctcactactcaaacaagcaggtgacgtggaggagaatcccgggcctactagtatggactggatttggcgcatccttttccttgtcggcgctgctaccggcgcgcattccttcgaagaagttcagctggtgcagagcggagccgaagtgaagaaacctggggcctctgtgaaggtgtcctgcaaggcttccggctacacctttaccagctacgccatgcactgggtccgacaggcacctggacaacggcttgaatggatgggctggatcaacgccggcaacggcaacaccaagtacagccagaaattccagggccgcgtgaccatcaccagagatacaagcgccagcaccgcctacatggaactgtctagcctgagatccgaggacaccgccgtgtactactgtgccagagacatcagctacggcagcttcgactattggggccagggcacactggtcaccgttagctctacgcgtatccagaaccctgatcctgccgtgtaccagctgcgggatagcaagagcagcgacaagagcgtgtgtctgttcaccgacttcgacagccagaccaacgtgtcccagagcaaggactccgacgtgtacatcaccgataagtgcgtgctggacatgcggagcatggacttcaagagcaactccgccgtggcctggtccaacaagtccgatttcgcctgcgccaacgccttcaacaacagcattatccccgaggacacattcttcccaagccccgagagcagcgactccaccgaccacgtgaagcccaaagagacagagaacaccaagcagcccagcaagagctgccacaagcccaaggccatcgtgcacaccgagaaagtgaacatgatgagcctgaccgtgctgggcctgcggatgctgttcgccaaaaccgtggccgtgaacttcctgctgaccgccaagctgttcttcctcctcaccgcc

SEQ ID NO: 6435 - DNA, 2580 bp, synthetic construct
  source 1..2580: mol_type = other DNA
atggccttaccagtgaccgccttgctcctgccgctggccttgctgctccacgccgccaggccggaagtgcagctggttgaatctggcggaggactggttcagcctggcggatctctgagactgtcttgtgccgccagcggcttcagcttcagcgacttttggatgagctgggtccgacaggcccctggcaaaggacttgaatgggtcgccacaatcagccaggccggcagcgagaaggactacgtggactctgtgaagggcagattcaccatcagccgggacaacgccaagaagtccctgtacctccagatgaacagcctgagagccgaggacaccgccgtgtactattgtgcctctggcgtgtacagcttcgactacagaggccagggcaccctggtcacagtctcttctggtaccggcggaggcggatctggcggcggaggtagcggtggcggaggatctgaattcgacatcgtgctgacacagacaccagccacactgagcgtgacacctggcgattctgtgtccctgagctgtagagccagccagagcatcagcaacaacctgcactggtatcagcagaagtcccacgagagccccagactgctgattaagaacgccagccagtctatcagcggcatccccagcaagtttagcggctctggcagcggcaccgacttcaccctgagaatcaacagcgtggaaaccgaggacttcgggatgtacttctgccagcagagcaatagctggccctacacatttggctccggcaccaagctggaaatcaaactcgaggacctgaagaacgtgttcccacctgaggtggccgtgttcgagcctagcgaggccgagatcagccacacccagaaagccaccctcgtgtgcctggctaccggcttctaccccgaccatgtggaactgtcttggtgggtcaacggcaaagaggtgcacagcggcgtgtgtaccgacccccagccactgaaagaacagcccgccctgaacgacagccggtactgcctgagcagcagactgagagtgtccgccaccttctggcagaacccccggaaccacttcagatgccaggtgcagttctacggcctgagcgagaacgacgagtggacccaggacagagccaagcccgtgacccagatcgtgtctgccgaagcctggggcagagccgatgatgtgattaagatccactggcaggaaaagaagtccaacaccatcctgggcagccaggaaggcaacaccatgaagaccaacgacacctacatgaagttcagctggctgaccgtgcccgagaagtccctggacaaagaacacagatgcatcgtgcggcacgaaaacaacaagaacggcgtggaccaggaaatcatcttcccacccatcaagaccgatgtgattacaatggaccccaaggacaactgctccaaggacgccaacgataccctgctgctccagctgaccaacaccagcgcctactacatgtacttgttgctgctgctgaagtccgtggtgtacttcgccatcatcacatgctgcctgctgatggctatggtcaagcggaaggacagccggggaagggccaagcgatctggatctggagcaacaaacttctcactactcaaacaagcaggtgacgtggaggagaatcccgggcctactagtatggactggatttggcgcatccttttccttgtcggcgctgctaccggcgcgcattccttcgaacaagtgaagctgcaacagagcggacccgagctggttaagccaggcgcttccgtgaagattagctgcaaggccagcggctacagcttcaccggctactacatgcactgggtcaagcagagccacggcaacatcctggactggatcggctacatctacccctacaacggcgtgtccagctacaaccagaagttcaagggcaaagccactctgaccgtggacaagagcagcagcaccgcctacatggaactgagaagcctgaccagcgaggacagcgccgtgtactattgtgccagagagcggggcctgtaccagctcagagcaatggattattggggccagggcaccagcgtgaccgtttcttctacgcgtatccagaaccctgatcctgccgtgtaccagctgcgggatagcaagagcagcgacaagagcgtgtgtctgttcaccgacttcgacagccagaccaacgtgtcccagagcaaggactccgacgtgtacatcaccgataagtgcgtgctggacatgcggagcatggacttcaagagcaactccgccgtggcctggtccaacaagtccgatttcgcctgcgccaacgccttcaacaacagcattatccccgaggacacattcttcccaagccccgagagcagcgactccaccgaccacgtgaagcccaaagagacagagaacaccaagcagcccagcaagagctgccacaagcccaaggccatcgtgcacaccgagaaagtgaacatgatgagcctgaccgtgctgggcctgcggatgctgttcgccaaaaccgtggccgtgaacttcctgctgaccgccaagctgttcttcctcctcaccgcc

SEQ ID NO: 6436 - DNA, 2553 bp, synthetic construct
  source 1..2553: mol_type = other DNA
atggccttaccagtgaccgccttgctcctgccgctggccttgctgctccacgccgccaggccggaagtgcagctggttgaatctggcggaggactggttcagcctggcggatctctgagactgtcttgtgccgccagcggcttcagcttcagcgacttttggatgagctgggtccgacaggcccctggcaaaggacttgaatgggtcgccacaatcagccaggccggcagcgagaaggactacgtggactctgtgaagggcagattcaccatcagccgggacaacgccaagaagtccctgtacctccagatgaacagcctgagagccgaggacaccgccgtgtactattgtgcctctggcgtgtacagcttcgactacagaggccagggcaccctggtcacagtctcttctggtaccggcggaggcggatctggcggcggaggtagcggtggcggaggatctgaattcgacatcgtgatgacacagacccctgccatcatgagcgcctctccaggccagaaagtgaccatcacatgtagcgccagcagcagcgtgaactacatgcactggtatcagcagaagctgggcagcagccccaagctgtggatctacgataccagcaaactggcccctggcgtgccagccagattttctggttctggcagcggcaccagctacagcctgacaatcagcagcatggaagccgaggatgccgccagctacttctgccatcagtggtctagctacccctacacctttggctccggcaccaagctggaaatcaaactcgaggacctgaagaacgtgttcccacctgaggtggccgtgttcgagcctagcgaggccgagatcagccacacccagaaagccaccctcgtgtgcctggctaccggcttctaccccgaccatgtggaactgtcttggtgggtcaacggcaaagaggtgcacagcggcgtgtgtaccgacccccagccactgaaagaacagcccgccctgaacgacagccggtactgcctgagcagcagactgagagtgtccgccaccttctggcagaacccccggaaccacttcagatgccaggtgcagttctacggcctgagcgagaacgacgagtggacccaggacagagccaagcccgtgacccagatcgtgtctgccgaagcctggggcagagccgatgatgtgattaagatccactggcaggaaaagaagtccaacaccatcctgggcagccaggaaggcaacaccatgaagaccaacgacacctacatgaagttcagctggctgaccgtgcccgagaagtccctggacaaagaacacagatgcatcgtgcggcacgaaaacaacaagaacggcgtggaccaggaaatcatcttcccacccatcaagaccgatgtgattacaatggaccccaaggacaactgctccaaggacgccaacgataccctgctgctccagctgaccaacaccagcgcctactacatgtacttgttgctgctgctgaagtccgtggtgtacttcgccatcatcacatgctgcctgctgatggctatggtcaagcggaaggacagccggggaagggccaagcgatctggatctggagcaacaaacttctcactactcaaacaagcaggtgacgtggaggagaatcccgggcctactagtatggactggatttggcgcatccttttccttgtcggcgctgctaccggcgcgcattccttcgaagaagttcagctccaagagtctggccccgacctggtcaagcctagccaaagcctgagcctgacctgtaccgtgaccggctacagcatcacaagcggctatggatggcactggatcagacagttccccggcaacaaactggaatggatgggctacatccactacagcggcagcaccacctacaatcccagcctgaagtcccggatcagcatcagcagagacaccagcaagaaccagttcttcctgcaactgaacagcgtgaccaccgaggacaccgccacctactattgtgctcggagcctgagatattggggccagggcacaaccctgaccgtgtcatctacgcgtatccagaaccctgatcctgccgtgtaccagctgcgggatagcaagagcagcgacaagagcgtgtgtctgttcaccgacttcgacagccagaccaacgtgtcccagagcaaggactccgacgtgtacatcaccgataagtgcgtgctggacatgcggagcatggacttcaagagcaactccgccgtggcctggtccaacaagtccgatttcgcctgcgccaacgccttcaacaacagcattatccccgaggacacattcttcccaagccccgagagcagcgactccaccgaccacgtgaagcccaaagagacagagaacaccaagcagcccagcaagagctgccacaagcccaaggccatcgtgcacaccgagaaagtgaacatgatgagcctgaccgtgctgggcctgcggatgctgttcgccaaaaccgtggccgtgaacttcctgctgaccgccaagctgttcttcctcctcaccgcc

SEQ ID NO: 6437 - DNA, 2562 bp, synthetic construct
  source 1..2562: mol_type = other DNA
atggccttaccagtgaccgccttgctcctgccgctggccttgctgctccacgccgccaggccggaagtgcagctggttgaatctggcggaggactggttcagcctggcggatctctgagactgtcttgtgccgccagcggcttcagcttcagcgacttttggatgagctgggtccgacaggcccctggcaaaggacttgaatgggtcgccacaatcagccaggccggcagcgagaaggactacgtggactctgtgaagggcagattcaccatcagccgggacaacgccaagaagtccctgtacctccagatgaacagcctgagagccgaggacaccgccgtgtactattgtgcctctggcgtgtacagcttcgactacagaggccagggcaccctggtcacagtctcttctggtaccggcggaggcggatctggcggcggaggtagcggtggcggaggatctgaattcgacatccagatgacacagagccctagcagcctgtctgccagcgtgggagacagagtgaccatcacctgtagcgccaccagcagcatcagctacatgcactggtatcagcagaagcccggcaaggcccctaaaggctggatctacgataccagcaaactggcccacggcgtgcccagcagattttctggttctggcagcggcaccgacttcaccctgacaatatctagcctccagcctgaggacttcgccacctactactgccaccagagaagaagctaccccttcaccttcggccagggcaccaaggtggaaatcaaactcgaggacctgaagaacgtgttcccacctgaggtggccgtgttcgagcctagcgaggccgagatcagccacacccagaaagccaccctcgtgtgcctggctaccggcttctaccccgaccatgtggaactgtcttggtgggtcaacggcaaagaggtgcacagcggcgtgtgtaccgacccccagccactgaaagaacagcccgccctgaacgacagccggtactgcctgagcagcagactgagagtgtccgccaccttctggcagaacccccggaaccacttcagatgccaggtgcagttctacggcctgagcgagaacgacgagtggacccaggacagagccaagcccgtgacccagatcgtgtctgccgaagcctggggcagagccgatgatgtgattaagatccactggcaggaaaagaagtccaacaccatcctgggcagccaggaaggcaacaccatgaagaccaacgacacctacatgaagttcagctggctgaccgtgcccgagaagtccctggacaaagaacacagatgcatcgtgcggcacgaaaacaacaagaacggcgtggaccaggaaatcatcttcccacccatcaagaccgatgtgattacaatggaccccaaggacaactgctccaaggacgccaacgataccctgctgctccagctgaccaacaccagcgcctactacatgtacttgttgctgctgctgaagtccgtggtgtacttcgccatcatcacatgctgcctgctgatggctatggtcaagcggaaggacagccggggaagggccaagcgatctggatctggagcaacaaacttctcactactcaaacaagcaggtgacgtggaggagaatcccgggcctactagtatggactggatttggcgcatccttttccttgtcggcgctgctaccggcgcgcattccttcgaagaagtgcaactggttcagagcggagccgaagtgaagaaacctggggcctctgtgaaggtgtcctgcaaggcttccggctacacctttaccaatttctggattcactgggtccgacaggctccaggccaaggactggaatggatcggagagatcgaccccagcgacagctacaccaactacaaccagaaattcaaaggccgggtcaccatcaccagagacaccagcacaagcaccgcctacctggaactgagcagcctgagaagcgaggacaccgccgtgtactactgcgccagggaaatcaccaccgtggattattggggccagggaaccctggtcaccgtgtcatctacgcgtatccagaaccctgatcctgccgtgtaccagctgcgggatagcaagagcagcgacaagagcgtgtgtctgttcaccgacttcgacagccagaccaacgtgtcccagagcaaggactccgacgtgtacatcaccgataagtgcgtgctggacatgcggagcatggacttcaagagcaactccgccgtggcctggtccaacaagtccgatttcgcctgcgccaacgccttcaacaacagcattatccccgaggacacattcttcccaagccccgagagcagcgactccaccgaccacgtgaagcccaaagagacagagaacaccaagcagcccagcaagagctgccacaagcccaaggccatcgtgcacaccgagaaagtgaacatgatgagcctgaccgtgctgggcctgcggatgctgttcgccaaaaccgtggccgtgaacttcctgctgaccgccaagctgttcttcctcctcaccgcc

SEQ ID NO: 6438 - DNA, 2583 bp, synthetic construct
  source 1..2583: mol_type = other DNA
atggccttaccagtgaccgccttgctcctgccgctggccttgctgctccacgccgccaggccggaagtgcagctggttgaatctggcggaggactggttcagcctggcggatctctgagactgtcttgtgccgccagcggcttcagcttcagcgacttttggatgagctgggtccgacaggcccctggcaaaggacttgaatgggtcgccacaatcagccaggccggcagcgagaaggactacgtggactctgtgaagggcagattcaccatcagccgggacaacgccaagaagtccctgtacctccagatgaacagcctgagagccgaggacaccgccgtgtactattgtgcctctggcgtgtacagcttcgactacagaggccagggcaccctggtcacagtctcttctggtaccggcggaggcggatctggcggcggaggtagcggtggcggaggatctgaattcgacatccagatgacacagagccctagcagcctgtctgccagcgtgggagacagagtgaccatcacatgcaaggccagccagggcttcaacaaatacgtggcctggtatcagcagaagcccggcaaggctcctaagctgctgatctactacaccagcacactccagcctggcgtgcccagcagattttctggctctggcagcggcagagactacaccctgacaatatccagcctccagccagaggacttcgccacctactactgtctccagtacggcaacctgctgtacgcctttggacagggcaccaaggtggaaatcaagagactcgaggacctgaagaacgtgttcccacctgaggtggccgtgttcgagcctagcgaggccgagatcagccacacccagaaagccaccctcgtgtgcctggctaccggcttctaccccgaccatgtggaactgtcttggtgggtcaacggcaaagaggtgcacagcggcgtgtgtaccgacccccagccactgaaagaacagcccgccctgaacgacagccggtactgcctgagcagcagactgagagtgtccgccaccttctggcagaacccccggaaccacttcagatgccaggtgcagttctacggcctgagcgagaacgacgagtggacccaggacagagccaagcccgtgacccagatcgtgtctgccgaagcctggggcagagccgatgatgtgattaagatccactggcaggaaaagaagtccaacaccatcctgggcagccaggaaggcaacaccatgaagaccaacgacacctacatgaagttcagctggctgaccgtgcccgagaagtccctggacaaagaacacagatgcatcgtgcggcacgaaaacaacaagaacggcgtggaccaggaaatcatcttcccacccatcaagaccgatgtgattacaatggaccccaaggacaactgctccaaggacgccaacgataccctgctgctccagctgaccaacaccagcgcctactacatgtacttgttgctgctgctgaagtccgtggtgtacttcgccatcatcacatgctgcctgctgatggctatggtcaagcggaaggacagccggggaagggccaagcgatctggatctggagcaacaaacttctcactactcaaacaagcaggtgacgtggaggagaatcccgggcctactagtatggactggatttggcgcatccttttccttgtcggcgctgctaccggcgcgcattccttcgaagaagttcagcttgtgcagagcggagccgaagtgaagaaacctggggcctctgtgaaggtgtcctgcaaagccagcggctacacctttaccagctactggatcggctgggtccgacaggctcctggacaaggactggaatggatcggcgacatctatcccggcggaggctacaccaactacaacgagaagttcaagggccgcgtgacaatcaccagagacacctctacaagcaccgcctacctggaactgagcagcctgagaagcgaggacaccgccgtgtactactgcgccagactggatggcagcagctacagaggcgctatggattcttggggccagggcacactggtcaccgtttcttctacgcgtatccagaaccctgatcctgccgtgtaccagctgcgggatagcaagagcagcgacaagagcgtgtgtctgttcaccgacttcgacagccagaccaacgtgtcccagagcaaggactccgacgtgtacatcaccgataagtgcgtgctggacatgcggagcatggacttcaagagcaactccgccgtggcctggtccaacaagtccgatttcgcctgcgccaacgccttcaacaacagcattatccccgaggacacattcttcccaagccccgagagcagcgactccaccgaccacgtgaagcccaaagagacagagaacaccaagcagcccagcaagagctgccacaagcccaaggccatcgtgcacaccgagaaagtgaacatgatgagcctgaccgtgctgggcctgcggatgctgttcgccaaaaccgtggccgtgaacttcctgctgaccgccaagctgttcttcctcctcaccgcc

SEQ ID NO: 6439 - DNA, 2571 bp, synthetic construct
  source 1..2571: mol_type = other DNA
atggccttaccagtgaccgccttgctcctgccgctggccttgctgctccacgccgccaggccggaagtgcagctggttgaatctggcggaggactggttcagcctggcggatctctgagactgtcttgtgccgccagcggcttcagcttcagcgacttttggatgagctgggtccgacaggcccctggcaaaggacttgaatgggtcgccacaatcagccaggccggcagcgagaaggactacgtggactctgtgaagggcagattcaccatcagccgggacaacgccaagaagtccctgtacctccagatgaacagcctgagagccgaggacaccgccgtgtactattgtgcctctggcgtgtacagcttcgactacagaggccagggcaccctggtcacagtctcttctggtaccggcggaggcggatctggcggcggaggtagcggtggcggaggatctgaattcgacatccagatgacacagagccctagcagcctgtctgccagcgtgggagacagagtgaccatcacctgtagagccagccaggacatccggtactacctgaactggtatcagcagaagcccggcaaggcccctaagctgctgatctatgtggcctccagcctccagagcggagtgccttctagattttctggcagcggctccggcaccgagtttaccctgacagtgtctagcttgcagcccgaggacttcgccacctactactgcctgcaagtgtacagcacccctcggacctttggacagggcaccaaggtggaaatcaaactcgaggacctgaagaacgtgttcccacctgaggtggccgtgttcgagcctagcgaggccgagatcagccacacccagaaagccaccctcgtgtgcctggctaccggcttctaccccgaccatgtggaactgtcttggtgggtcaacggcaaagaggtgcacagcggcgtgtgtaccgacccccagccactgaaagaacagcccgccctgaacgacagccggtactgcctgagcagcagactgagagtgtccgccaccttctggcagaacccccggaaccacttcagatgccaggtgcagttctacggcctgagcgagaacgacgagtggacccaggacagagccaagcccgtgacccagatcgtgtctgccgaagcctggggcagagccgatgatgtgattaagatccactggcaggaaaagaagtccaacaccatcctgggcagccaggaaggcaacaccatgaagaccaacgacacctacatgaagttcagctggctgaccgtgcccgagaagtccctggacaaagaacacagatgcatcgtgcggcacgaaaacaacaagaacggcgtggaccaggaaatcatcttcccacccatcaagaccgatgtgattacaatggaccccaaggacaactgctccaaggacgccaacgataccctgctgctccagctgaccaacaccagcgcctactacatgtacttgttgctgctgctgaagtccgtggtgtacttcgccatcatcacatgctgcctgctgatggctatggtcaagcggaaggacagccggggaagggccaagcgatctggatctggagcaacaaacttctcactactcaaacaagcaggtgacgtggaggagaatcccgggcctactagtatggactggatttggcgcatccttttccttgtcggcgctgctaccggcgcgcattccttcgaagaagtgcagcttgttgaatctggcggcggactggctaagcctggcggatctctgagactgtcttgtgccgccagcggcttccggttcaccttcaacaactactacatggactgggtccgacaggcccctggacaaggacttgaatgggtgtccagaatcagcagcagcggcgaccctacttggtacgccgattctgtgaagggcagattcaccatcagcagagagaacgccaagaacaccctgttcctccagatgaactccctgagagccgaggacaccgccgtgtactattgtgcctctctgaccaccggcagcgattcttggggacagggcgtgctggttaccgtgtcatctacgcgtatccagaaccctgatcctgccgtgtaccagctgcgggatagcaagagcagcgacaagagcgtgtgtctgttcaccgacttcgacagccagaccaacgtgtcccagagcaaggactccgacgtgtacatcaccgataagtgcgtgctggacatgcggagcatggacttcaagagcaactccgccgtggcctggtccaacaagtccgatttcgcctgcgccaacgccttcaacaacagcattatccccgaggacacattcttcccaagccccgagagcagcgactccaccgaccacgtgaagcccaaagagacagagaacaccaagcagcccagcaagagctgccacaagcccaaggccatcgtgcacaccgagaaagtgaacatgatgagcctgaccgtgctgggcctgcggatgctgttcgccaaaaccgtggccgtgaacttcctgctgaccgccaagctgttcttcctcctcaccgcc

SEQ ID NO: 6440 - DNA, 2574 bp, synthetic construct
  source 1..2574: mol_type = other DNA
atggccttaccagtgaccgccttgctcctgccgctggccttgctgctccacgccgccaggccggaagtgcagctggttgaatctggcggaggactggttcagcctggcggatctctgagactgtcttgtgccgccagcggcttcagcttcagcgacttttggatgagctgggtccgacaggcccctggcaaaggacttgaatgggtcgccacaatcagccaggccggcagcgagaaggactacgtggactctgtgaagggcagattcaccatcagccgggacaacgccaagaagtccctgtacctccagatgaacagcctgagagccgaggacaccgccgtgtactattgtgcctctggcgtgtacagcttcgactacagaggccagggcaccctggtcacagtctcttctggtaccggcggaggcggatctggcggcggaggtagcggtggcggaggatctgaattcgagatcgtgatgacacagagccccgccacactgagtgtgtctccaggcgaaagagccacactgtcctgtagagccagccagagcgtgtccagaaacctggcctggtatcagcagaagcctggacaggctccccggctgttgatctacggcgcttctacaagagccaccggcattcccgccagattttctggctctggcagcggcaccgagttcaccctgacaatcggaagcctccagagcgaggacttcgccgtgtactactgccagcagtacaagacctggcctcggacctttggacagggcaccaacgtggaaatcaaactcgaggacctgaagaacgtgttcccacctgaggtggccgtgttcgagcctagcgaggccgagatcagccacacccagaaagccaccctcgtgtgcctggctaccggcttctaccccgaccatgtggaactgtcttggtgggtcaacggcaaagaggtgcacagcggcgtgtgtaccgacccccagccactgaaagaacagcccgccctgaacgacagccggtactgcctgagcagcagactgagagtgtccgccaccttctggcagaacccccggaaccacttcagatgccaggtgcagttctacggcctgagcgagaacgacgagtggacccaggacagagccaagcccgtgacccagatcgtgtctgccgaagcctggggcagagccgatgatgtgattaagatccactggcaggaaaagaagtccaacaccatcctgggcagccaggaaggcaacaccatgaagaccaacgacacctacatgaagttcagctggctgaccgtgcccgagaagtccctggacaaagaacacagatgcatcgtgcggcacgaaaacaacaagaacggcgtggaccaggaaatcatcttcccacccatcaagaccgatgtgattacaatggaccccaaggacaactgctccaaggacgccaacgataccctgctgctccagctgaccaacaccagcgcctactacatgtacttgttgctgctgctgaagtccgtggtgtacttcgccatcatcacatgctgcctgctgatggctatggtcaagcggaaggacagccggggaagggccaagcgatctggatctggagcaacaaacttctcactactcaaacaagcaggtgacgtggaggagaatcccgggcctactagtatggactggatttggcgcatccttttccttgtcggcgctgctaccggcgcgcattccttcgaacaagttcagctgcaacaatggggagccggcctgctgaagcctagcgaaacactgtctctgacctgcgccgtgttcggcggctctttcagcggctactactggtcctggatcagacagcctcctggcaaaggactggaatggatcggcgagatcaaccaccggggcaacaccaacgacaaccccagcctgaaaagcagagtgaccatcagcgtggacaccagcaagaaccagttcgccctgaagctgagcagcgtgacagccgctgataccgccgtgtattattgcgccagagagcggggctacacctacggcaatttcgatcactggggccagggcaccctggtcacagtttcttctacgcgtatccagaaccctgatcctgccgtgtaccagctgcgggatagcaagagcagcgacaagagcgtgtgtctgttcaccgacttcgacagccagaccaacgtgtcccagagcaaggactccgacgtgtacatcaccgataagtgcgtgctggacatgcggagcatggacttcaagagcaactccgccgtggcctggtccaacaagtccgatttcgcctgcgccaacgccttcaacaacagcattatccccgaggacacattcttcccaagccccgagagcagcgactccaccgaccacgtgaagcccaaagagacagagaacaccaagcagcccagcaagagctgccacaagcccaaggccatcgtgcacaccgagaaagtgaacatgatgagcctgaccgtgctgggcctgcggatgctgttcgccaaaaccgtggccgtgaacttcctgctgaccgccaagctgttcttcctcctcaccgcc

SEQ ID NO: 6441 - DNA, 2577 bp, synthetic construct
  source 1..2577: mol_type = other DNA
atggccttaccagtgaccgccttgctcctgccgctggccttgctgctccacgccgccaggccggaagtgcagctggttgaatctggcggaggactggttcagcctggcggatctctgagactgtcttgtgccgccagcggcttcagcttcagcgacttttggatgagctgggtccgacaggcccctggcaaaggacttgaatgggtcgccacaatcagccaggccggcagcgagaaggactacgtggactctgtgaagggcagattcaccatcagccgggacaacgccaagaagtccctgtacctccagatgaacagcctgagagccgaggacaccgccgtgtactattgtgcctctggcgtgtacagcttcgactacagaggccagggcaccctggtcacagtctcttctggtaccggcggaggcggatctggcggcggaggtagcggtggcggaggatctgaattcgagatcgtgatgacccctagcagcgccacactgagtgtgtctccaggcgaaagagccacactgtcctgtagagccagccagagcgtgtccagaaacctggcctggtatcagcagaagcctggacaggctccccggctgttgatctacggcgcttctacaagagccaccggcattcccgccagattttctggctctggcagcggcaccgagttcaccctgacaatctctagcctccagagcgaggacttcgccgtgtactactgccaccagtacagcaactggatgtgcagcttcggccagggcaccaagctggaaatcaaactcgaggacctgaagaacgtgttcccacctgaggtggccgtgttcgagcctagcgaggccgagatcagccacacccagaaagccaccctcgtgtgcctggctaccggcttctaccccgaccatgtggaactgtcttggtgggtcaacggcaaagaggtgcacagcggcgtgtgtaccgacccccagccactgaaagaacagcccgccctgaacgacagccggtactgcctgagcagcagactgagagtgtccgccaccttctggcagaacccccggaaccacttcagatgccaggtgcagttctacggcctgagcgagaacgacgagtggacccaggacagagccaagcccgtgacccagatcgtgtctgccgaagcctggggcagagccgatgatgtgattaagatccactggcaggaaaagaagtccaacaccatcctgggcagccaggaaggcaacaccatgaagaccaacgacacctacatgaagttcagctggctgaccgtgcccgagaagtccctggacaaagaacacagatgcatcgtgcggcacgaaaacaacaagaacggcgtggaccaggaaatcatcttcccacccatcaagaccgatgtgattacaatggaccccaaggacaactgctccaaggacgccaacgataccctgctgctccagctgaccaacaccagcgcctactacatgtacttgttgctgctgctgaagtccgtggtgtacttcgccatcatcacatgctgcctgctgatggctatggtcaagcggaaggacagccggggaagggccaagcgatctggatctggagcaacaaacttctcactactcaaacaagcaggtgacgtggaggagaatcccgggcctactagtatggactggatttggcgcatccttttccttgtcggcgctgctaccggcgcgcattccttcgaagaagttcagctccttgagtcaggtggcggcctggttcaacctggcggatctctgagactgagctgtgccgccagcggcttcacctttagcagatacgccatgaactgggtccgacaggcccctggcaaaggactggaatgggtgtccggcatctctggaagcggcggcagaacctactacgccgattctgtgaagggcagattcaccatcagccgggacaacagcaagaacaccctgtacctccagatgaacagcctgagagccgaggacacagccgtgtattattgcgccaaggaccgggacttttggagcggcccttttgactattggggccagggaaccctggtcaccgttagctctacgcgtatccagaaccctgatcctgccgtgtaccagctgcgggatagcaagagcagcgacaagagcgtgtgtctgttcaccgacttcgacagccagaccaacgtgtcccagagcaaggactccgacgtgtacatcaccgataagtgcgtgctggacatgcggagcatggacttcaagagcaactccgccgtggcctggtccaacaagtccgatttcgcctgcgccaacgccttcaacaacagcattatccccgaggacacattcttcccaagccccgagagcagcgactccaccgaccacgtgaagcccaaagagacagagaacaccaagcagcccagcaagagctgccacaagcccaaggccatcgtgcacaccgagaaagtgaacatgatgagcctgaccgtgctgggcctgcggatgctgttcgccaaaaccgtggccgtgaacttcctgctgaccgccaagctgttcttcctcctcaccgcc

SEQ ID NO: 6442 - DNA, 2592 bp, synthetic construct
  source 1..2592: mol_type = other DNA
atggccttaccagtgaccgccttgctcctgccgctggccttgctgctccacgccgccaggccggaagtgcagctggttgaatctggcggaggactggttcagcctggcggatctctgagactgtcttgtgccgccagcggcttcagcttcagcgacttttggatgagctgggtccgacaggcccctggcaaaggacttgaatgggtcgccacaatcagccaggccggcagcgagaaggactacgtggactctgtgaagggcagattcaccatcagccgggacaacgccaagaagtccctgtacctccagatgaacagcctgagagccgaggacaccgccgtgtactattgtgcctctggcgtgtacagcttcgactacagaggccagggcaccctggtcacagtctcttctggtaccggcggaggcggatctggcggcggaggtagcggtggcggaggatctgaattcgacatccagatgacccagagccccagcagcctgtctgccagcgtgggcgacagagtgaccatcacatgcaaggccagcaagaacatcagaagctacctggcctggtatcagcagaagcccggcaaggcccccaagctgctgatctacagcggcagcacactgcacagcggcgtgcccagcagattttccggctctggcagcggcaccgacttcaccctgaccatctctagcctccagcccgaggacttcgccacctactactgccagcagcaccacgagtaccccctgacattcggccagggcaccaaggtggaaatcaagagactcgaggacctgaagaacgtgttcccacctgaggtggccgtgttcgagcctagcgaggccgagatcagccacacccagaaagccaccctcgtgtgcctggctaccggcttctaccccgaccatgtggaactgtcttggtgggtcaacggcaaagaggtgcacagcggcgtgtgtaccgacccccagccactgaaagaacagcccgccctgaacgacagccggtactgcctgagcagcagactgagagtgtccgccaccttctggcagaacccccggaaccacttcagatgccaggtgcagttctacggcctgagcgagaacgacgagtggacccaggacagagccaagcccgtgacccagatcgtgtctgccgaagcctggggcagagccgatgatgtgattaagatccactggcaggaaaagaagtccaacaccatcctgggcagccaggaaggcaacaccatgaagaccaacgacacctacatgaagttcagctggctgaccgtgcccgagaagtccctggacaaagaacacagatgcatcgtgcggcacgaaaacaacaagaacggcgtggaccaggaaatcatcttcccacccatcaagaccgatgtgattacaatggaccccaaggacaactgctccaaggacgccaacgataccctgctgctccagctgaccaacaccagcgcctactacatgtacttgttgctgctgctgaagtccgtggtgtacttcgccatcatcacatgctgcctgctgatggctatggtcaagcggaaggacagccggggaagggccaagcgatctggatctggagcaacaaacttctcactactcaaacaagcaggtgacgtggaggagaatcccgggcctactagtatggactggatttggcgcatccttttccttgtcggcgctgctaccggcgcgcattccttcgaacaggtgcaactccaggaatctggccccggactcgtgaagcccagcgagacactgagcctgacctgtaccgtgtccggctacaccatcaccagcggctacgactggtcctggatcagacagcctcctggcaagggcctggaatggatcggctacatcaactacggcggctccaccaactacaagcccagcctgggaagccgcgtgacaatcagcgtggacacctccaagaaccagttcagcctgaagctgagcagcgtgacagccgccgataccgccgtgtactactgcgcccggtacaacgagtacaagagctacatctacgattggtacttcgacttctggggccagggaaccctcgtgaccgtgtctagtacgcgtatccagaaccctgatcctgccgtgtaccagctgcgggatagcaagagcagcgacaagagcgtgtgtctgttcaccgacttcgacagccagaccaacgtgtcccagagcaaggactccgacgtgtacatcaccgataagtgcgtgctggacatgcggagcatggacttcaagagcaactccgccgtggcctggtccaacaagtccgatttcgcctgcgccaacgccttcaacaacagcattatccccgaggacacattcttcccaagccccgagagcagcgactccaccgaccacgtgaagcccaaagagacagagaacaccaagcagcccagcaagagctgccacaagcccaaggccatcgtgcacaccgagaaagtgaacatgatgagcctgaccgtgctgggcctgcggatgctgttcgccaaaaccgtggccgtgaacttcctgctgaccgccaagctgttcttcctcctcaccgcc

SEQ ID NO: 6443 - DNA, 2598 bp, synthetic construct
  source 1..2598: mol_type = other DNA
atggccttaccagtgaccgccttgctcctgccgctggccttgctgctccacgccgccaggccggaagtgcagctggttgaatctggcggaggactggttcagcctggcggatctctgagactgtcttgtgccgccagcggcttcagcttcagcgacttttggatgagctgggtccgacaggcccctggcaaaggacttgaatgggtcgccacaatcagccaggccggcagcgagaaggactacgtggactctgtgaagggcagattcaccatcagccgggacaacgccaagaagtccctgtacctccagatgaacagcctgagagccgaggacaccgccgtgtactattgtgcctctggcgtgtacagcttcgactacagaggccagggcaccctggtcacagtctcttctggtaccggcggaggcggatctggcggcggaggtagcggtggcggaggatctgaattccagtctgtggtcacacagcctccatccgtgtctgctgcccctggacagaaagtgaccatctcctgtagcggcagcagcagcaacatcggcaacaactacgtgtcctggtatcagcagctccccggcacagctcccaaactgctgatctacgacaacaacaagcggcccagcggcatccccgatagattttctggcagcaagagcggcaccagcgccacactgggaattaccggacttcagacaggcgacgaggccgactactactgtggcacatgggatggcagcctgtacaccatgcttttcggcggaggcaccaagctgacagtgcttctcgaggacctgaagaacgtgttcccacctgaggtggccgtgttcgagcctagcgaggccgagatcagccacacccagaaagccaccctcgtgtgcctggctaccggcttctaccccgaccatgtggaactgtcttggtgggtcaacggcaaagaggtgcacagcggcgtgtgtaccgacccccagccactgaaagaacagcccgccctgaacgacagccggtactgcctgagcagcagactgagagtgtccgccaccttctggcagaacccccggaaccacttcagatgccaggtgcagttctacggcctgagcgagaacgacgagtggacccaggacagagccaagcccgtgacccagatcgtgtctgccgaagcctggggcagagccgatgatgtgattaagatccactggcaggaaaagaagtccaacaccatcctgggcagccaggaaggcaacaccatgaagaccaacgacacctacatgaagttcagctggctgaccgtgcccgagaagtccctggacaaagaacacagatgcatcgtgcggcacgaaaacaacaagaacggcgtggaccaggaaatcatcttcccacccatcaagaccgatgtgattacaatggaccccaaggacaactgctccaaggacgccaacgataccctgctgctccagctgaccaacaccagcgcctactacatgtacttgttgctgctgctgaagtccgtggtgtacttcgccatcatcacatgctgcctgctgatggctatggtcaagcggaaggacagccggggaagggccaagcgatctggatctggagcaacaaacttctcactactcaaacaagcaggtgacgtggaggagaatcccgggcctactagtatggactggatttggcgcatccttttccttgtcggcgctgctaccggcgcgcattccttcgaagaagtgcaactggtggaatctggcggcggactggttaagcctggcggatctctgagactgtcttgtgccgccagcggcttcaccttcagcaatgcctggatgagctgggttcgacaggcccctggaaaaggactggaatgggtcggattcatccggtccaaagcctacggcggcaccacagaatatgccgcctctgtgaagggcagattcaccatcagccgggacgacagcaagtctatcgcctacctccagatgaacaacctgaaaaccgaggacaccgccgtgtactactgcgccagagatggcctgtacagcagctcttggtacgacagcgattactggggccagggcacactggtcacagtgtcatctacgcgtatccagaaccctgatcctgccgtgtaccagctgcgggatagcaagagcagcgacaagagcgtgtgtctgttcaccgacttcgacagccagaccaacgtgtcccagagcaaggactccgacgtgtacatcaccgataagtgcgtgctggacatgcggagcatggacttcaagagcaactccgccgtggcctggtccaacaagtccgatttcgcctgcgccaacgccttcaacaacagcattatccccgaggacacattcttcccaagccccgagagcagcgactccaccgaccacgtgaagcccaaagagacagagaacaccaagcagcccagcaagagctgccacaagcccaaggccatcgtgcacaccgagaaagtgaacatgatgagcctgaccgtgctgggcctgcggatgctgttcgccaaaaccgtggccgtgaacttcctgctgaccgccaagctgttcttcctcctcaccgcc

SEQ ID NO: 6444 - DNA, 2613 bp, synthetic construct
  source 1..2613: mol_type = other DNA
atggccttaccagtgaccgccttgctcctgccgctggccttgctgctccacgccgccaggccggaagtgcagctggttgaatctggcggaggactggttcagcctggcggatctctgagactgtcttgtgccgccagcggcttcagcttcagcgacttttggatgagctgggtccgacaggcccctggcaaaggacttgaatgggtcgccacaatcagccaggccggcagcgagaaggactacgtggactctgtgaagggcagattcaccatcagccgggacaacgccaagaagtccctgtacctccagatgaacagcctgagagccgaggacaccgccgtgtactattgtgcctctggcgtgtacagcttcgactacagaggccagggcaccctggtcacagtctcttctggtaccggcggaggcggatctggcggcggaggtagcggtggcggaggatctgaattccagtctgtgctgacacagcctcctagtgtgtctggcgctcctggacagagagtgaccatctcttgtaccggcagcagcagcaatatcggagccggctatgacgtgcactggtatcagcagctccctggcacagcccctaaactgctgatcttcggcaacagcaacagacccagcggcgtgcccgatagattcagcggctttaagagcggcacaagcgccagcctggctatcactggactgcaagccgaggacgaggccgactacttctgccagagctacgatagcagcctgagcggcagcggagtgtttggcacaggcaccaaagtgacagtgcttggcctcgaggacctgaagaacgtgttcccacctgaggtggccgtgttcgagcctagcgaggccgagatcagccacacccagaaagccaccctcgtgtgcctggctaccggcttctaccccgaccatgtggaactgtcttggtgggtcaacggcaaagaggtgcacagcggcgtgtgtaccgacccccagccactgaaagaacagcccgccctgaacgacagccggtactgcctgagcagcagactgagagtgtccgccaccttctggcagaacccccggaaccacttcagatgccaggtgcagttctacggcctgagcgagaacgacgagtggacccaggacagagccaagcccgtgacccagatcgtgtctgccgaagcctggggcagagccgatgatgtgattaagatccactggcaggaaaagaagtccaacaccatcctgggcagccaggaaggcaacaccatgaagaccaacgacacctacatgaagttcagctggctgaccgtgcccgagaagtccctggacaaagaacacagatgcatcgtgcggcacgaaaacaacaagaacggcgtggaccaggaaatcatcttcccacccatcaagaccgatgtgattacaatggaccccaaggacaactgctccaaggacgccaacgataccctgctgctccagctgaccaacaccagcgcctactacatgtacttgttgctgctgctgaagtccgtggtgtacttcgccatcatcacatgctgcctgctgatggctatggtcaagcggaaggacagccggggaagggccaagcgatctggatctggagcaacaaacttctcactactcaaacaagcaggtgacgtggaggagaatcccgggcctactagtatggactggatttggcgcatccttttccttgtcggcgctgctaccggcgcgcattccttcgaacaaatgcaactggttcaaagcggcggtggcctggtgcaacctggaagaagtctgagactgagctgtgccgccagcggcttcaccttcgatgattacgccatgcactgggtccgacaggcccctggaaaaggactggaatgggtgtccggcatctcctggaatagcggctctatcggctacgccgacagcgtgaagggcagattcaccatcagccgggacaacgccaagaacagcctgtacctccagatgaactccctgagagccgaggatacagccctgtactactgcgccaaggacatccacagcggcagctactacggcctgctgtactacgctatggacgtgtggggccagggcacaaccgtgacagtttcttctacgcgtatccagaaccctgatcctgccgtgtaccagctgcgggatagcaagagcagcgacaagagcgtgtgtctgttcaccgacttcgacagccagaccaacgtgtcccagagcaaggactccgacgtgtacatcaccgataagtgcgtgctggacatgcggagcatggacttcaagagcaactccgccgtggcctggtccaacaagtccgatttcgcctgcgccaacgccttcaacaacagcattatccccgaggacacattcttcccaagccccgagagcagcgactccaccgaccacgtgaagcccaaagagacagagaacaccaagcagcccagcaagagctgccacaagcccaaggccatcgtgcacaccgagaaagtgaacatgatgagcctgaccgtgctgggcctgcggatgctgttcgccaaaaccgtggccgtgaacttcctgctgaccgccaagctgttcttcctcctcaccgcc

SEQ ID NO: 6445 - DNA, 2613 bp, synthetic construct
  source 1..2613: mol_type = other DNA
atggccttaccagtgaccgccttgctcctgccgctggccttgctgctccacgccgccaggccggaagtgcagctggttgaatctggcggaggactggttcagcctggcggatctctgagactgtcttgtgccgccagcggcttcagcttcagcgacttttggatgagctgggtccgacaggcccctggcaaaggacttgaatgggtcgccacaatcagccaggccggcagcgagaaggactacgtggactctgtgaagggcagattcaccatcagccgggacaacgccaagaagtccctgtacctccagatgaacagcctgagagccgaggacaccgccgtgtactattgtgcctctggcgtgtacagcttcgactacagaggccagggcaccctggtcacagtctcttctggtaccggcggaggcggatctggcggcggaggtagcggtggcggaggatctgaattcctgcctgttctgacacagcctccatctgcctctggcacacctggacagagagtgaccatcagctgtagcggcagaagcagcaacatcggcagcaacagcgtgaactggtacagacagcttcctggcgctgcccctaagctgctgatctacagcaacaaccagcggcctcctggcgtgccagtcagattttctggcagcaagagcggcacaagcgccagcctggctatttctggactccagtctgaggacgaggccacctactactgtgccacctgggacgacaacctgaacgtgcactacgtgttcggcaccggcaccaaagtgacagtgcttggaagtagactcgaggacctgaagaacgtgttcccacctgaggtggccgtgttcgagcctagcgaggccgagatcagccacacccagaaagccaccctcgtgtgcctggctaccggcttctaccccgaccatgtggaactgtcttggtgggtcaacggcaaagaggtgcacagcggcgtgtgtaccgacccccagccactgaaagaacagcccgccctgaacgacagccggtactgcctgagcagcagactgagagtgtccgccaccttctggcagaacccccggaaccacttcagatgccaggtgcagttctacggcctgagcgagaacgacgagtggacccaggacagagccaagcccgtgacccagatcgtgtctgccgaagcctggggcagagccgatgatgtgattaagatccactggcaggaaaagaagtccaacaccatcctgggcagccaggaaggcaacaccatgaagaccaacgacacctacatgaagttcagctggctgaccgtgcccgagaagtccctggacaaagaacacagatgcatcgtgcggcacgaaaacaacaagaacggcgtggaccaggaaatcatcttcccacccatcaagaccgatgtgattacaatggaccccaaggacaactgctccaaggacgccaacgataccctgctgctccagctgaccaacaccagcgcctactacatgtacttgttgctgctgctgaagtccgtggtgtacttcgccatcatcacatgctgcctgctgatggctatggtcaagcggaaggacagccggggaagggccaagcgatctggatctggagcaacaaacttctcactactcaaacaagcaggtgacgtggaggagaatcccgggcctactagtatggactggatttggcgcatccttttccttgtcggcgctgctaccggcgcgcattccttcgaacttgaaatggctcaggtgcagctggtgcagagcggagccgaagtgaagaaacctggcagcagcgtgaaggtgtcctgcaaagcttctggcggcaccttcagcagctacgccatctcttgggttcgacaggcccctggacaaggactggaatggatgggcagaatcatccccatcctgggaatcgccaactacgcccagaaattccagggcagagtgacaatcaccgccgacaagagcaccagcaccgcctacatggaactgagcagcctgagaagcgaggacaccgccgtgtactattgtgcaagaggcggctactacagccacgacatgtggagcgaagattggggccagggcacactggtcacagtgtcatctacgcgtatccagaaccctgatcctgccgtgtaccagctgcgggatagcaagagcagcgacaagagcgtgtgtctgttcaccgacttcgacagccagaccaacgtgtcccagagcaaggactccgacgtgtacatcaccgataagtgcgtgctggacatgcggagcatggacttcaagagcaactccgccgtggcctggtccaacaagtccgatttcgcctgcgccaacgccttcaacaacagcattatccccgaggacacattcttcccaagccccgagagcagcgactccaccgaccacgtgaagcccaaagagacagagaacaccaagcagcccagcaagagctgccacaagcccaaggccatcgtgcacaccgagaaagtgaacatgatgagcctgaccgtgctgggcctgcggatgctgttcgccaaaaccgtggccgtgaacttcctgctgaccgccaagctgttcttcctcctcaccgcc

SEQ ID NO: 6446 - DNA, 2595 bp, synthetic construct
  source 1..2595: mol_type = other DNA
atggccttaccagtgaccgccttgctcctgccgctggccttgctgctccacgccgccaggccggaagtgcagctggttgaatctggcggaggactggttcagcctggcggatctctgagactgtcttgtgccgccagcggcttcagcttcagcgacttttggatgagctgggtccgacaggcccctggcaaaggacttgaatgggtcgccacaatcagccaggccggcagcgagaaggactacgtggactctgtgaagggcagattcaccatcagccgggacaacgccaagaagtccctgtacctccagatgaacagcctgagagccgaggacaccgccgtgtactattgtgcctctggcgtgtacagcttcgactacagaggccagggcaccctggtcacagtctcttctggtaccggcggaggcggatctggcggcggaggtagcggtggcggaggatctgaattcgacttcgtgatgacacagagccctgatagcctggccgtgtctctcggcgagcgagtgaccatgagctgcaagtctagccagagcctgctgaacagcggcaaccagaagaactacctgacctggtatcagcagaagcccggccagcctcctaagctgctgatctactgggccagcaccagagaaagcggcgtgcccgatagattttctggctctggcagcggcaccgacttcaccctgacaatttctagcctgcaagccgaggacgtggccgtgtactactgccagaacgactacagctacccctacaccttcggccagggcaccaagctggaaatcaaactcgaggacctgaagaacgtgttcccacctgaggtggccgtgttcgagcctagcgaggccgagatcagccacacccagaaagccaccctcgtgtgcctggctaccggcttctaccccgaccatgtggaactgtcttggtgggtcaacggcaaagaggtgcacagcggcgtgtgtaccgacccccagccactgaaagaacagcccgccctgaacgacagccggtactgcctgagcagcagactgagagtgtccgccaccttctggcagaacccccggaaccacttcagatgccaggtgcagttctacggcctgagcgagaacgacgagtggacccaggacagagccaagcccgtgacccagatcgtgtctgccgaagcctggggcagagccgatgatgtgattaagatccactggcaggaaaagaagtccaacaccatcctgggcagccaggaaggcaacaccatgaagaccaacgacacctacatgaagttcagctggctgaccgtgcccgagaagtccctggacaaagaacacagatgcatcgtgcggcacgaaaacaacaagaacggcgtggaccaggaaatcatcttcccacccatcaagaccgatgtgattacaatggaccccaaggacaactgctccaaggacgccaacgataccctgctgctccagctgaccaacaccagcgcctactacatgtacttgttgctgctgctgaagtccgtggtgtacttcgccatcatcacatgctgcctgctgatggctatggtcaagcggaaggacagccggggaagggccaagcgatctggatctggagcaacaaacttctcactactcaaacaagcaggtgacgtggaggagaatcccgggcctactagtatggactggatttggcgcatccttttccttgtcggcgctgctaccggcgcgcattccttcgaagaagtgcaactggttcagagcggagccgagctgaagaaacctggggccagcgtgaaggtgtcctgtaaagccagcggctacacctttaccgactactacatgaaatgggtccgacaggccccaggccagggactcgaatggatcggcgatattatccccagcaacggggccaccttctacaaccagaaattcaagggccgcgtgaccatcaccgtggacaagagcacaagcaccgcctacatggaactgagcagcctgagaagcgaggacaccgccgtgtattattgcgccagaagccatctgctgcgggccagttggttcgcctattggggacagggaaccctggtcaccgttagctctacgcgtatccagaaccctgatcctgccgtgtaccagctgcgggatagcaagagcagcgacaagagcgtgtgtctgttcaccgacttcgacagccagaccaacgtgtcccagagcaaggactccgacgtgtacatcaccgataagtgcgtgctggacatgcggagcatggacttcaagagcaactccgccgtggcctggtccaacaagtccgatttcgcctgcgccaacgccttcaacaacagcattatccccgaggacacattcttcccaagccccgagagcagcgactccaccgaccacgtgaagcccaaagagacagagaacaccaagcagcccagcaagagctgccacaagcccaaggccatcgtgcacaccgagaaagtgaacatgatgagcctgaccgtgctgggcctgcggatgctgttcgccaaaaccgtggccgtgaacttcctgctgaccgccaagctgttcttcctcctcaccgcc

SEQ ID NO: 6447 - DNA, 2595 bp, synthetic construct
  source 1..2595: mol_type = other DNA
atggccttaccagtgaccgccttgctcctgccgctggccttgctgctccacgccgccaggccggaagtgcagctggttgaatctggcggaggactggttcagcctggcggatctctgagactgtcttgtgccgccagcggcttcagcttcagcgacttttggatgagctgggtccgacaggcccctggcaaaggacttgaatgggtcgccacaatcagccaggccggcagcgagaaggactacgtggactctgtgaagggcagattcaccatcagccgggacaacgccaagaagtccctgtacctccagatgaacagcctgagagccgaggacaccgccgtgtactattgtgcctctggcgtgtacagcttcgactacagaggccagggcaccctggtcacagtctcttctggtaccggcggaggcggatctggcggcggaggtagcggtggcggaggatctgaattcgacttcgtgatgacacagagccctgatagcctggccgtgtctctcggcgagcgagtgaccatgagctgcaagtctagccagagcctgctgaacagcggcaaccagaagaactacctgacctggtatcagcagaagcccggccagcctcctaagctgctgatctactgggccagcaccagagaaagcggcgtgcccgatagattttctggctctggcagcggcaccgacttcaccctgacaatttctagcctgcaagccgaggacgtggccgtgtactactgccagaacgactacagctacccctacaccttcggccagggcaccaagctggaaatcaaactcgaggacctgaagaacgtgttcccacctgaggtggccgtgttcgagcctagcgaggccgagatcagccacacccagaaagccaccctcgtgtgcctggctaccggcttctaccccgaccatgtggaactgtcttggtgggtcaacggcaaagaggtgcacagcggcgtgtgtaccgacccccagccactgaaagaacagcccgccctgaacgacagccggtactgcctgagcagcagactgagagtgtccgccaccttctggcagaacccccggaaccacttcagatgccaggtgcagttctacggcctgagcgagaacgacgagtggacccaggacagagccaagcccgtgacccagatcgtgtctgccgaagcctggggcagagccgatgatgtgattaagatccactggcaggaaaagaagtccaacaccatcctgggcagccaggaaggcaacaccatgaagaccaacgacacctacatgaagttcagctggctgaccgtgcccgagaagtccctggacaaagaacacagatgcatcgtgcggcacgaaaacaacaagaacggcgtggaccaggaaatcatcttcccacccatcaagaccgatgtgattacaatggaccccaaggacaactgctccaaggacgccaacgataccctgctgctccagctgaccaacaccagcgcctactacatgtacttgttgctgctgctgaagtccgtggtgtacttcgccatcatcacatgctgcctgctgatggctatggtcaagcggaaggacagccggggaagggccaagcgatctggatctggagcaacaaacttctcactactcaaacaagcaggtgacgtggaggagaatcccgggcctactagtatggactggatttggcgcatccttttccttgtcggcgctgctaccggcgcgcattccttcgaacaagtgcaactggttcagagcggagccgagctgaagaaacctggggccagcgtgaaggtgtcctgtaaagccagcggctacacctttaccgactactacatgaaatgggtccgacaggccccaggccagggactcgaatggatcggcgatattatccccagcaacggggccaccttctacaaccagaaattcaagggccgcgtgaccatcaccgtggacaagagcacaagcaccgcctacatggaactgagcagcctgagaagcgaggacaccgccgtgtattattgcgccagaagccatctgctgcgggccagttggttcgcctattggggacagggaaccctggtcaccgttagctctacgcgtatccagaaccctgatcctgccgtgtaccagctgcgggatagcaagagcagcgacaagagcgtgtgtctgttcaccgacttcgacagccagaccaacgtgtcccagagcaaggactccgacgtgtacatcaccgataagtgcgtgctggacatgcggagcatggacttcaagagcaactccgccgtggcctggtccaacaagtccgatttcgcctgcgccaacgccttcaacaacagcattatccccgaggacacattcttcccaagccccgagagcagcgactccaccgaccacgtgaagcccaaagagacagagaacaccaagcagcccagcaagagctgccacaagcccaaggccatcgtgcacaccgagaaagtgaacatgatgagcctgaccgtgctgggcctgcggatgctgttcgccaaaaccgtggccgtgaacttcctgctgaccgccaagctgttcttcctcctcaccgcc

SEQ ID NO: 6448 - DNA, 2565 bp, synthetic construct
  source 1..2565: mol_type = other DNA
atggccttaccagtgaccgccttgctcctgccgctggccttgctgctccacgccgccaggccggaagtgcagctggttgaatctggcggaggactggttcagcctggcggatctctgagactgtcttgtgccgccagcggcttcagcttcagcgacttttggatgagctgggtccgacaggcccctggcaaaggacttgaatgggtcgccacaatcagccaggccggcagcgagaaggactacgtggactctgtgaagggcagattcaccatcagccgggacaacgccaagaagtccctgtacctccagatgaacagcctgagagccgaggacaccgccgtgtactattgtgcctctggcgtgtacagcttcgactacagaggccagggcaccctggtcacagtctcttctggtaccggcggaggcggatctggcggcggaggtagcggtggcggaggatctgaattcgacgtgcagatcacacagagccctagctacctggctgcctctcctggcgagacaatcaccatcaactgtcgggccagcaagagcatcagcaaggacctggcctggtatcaagagaagcccggcaagaccaacaagctgctgatctacagcggcagcacactccagtctggcatccccagcagattttccggctctggcagcggcaccgatttcaccctgaccataagcagcctggaacctgaggacttcgccatgtactactgccagcagcacaacaagtacccctacacctttggcggaggcaccaagctggaaatcaagagactcgaggacctgaagaacgtgttcccacctgaggtggccgtgttcgagcctagcgaggccgagatcagccacacccagaaagccaccctcgtgtgcctggctaccggcttctaccccgaccatgtggaactgtcttggtgggtcaacggcaaagaggtgcacagcggcgtgtgtaccgacccccagccactgaaagaacagcccgccctgaacgacagccggtactgcctgagcagcagactgagagtgtccgccaccttctggcagaacccccggaaccacttcagatgccaggtgcagttctacggcctgagcgagaacgacgagtggacccaggacagagccaagcccgtgacccagatcgtgtctgccgaagcctggggcagagccgatgatgtgattaagatccactggcaggaaaagaagtccaacaccatcctgggcagccaggaaggcaacaccatgaagaccaacgacacctacatgaagttcagctggctgaccgtgcccgagaagtccctggacaaagaacacagatgcatcgtgcggcacgaaaacaacaagaacggcgtggaccaggaaatcatcttcccacccatcaagaccgatgtgattacaatggaccccaaggacaactgctccaaggacgccaacgataccctgctgctccagctgaccaacaccagcgcctactacatgtacttgttgctgctgctgaagtccgtggtgtacttcgccatcatcacatgctgcctgctgatggctatggtcaagcggaaggacagccggggaagggccaagcgatctggatctggagcaacaaacttctcactactcaaacaagcaggtgacgtggaggagaatcccgggcctactagtatggactggatttggcgcatccttttccttgtcggcgctgctaccggcgcgcattccttcgaacaagttcaactgcaacagcctggggccgagcttgttagacctggcgcttctgtgaagctgagctgcaaggccagcggctacaccttcaccagctactggatgaactgggtcaagcagcggcctgaccagggcctcgaatggatcggcagaatcgacccctacgacagcgagacacactacaaccagaagttcaaggacaaggccatcctgaccgtggacaagagcagctccaccgcctacatgcaactgagcagcctgacctctgaggatagcgccgtgtactattgcgccagaggcaactgggacgactattggggccagggcacaaccctgacagtgtctagtacgcgtatccagaaccctgatcctgccgtgtaccagctgcgggatagcaagagcagcgacaagagcgtgtgtctgttcaccgacttcgacagccagaccaacgtgtcccagagcaaggactccgacgtgtacatcaccgataagtgcgtgctggacatgcggagcatggacttcaagagcaactccgccgtggcctggtccaacaagtccgatttcgcctgcgccaacgccttcaacaacagcattatccccgaggacacattcttcccaagccccgagagcagcgactccaccgaccacgtgaagcccaaagagacagagaacaccaagcagcccagcaagagctgccacaagcccaaggccatcgtgcacaccgagaaagtgaacatgatgagcctgaccgtgctgggcctgcggatgctgttcgccaaaaccgtggccgtgaacttcctgctgaccgccaagctgttcttcctcctcaccgcc

SEQ ID NO: 6449 - DNA, 2571 bp, synthetic construct
  source 1..2571: mol_type = other DNA
atggccttaccagtgaccgccttgctcctgccgctggccttgctgctccacgccgccaggccggaagtgcagctggttgaatctggcggaggactggttcagcctggcggatctctgagactgtcttgtgccgccagcggcttcagcttcagcgacttttggatgagctgggtccgacaggcccctggcaaaggacttgaatgggtcgccacaatcagccaggccggcagcgagaaggactacgtggactctgtgaagggcagattcaccatcagccgggacaacgccaagaagtccctgtacctccagatgaacagcctgagagccgaggacaccgccgtgtactattgtgcctctggcgtgtacagcttcgactacagaggccagggcaccctggtcacagtctcttctggtaccggcggaggcggatctggcggcggaggtagcggtggcggaggatctgaattcgagatcgtgctgacacagagccctaccagcatgacagcctctccaggcgagcaagtgaccatcacctgtagagccagcagcagcatcaactacatgcactggtatcagcagaagcctggcgcaagccccagaccttggatctacgagacaagcaagctggcctccggcgtgcccgatagattttctggatctgccagcggcaccagctacagcctgaccatcaacaacatggaagccgaggacgccgccacctactactgccagcagtggaattacccctcctggacctttggcggaggcaccaagctggaacttaaactcgaggacctgaagaacgtgttcccacctgaggtggccgtgttcgagcctagcgaggccgagatcagccacacccagaaagccaccctcgtgtgcctggctaccggcttctaccccgaccatgtggaactgtcttggtgggtcaacggcaaagaggtgcacagcggcgtgtgtaccgacccccagccactgaaagaacagcccgccctgaacgacagccggtactgcctgagcagcagactgagagtgtccgccaccttctggcagaacccccggaaccacttcagatgccaggtgcagttctacggcctgagcgagaacgacgagtggacccaggacagagccaagcccgtgacccagatcgtgtctgccgaagcctggggcagagccgatgatgtgattaagatccactggcaggaaaagaagtccaacaccatcctgggcagccaggaaggcaacaccatgaagaccaacgacacctacatgaagttcagctggctgaccgtgcccgagaagtccctggacaaagaacacagatgcatcgtgcggcacgaaaacaacaagaacggcgtggaccaggaaatcatcttcccacccatcaagaccgatgtgattacaatggaccccaaggacaactgctccaaggacgccaacgataccctgctgctccagctgaccaacaccagcgcctactacatgtacttgttgctgctgctgaagtccgtggtgtacttcgccatcatcacatgctgcctgctgatggctatggtcaagcggaaggacagccggggaagggccaagcgatctggatctggagcaacaaacttctcactactcaaacaagcaggtgacgtggaggagaatcccgggcctactagtatggactggatttggcgcatccttttccttgtcggcgctgctaccggcgcgcattccttcgaagaagtgcagctcgttgagtctggtggcggactggttcagcctggaagaagcctgaagctgagctgtgccgccagcggcttcaccttcagcgactacaatatggcctgggtccgacaggcccctaagaaaggactggaatgggtcgccaccatcctgtacgatggcggcagaacctactaccggggcagcgtgaagggcagattcaccatcagcagagacaacgccaagagcaccctgtacctgcggatggactctctgagaagcgaggataccgccacatattactgtgccacacacagccggggcaccgactactttgattattggggccagggcgtgatggttaccgtgtctagtacgcgtatccagaaccctgatcctgccgtgtaccagctgcgggatagcaagagcagcgacaagagcgtgtgtctgttcaccgacttcgacagccagaccaacgtgtcccagagcaaggactccgacgtgtacatcaccgataagtgcgtgctggacatgcggagcatggacttcaagagcaactccgccgtggcctggtccaacaagtccgatttcgcctgcgccaacgccttcaacaacagcattatccccgaggacacattcttcccaagccccgagagcagcgactccaccgaccacgtgaagcccaaagagacagagaacaccaagcagcccagcaagagctgccacaagcccaaggccatcgtgcacaccgagaaagtgaacatgatgagcctgaccgtgctgggcctgcggatgctgttcgccaaaaccgtggccgtgaacttcctgctgaccgccaagctgttcttcctcctcaccgcc

SEQ ID NO: 6450 - DNA, 2598 bp, synthetic construct
  source 1..2598: mol_type = other DNA
atggccttaccagtgaccgccttgctcctgccgctggccttgctgctccacgccgccaggccggaagtgcagctggttgaatctggcggaggactggttcagcctggcggatctctgagactgtcttgtgccgccagcggcttcagcttcagcgacttttggatgagctgggtccgacaggcccctggcaaaggacttgaatgggtcgccacaatcagccaggccggcagcgagaaggactacgtggactctgtgaagggcagattcaccatcagccgggacaacgccaagaagtccctgtacctccagatgaacagcctgagagccgaggacaccgccgtgtactattgtgcctctggcgtgtacagcttcgactacagaggccagggcaccctggtcacagtctcttctggtaccggcggaggcggatctggcggcggaggtagcggtggcggaggatctgaattcgacatcgtgatgacacagagcccttctagcctggccgtgtctgagggcgagacagtgaccatcaactgcaagagcagccagagcttcctgtctagcggcgacggcaagaattacgtggcctggtatcagtacaagcccggacagagccccaagctgctgatctactgggccagcacaagacagagcggcgtgcccgatagattcatcggctctggcagcggcaccgacttcaccctgacaatctctacagtgcaggccgaggacctggctatctactactgccagcagtattacgacacccctctgacctttggctccggcaccaagctggaaatcaaactcgaggacctgaagaacgtgttcccacctgaggtggccgtgttcgagcctagcgaggccgagatcagccacacccagaaagccaccctcgtgtgcctggctaccggcttctaccccgaccatgtggaactgtcttggtgggtcaacggcaaagaggtgcacagcggcgtgtgtaccgacccccagccactgaaagaacagcccgccctgaacgacagccggtactgcctgagcagcagactgagagtgtccgccaccttctggcagaacccccggaaccacttcagatgccaggtgcagttctacggcctgagcgagaacgacgagtggacccaggacagagccaagcccgtgacccagatcgtgtctgccgaagcctggggcagagccgatgatgtgattaagatccactggcaggaaaagaagtccaacaccatcctgggcagccaggaaggcaacaccatgaagaccaacgacacctacatgaagttcagctggctgaccgtgcccgagaagtccctggacaaagaacacagatgcatcgtgcggcacgaaaacaacaagaacggcgtggaccaggaaatcatcttcccacccatcaagaccgatgtgattacaatggaccccaaggacaactgctccaaggacgccaacgataccctgctgctccagctgaccaacaccagcgcctactacatgtacttgttgctgctgctgaagtccgtggtgtacttcgccatcatcacatgctgcctgctgatggctatggtcaagcggaaggacagccggggaagggccaagcgatctggatctggagcaacaaacttctcactactcaaacaagcaggtgacgtggaggagaatcccgggcctactagtatggactggatttggcgcatccttttccttgtcggcgctgctaccggcgcgcattccttcgaagaagtgaagctgcaagagtctggccccagcctggtgcagagtagccaaacactgagcctgacctgtaccgtgtccggctttagcctgaccagctaccacatccactgggtccgacagacccctggcaaaggactggaatggatgggcgtgatgtggagcgacggcgacaccagctataacagcgccctgaagtcccggctgagcatcagcagagatacaagccagagccaggtgttcctgaagatgaacagcctccagaccgaggacaccgccacctactattgtgccagaggctactacagcagctacctgtacctttggttcgcctattggggccagggcaccctggttacagtcagctctacgcgtatccagaaccctgatcctgccgtgtaccagctgcgggatagcaagagcagcgacaagagcgtgtgtctgttcaccgacttcgacagccagaccaacgtgtcccagagcaaggactccgacgtgtacatcaccgataagtgcgtgctggacatgcggagcatggacttcaagagcaactccgccgtggcctggtccaacaagtccgatttcgcctgcgccaacgccttcaacaacagcattatccccgaggacacattcttcccaagccccgagagcagcgactccaccgaccacgtgaagcccaaagagacagagaacaccaagcagcccagcaagagctgccacaagcccaaggccatcgtgcacaccgagaaagtgaacatgatgagcctgaccgtgctgggcctgcggatgctgttcgccaaaaccgtggccgtgaacttcctgctgaccgccaagctgttcttcctcctcaccgcc

SEQ ID NO: 6451 - DNA, 2610 bp, synthetic construct
  source 1..2610: mol_type = other DNA
atggccttaccagtgaccgccttgctcctgccgctggccttgctgctccacgccgccaggccggaagtgcagctggttgaatctggcggaggactggttcagcctggcggatctctgagactgtcttgtgccgccagcggcttcagcttcagcgacttttggatgagctgggtccgacaggcccctggcaaaggacttgaatgggtcgccacaatcagccaggccggcagcgagaaggactacgtggactctgtgaagggcagattcaccatcagccgggacaacgccaagaagtccctgtacctccagatgaacagcctgagagccgaggacaccgccgtgtactattgtgcctctggcgtgtacagcttcgactacagaggccagggcaccctggtcacagtctcttctggtaccggcggaggcggatctggcggcggaggtagcggtggcggaggatctgaattcgacgtgctgatgacccagacacctgtgtctctgccagtgtctctcggaggccaggtgtccatctcctgtagaagcagccagagcctggtgcactccgacggcgatacctacctgcactggtatctccagaagcctggacagagccctcagctcctgatctaccgggtgtccaacagattcagcggcgtgcccgatagattttccggcagcggctctggcaccgacttcaccctgaagatcagcagagtggaacccgaggacctgggcctgtactactgtctccagaccacacacttcccaccttggacctttggcggaggcaccaagctggaaatgaaactcgaggacctgaagaacgtgttcccacctgaggtggccgtgttcgagcctagcgaggccgagatcagccacacccagaaagccaccctcgtgtgcctggctaccggcttctaccccgaccatgtggaactgtcttggtgggtcaacggcaaagaggtgcacagcggcgtgtgtaccgacccccagccactgaaagaacagcccgccctgaacgacagccggtactgcctgagcagcagactgagagtgtccgccaccttctggcagaacccccggaaccacttcagatgccaggtgcagttctacggcctgagcgagaacgacgagtggacccaggacagagccaagcccgtgacccagatcgtgtctgccgaagcctggggcagagccgatgatgtgattaagatccactggcaggaaaagaagtccaacaccatcctgggcagccaggaaggcaacaccatgaagaccaacgacacctacatgaagttcagctggctgaccgtgcccgagaagtccctggacaaagaacacagatgcatcgtgcggcacgaaaacaacaagaacggcgtggaccaggaaatcatcttcccacccatcaagaccgatgtgattacaatggaccccaaggacaactgctccaaggacgccaacgataccctgctgctccagctgaccaacaccagcgcctactacatgtacttgttgctgctgctgaagtccgtggtgtacttcgccatcatcacatgctgcctgctgatggctatggtcaagcggaaggacagccggggaagggccaagcgatctggatctggagcaacaaacttctcactactcaaacaagcaggtgacgtggaggagaatcccgggcctactagtatggactggatttggcgcatccttttccttgtcggcgctgctaccggcgcgcattccttcgaacaggttcagctccagcagtctggacccgagcttagaaggccaggatctagcgtcagactgagctgcaaggccagcggctaccggatcaaggacttcctgatccactggattaagaacagacccgagcacggcctggaatggatcggatggattgaccctgaggacggcgagactaagtacgcccagaagttccagaccaaggccacactgaccgccgacacctctagcaacaccgcctacatgcaactgagcagcctgaccagcgaggacaccgccacctacttttgtgctagatggggcgacgtgtactacggcctgatgagaggccatgtgatggatgcctggggccagggaacaagcgtgacagtctcttctacgcgtatccagaaccctgatcctgccgtgtaccagctgcgggatagcaagagcagcgacaagagcgtgtgtctgttcaccgacttcgacagccagaccaacgtgtcccagagcaaggactccgacgtgtacatcaccgataagtgcgtgctggacatgcggagcatggacttcaagagcaactccgccgtggcctggtccaacaagtccgatttcgcctgcgccaacgccttcaacaacagcattatccccgaggacacattcttcccaagccccgagagcagcgactccaccgaccacgtgaagcccaaagagacagagaacaccaagcagcccagcaagagctgccacaagcccaaggccatcgtgcacaccgagaaagtgaacatgatgagcctgaccgtgctgggcctgcggatgctgttcgccaaaaccgtggccgtgaacttcctgctgaccgccaagctgttcttcctcctcaccgcc

SEQ ID NO: 6452 - DNA, 2595 bp, synthetic construct
  source 1..2595: mol_type = other DNA
atggccttaccagtgaccgccttgctcctgccgctggccttgctgctccacgccgccaggccggaagtgcagctggttgaatctggcggaggactggttcagcctggcggatctctgagactgtcttgtgccgccagcggcttcagcttcagcgacttttggatgagctgggtccgacaggcccctggcaaaggacttgaatgggtcgccacaatcagccaggccggcagcgagaaggactacgtggactctgtgaagggcagattcaccatcagccgggacaacgccaagaagtccctgtacctccagatgaacagcctgagagccgaggacaccgccgtgtactattgtgcctctggcgtgtacagcttcgactacagaggccagggcaccctggtcacagtctcttctggtaccggcggaggcggatctggcggcggaggtagcggtggcggaggatctgaattcgacatcgtgatgacacagagccccgccacactgtcactgtctccaggcgaaagagccacactgagctgtcggagcagcaagagcctccagaacgtgaacggcaacacctacctgtactggttccagcagaagcccggccagtctcctcagctcctgatctacagaatgagcaacctgaacagcggcgtgcccgacagattttctggcagcggaagcggcaccgagttcaccctgaccataagcagcctggaacctgaggacttcgccgtgtactactgtatgcagcacctggaataccccatcaccttcggagccggcaccaagctggaaatcaaactcgaggacctgaagaacgtgttcccacctgaggtggccgtgttcgagcctagcgaggccgagatcagccacacccagaaagccaccctcgtgtgcctggctaccggcttctaccccgaccatgtggaactgtcttggtgggtcaacggcaaagaggtgcacagcggcgtgtgtaccgacccccagccactgaaagaacagcccgccctgaacgacagccggtactgcctgagcagcagactgagagtgtccgccaccttctggcagaacccccggaaccacttcagatgccaggtgcagttctacggcctgagcgagaacgacgagtggacccaggacagagccaagcccgtgacccagatcgtgtctgccgaagcctggggcagagccgatgatgtgattaagatccactggcaggaaaagaagtccaacaccatcctgggcagccaggaaggcaacaccatgaagaccaacgacacctacatgaagttcagctggctgaccgtgcccgagaagtccctggacaaagaacacagatgcatcgtgcggcacgaaaacaacaagaacggcgtggaccaggaaatcatcttcccacccatcaagaccgatgtgattacaatggaccccaaggacaactgctccaaggacgccaacgataccctgctgctccagctgaccaacaccagcgcctactacatgtacttgttgctgctgctgaagtccgtggtgtacttcgccatcatcacatgctgcctgctgatggctatggtcaagcggaaggacagccggggaagggccaagcgatctggatctggagcaacaaacttctcactactcaaacaagcaggtgacgtggaggagaatcccgggcctactagtatggactggatttggcgcatccttttccttgtcggcgctgctaccggcgcgcattccttcgaagaagtgcaactggttgaatctggcggcggactggttaagcctggcggatctctgaagctgagctgtgccgccagcggctacacctttaccagctacgtgatgcactgggtccgacaggcccctggcaaaggacttgagtggatcggctacatcaacccctacaacgatggcaccaagtacaacgagaagttccagggcagagtgaccatcagctccgacaagagcatcagcaccgcctacatggaactgagcagcctgagaagcgaggataccgccatgtactattgcgccagaggcacctactactacggcaccagagtgttcgactactggggccagggaaccctggtcacagtctcttctacgcgtatccagaaccctgatcctgccgtgtaccagctgcgggatagcaagagcagcgacaagagcgtgtgtctgttcaccgacttcgacagccagaccaacgtgtcccagagcaaggactccgacgtgtacatcaccgataagtgcgtgctggacatgcggagcatggacttcaagagcaactccgccgtggcctggtccaacaagtccgatttcgcctgcgccaacgccttcaacaacagcattatccccgaggacacattcttcccaagccccgagagcagcgactccaccgaccacgtgaagcccaaagagacagagaacaccaagcagcccagcaagagctgccacaagcccaaggccatcgtgcacaccgagaaagtgaacatgatgagcctgaccgtgctgggcctgcggatgctgttcgccaaaaccgtggccgtgaacttcctgctgaccgccaagctgttcttcctcctcaccgcc

SEQ ID NO: 6453 - DNA, 2583 bp, synthetic construct
  source 1..2583: mol_type = other DNA
atggccttaccagtgaccgccttgctcctgccgctggccttgctgctccacgccgccaggccggaagtgcagctggttgaatctggcggaggactggttcagcctggcggatctctgagactgtcttgtgccgccagcggcttcagcttcagcgacttttggatgagctgggtccgacaggcccctggcaaaggacttgaatgggtcgccacaatcagccaggccggcagcgagaaggactacgtggactctgtgaagggcagattcaccatcagccgggacaacgccaagaagtccctgtacctccagatgaacagcctgagagccgaggacaccgccgtgtactattgtgcctctggcgtgtacagcttcgactacagaggccagggcaccctggtcacagtctcttctggtaccggcggaggcggatctggcggcggaggtagcggtggcggaggatctgaattcgacatccagatgacacagagccctagcagcctgtctgccagcgtgggagacagagtgaccatcacatgcaaggccagcgaccacatcaacaactggctggcctggtatcagcagaagcctggacaggcccctaagctgctgatctacggcgctaccacactggaaacaggcgtgcccagcagattttctggcagcggctctggcaccgactacaccctgacaatatccagcctccagcctgaggacttcgccacctactactgtcagcagagctggaacaccccttggacattcggccagggcaccaagctggaaatcaagagactcgaggacctgaagaacgtgttcccacctgaggtggccgtgttcgagcctagcgaggccgagatcagccacacccagaaagccaccctcgtgtgcctggctaccggcttctaccccgaccatgtggaactgtcttggtgggtcaacggcaaagaggtgcacagcggcgtgtgtaccgacccccagccactgaaagaacagcccgccctgaacgacagccggtactgcctgagcagcagactgagagtgtccgccaccttctggcagaacccccggaaccacttcagatgccaggtgcagttctacggcctgagcgagaacgacgagtggacccaggacagagccaagcccgtgacccagatcgtgtctgccgaagcctggggcagagccgatgatgtgattaagatccactggcaggaaaagaagtccaacaccatcctgggcagccaggaaggcaacaccatgaagaccaacgacacctacatgaagttcagctggctgaccgtgcccgagaagtccctggacaaagaacacagatgcatcgtgcggcacgaaaacaacaagaacggcgtggaccaggaaatcatcttcccacccatcaagaccgatgtgattacaatggaccccaaggacaactgctccaaggacgccaacgataccctgctgctccagctgaccaacaccagcgcctactacatgtacttgttgctgctgctgaagtccgtggtgtacttcgccatcatcacatgctgcctgctgatggctatggtcaagcggaaggacagccggggaagggccaagcgatctggatctggagcaacaaacttctcactactcaaacaagcaggtgacgtggaggagaatcccgggcctactagtatggactggatttggcgcatccttttccttgtcggcgctgctaccggcgcgcattccttcgaacaagttcagcttcaacagcctggcgctgagctggtcaaacctggcgcttctgtgaagatgagctgcaaagccagcggctacgccttcagcagctactggatcaactggatgaagcagaaacccggccagggactcgaatggatcggccaaatctatcccggcgacggcgacaccaactacaacggcaagttcaagggcagagccacactgaccgccgatacctctagcagcacagcctacatgcagctgagcagcctgaccagcgaagatagcgccgtgtacttctgtgcccggtccatcacaacagtcgtgggctgcgctatggactattggggccagggaacaagcgtgaccgtgtctagtacgcgtatccagaaccctgatcctgccgtgtaccagctgcgggatagcaagagcagcgacaagagcgtgtgtctgttcaccgacttcgacagccagaccaacgtgtcccagagcaaggactccgacgtgtacatcaccgataagtgcgtgctggacatgcggagcatggacttcaagagcaactccgccgtggcctggtccaacaagtccgatttcgcctgcgccaacgccttcaacaacagcattatccccgaggacacattcttcccaagccccgagagcagcgactccaccgaccacgtgaagcccaaagagacagagaacaccaagcagcccagcaagagctgccacaagcccaaggccatcgtgcacaccgagaaagtgaacatgatgagcctgaccgtgctgggcctgcggatgctgttcgccaaaaccgtggccgtgaacttcctgctgaccgccaagctgttcttcctcctcaccgcc

SEQ ID NO: 6454 - DNA, 2589 bp, synthetic construct
  source 1..2589: mol_type = other DNA
atggccttaccagtgaccgccttgctcctgccgctggccttgctgctccacgccgccaggccggaagtgcagctggttgaatctggcggaggactggttcagcctggcggatctctgagactgtcttgtgccgccagcggcttcagcttcagcgacttttggatgagctgggtccgacaggcccctggcaaaggacttgaatgggtcgccacaatcagccaggccggcagcgagaaggactacgtggactctgtgaagggcagattcaccatcagccgggacaacgccaagaagtccctgtacctccagatgaacagcctgagagccgaggacaccgccgtgtactattgtgcctctggcgtgtacagcttcgactacagaggccagggcaccctggtcacagtctcttctggtaccggcggaggcggatctggcggcggaggtagcggtggcggaggatctgaattccagatcgtgctgtctcagtctcctgccatcctgagcgcttccccaggcgagaaagtgaccatgacctgtagagccagcagcagcgtgtcctacatgcactggtatcagcagaagcccggcagcagccctaagccttggatctacgccaccagcaatctggcctctggcgtgccagccagattttctggctctggcagcggcaccagctacagcttcacaatcagcagagtggaagccgaggacgccgccacctactattgtcagcagtggaccttcaatcctcctaccttcggcggaggcacccggctggaaatcaaaagaacagtggctgctctcgaggacctgaagaacgtgttcccacctgaggtggccgtgttcgagcctagcgaggccgagatcagccacacccagaaagccaccctcgtgtgcctggctaccggcttctaccccgaccatgtggaactgtcttggtgggtcaacggcaaagaggtgcacagcggcgtgtgtaccgacccccagccactgaaagaacagcccgccctgaacgacagccggtactgcctgagcagcagactgagagtgtccgccaccttctggcagaacccccggaaccacttcagatgccaggtgcagttctacggcctgagcgagaacgacgagtggacccaggacagagccaagcccgtgacccagatcgtgtctgccgaagcctggggcagagccgatgatgtgattaagatccactggcaggaaaagaagtccaacaccatcctgggcagccaggaaggcaacaccatgaagaccaacgacacctacatgaagttcagctggctgaccgtgcccgagaagtccctggacaaagaacacagatgcatcgtgcggcacgaaaacaacaagaacggcgtggaccaggaaatcatcttcccacccatcaagaccgatgtgattacaatggaccccaaggacaactgctccaaggacgccaacgataccctgctgctccagctgaccaacaccagcgcctactacatgtacttgttgctgctgctgaagtccgtggtgtacttcgccatcatcacatgctgcctgctgatggctatggtcaagcggaaggacagccggggaagggccaagcgatctggatctggagcaacaaacttctcactactcaaacaagcaggtgacgtggaggagaatcccgggcctactagtatggactggatttggcgcatccttttccttgtcggcgctgctaccggcgcgcattccttcgaacaggcttatctgcaacagagcggagccgaactcgtcagacctggcgcttctgtgaagatgagctgcaaggccagcggctacaccttcaccagctataatatgcactgggtcaagcagacccctcggcagggactcgaatggatcggcggaatctatcccggcaacggcgacacctcctacaaccagaagttcaagggcaaagccacactgaccgtgggcaagagcagcagcaccgcctatatgcagctcagcagcctgaccagcgaggacagcgccgtgtacttctgcgccagatacgactacaactacgctatggactactggggccagggcaccagcgtgacagttagctctgccagcacgcgtatccagaaccctgatcctgccgtgtaccagctgcgggatagcaagagcagcgacaagagcgtgtgtctgttcaccgacttcgacagccagaccaacgtgtcccagagcaaggactccgacgtgtacatcaccgataagtgcgtgctggacatgcggagcatggacttcaagagcaactccgccgtggcctggtccaacaagtccgatttcgcctgcgccaacgccttcaacaacagcattatccccgaggacacattcttcccaagccccgagagcagcgactccaccgaccacgtgaagcccaaagagacagagaacaccaagcagcccagcaagagctgccacaagcccaaggccatcgtgcacaccgagaaagtgaacatgatgagcctgaccgtgctgggcctgcggatgctgttcgccaaaaccgtggccgtgaacttcctgctgaccgccaagctgttcttcctcctcaccgcc

SEQ ID NO: 6455 - DNA, 2583 bp, synthetic construct
  source 1..2583: mol_type = other DNA
atggccttaccagtgaccgccttgctcctgccgctggccttgctgctccacgccgccaggccggaagtgcagctggttgaatctggcggaggactggttcagcctggcggatctctgagactgtcttgtgccgccagcggcttcagcttcagcgacttttggatgagctgggtccgacaggcccctggcaaaggacttgaatgggtcgccacaatcagccaggccggcagcgagaaggactacgtggactctgtgaagggcagattcaccatcagccgggacaacgccaagaagtccctgtacctccagatgaacagcctgagagccgaggacaccgccgtgtactattgtgcctctggcgtgtacagcttcgactacagaggccagggcaccctggtcacagtctcttctggtaccggcggaggcggatctggcggcggaggtagcggtggcggaggatctgaattcgagatcgtgctgacacagagccctgccaccctgtctctgagccctggcgaaagagccaccctgagctgtagagccagccagagcgtgtccagctacctggcctggtatcagcagaagcccggccaggctccccggctgctgatctacgatgccagcaatagagccaccggcatccccgccagattttccggctctggcagcggcaccgacttcaccctgaccatcagctccctggaacccgaggacttcgccgtgtactactgccagcagcggagcaactggcccatcacattcggccagggcacccggctggaaatcaaactcgaggacctgaagaacgtgttcccacctgaggtggccgtgttcgagcctagcgaggccgagatcagccacacccagaaagccaccctcgtgtgcctggctaccggcttctaccccgaccatgtggaactgtcttggtgggtcaacggcaaagaggtgcacagcggcgtgtgtaccgacccccagccactgaaagaacagcccgccctgaacgacagccggtactgcctgagcagcagactgagagtgtccgccaccttctggcagaacccccggaaccacttcagatgccaggtgcagttctacggcctgagcgagaacgacgagtggacccaggacagagccaagcccgtgacccagatcgtgtctgccgaagcctggggcagagccgatgatgtgattaagatccactggcaggaaaagaagtccaacaccatcctgggcagccaggaaggcaacaccatgaagaccaacgacacctacatgaagttcagctggctgaccgtgcccgagaagtccctggacaaagaacacagatgcatcgtgcggcacgaaaacaacaagaacggcgtggaccaggaaatcatcttcccacccatcaagaccgatgtgattacaatggaccccaaggacaactgctccaaggacgccaacgataccctgctgctccagctgaccaacaccagcgcctactacatgtacttgttgctgctgctgaagtccgtggtgtacttcgccatcatcacatgctgcctgctgatggctatggtcaagcggaaggacagccggggaagggccaagcgatctggatctggagcaacaaacttctcactactcaaacaagcaggtgacgtggaggagaatcccgggcctactagtatggactggatttggcgcatccttttccttgtcggcgctgctaccggcgcgcattccttcgaagaggtgcagcttgttgagtctggcggaggactggtgcagcccgatagaagcctgagactgtcttgtgccgccagcggcttcaccttccacgattatgccatgcactgggtccgacaggcccctggcaaaggacttgaatgggtgtccaccatctcttggaacagcggcacaatcggctacgccgactctgtgaagggcagattcaccatcagccgggacaacgccaagaacagcctgtacctccagatgaactccctgagagccgaggacacagccctgtactactgcgccaaggacatccagtacggcaactactactacggcatggacgtgtggggccagggcacaacagtgacagtctcttctacgcgtatccagaaccctgatcctgccgtgtaccagctgcgggatagcaagagcagcgacaagagcgtgtgtctgttcaccgacttcgacagccagaccaacgtgtcccagagcaaggactccgacgtgtacatcaccgataagtgcgtgctggacatgcggagcatggacttcaagagcaactccgccgtggcctggtccaacaagtccgatttcgcctgcgccaacgccttcaacaacagcattatccccgaggacacattcttcccaagccccgagagcagcgactccaccgaccacgtgaagcccaaagagacagagaacaccaagcagcccagcaagagctgccacaagcccaaggccatcgtgcacaccgagaaagtgaacatgatgagcctgaccgtgctgggcctgcggatgctgttcgccaaaaccgtggccgtgaacttcctgctgaccgccaagctgttcttcctcctcaccgcc

SEQ ID NO: 6456 - DNA, 2568 bp, synthetic construct
  source 1..2568: mol_type = other DNA
atggccttaccagtgaccgccttgctcctgccgctggccttgctgctccacgccgccaggccggaagtgcagctggttgaatctggcggaggactggttcagcctggcggatctctgagactgtcttgtgccgccagcggcttcagcttcagcgacttttggatgagctgggtccgacaggcccctggcaaaggacttgaatgggtcgccacaatcagccaggccggcagcgagaaggactacgtggactctgtgaagggcagattcaccatcagccgggacaacgccaagaagtccctgtacctccagatgaacagcctgagagccgaggacaccgccgtgtactattgtgcctctggcgtgtacagcttcgactacagaggccagggcaccctggtcacagtctcttctggtaccggcggaggcggatctggcggcggaggtagcggtggcggaggatctgaattcgacatccagatgacacagagccctagcagcctgtctgccagcgtgggagatagagtgaccatcaactgcaaggccagccaggacatcaacagctacctgagctggttccagcagaagcctggcaaggcccctaagacactgatctaccgggccaacagactggtggatggcgtgccaagcagattttctggcagcggcagcggccaggattacaccctgacaatatccagcctccagcctgaggacttcgccacctactactgcctccagtacgacgagttccctctgacctttggcggaggcaccaaggtggaaatcaaactcgaggacctgaagaacgtgttcccacctgaggtggccgtgttcgagcctagcgaggccgagatcagccacacccagaaagccaccctcgtgtgcctggctaccggcttctaccccgaccatgtggaactgtcttggtgggtcaacggcaaagaggtgcacagcggcgtgtgtaccgacccccagccactgaaagaacagcccgccctgaacgacagccggtactgcctgagcagcagactgagagtgtccgccaccttctggcagaacccccggaaccacttcagatgccaggtgcagttctacggcctgagcgagaacgacgagtggacccaggacagagccaagcccgtgacccagatcgtgtctgccgaagcctggggcagagccgatgatgtgattaagatccactggcaggaaaagaagtccaacaccatcctgggcagccaggaaggcaacaccatgaagaccaacgacacctacatgaagttcagctggctgaccgtgcccgagaagtccctggacaaagaacacagatgcatcgtgcggcacgaaaacaacaagaacggcgtggaccaggaaatcatcttcccacccatcaagaccgatgtgattacaatggaccccaaggacaactgctccaaggacgccaacgataccctgctgctccagctgaccaacaccagcgcctactacatgtacttgttgctgctgctgaagtccgtggtgtacttcgccatcatcacatgctgcctgctgatggctatggtcaagcggaaggacagccggggaagggccaagcgatctggatctggagcaacaaacttctcactactcaaacaagcaggtgacgtggaggagaatcccgggcctactagtatggactggatttggcgcatccttttccttgtcggcgctgctaccggcgcgcattccttcgaacaggtgcaactggtgcagtctggggccgaagtgaagaaacctggggcctctgtgaaggtgtcctgcaaagccagcggctacacctttaccaactacgacatcaactgggtccgacaggctccaggccaaggactggaatggatcggctggatctatcctggcgacggcagcaccaagtacaacgagaagttcaaggccaaggccacactgaccgccgataccagcacaagcaccgcctacatggaactgcggagcctgagaagcgacgacaccgccgtgtactattgtgcctccggctacgaggacgctatggactattggggccagggcaccaccgtgacagtgtctagtacgcgtatccagaaccctgatcctgccgtgtaccagctgcgggatagcaagagcagcgacaagagcgtgtgtctgttcaccgacttcgacagccagaccaacgtgtcccagagcaaggactccgacgtgtacatcaccgataagtgcgtgctggacatgcggagcatggacttcaagagcaactccgccgtggcctggtccaacaagtccgatttcgcctgcgccaacgccttcaacaacagcattatccccgaggacacattcttcccaagccccgagagcagcgactccaccgaccacgtgaagcccaaagagacagagaacaccaagcagcccagcaagagctgccacaagcccaaggccatcgtgcacaccgagaaagtgaacatgatgagcctgaccgtgctgggcctgcggatgctgttcgccaaaaccgtggccgtgaacttcctgctgaccgccaagctgttcttcctcctcaccgcc

SEQ ID NO: 6457 - DNA, 2574 bp, synthetic construct
  source 1..2574: mol_type = other DNA
atggccttaccagtgaccgccttgctcctgccgctggccttgctgctccacgccgccaggccggaagtgcagctggttgaatctggcggaggactggttcagcctggcggatctctgagactgtcttgtgccgccagcggcttcagcttcagcgacttttggatgagctgggtccgacaggcccctggcaaaggacttgaatgggtcgccacaatcagccaggccggcagcgagaaggactacgtggactctgtgaagggcagattcaccatcagccgggacaacgccaagaagtccctgtacctccagatgaacagcctgagagccgaggacaccgccgtgtactattgtgcctctggcgtgtacagcttcgactacagaggccagggcaccctggtcacagtctcttctggtaccggcggaggcggatctggcggcggaggtagcggtggcggaggatctgaattcgacatcgtgatgacccagacacctctgagcctgagcgtgacacctggacagcctgccagcattagctgcaagagcagccagtctctgctggacggcgacggcaagacctacctgaattggctgctccagaagcctggacagagccctcagcggctgatctacctggtgtccaagctggatagcggcgtgcccgatagattttctggcagcggctctggcaccgacttcaccctgaagatcagcagagtggaagccgaggacgtgggcgtgtactactgttggcagggcacacacttccccagaacattcggccagggcacaaagctggaaatcaaactcgaggacctgaagaacgtgttcccacctgaggtggccgtgttcgagcctagcgaggccgagatcagccacacccagaaagccaccctcgtgtgcctggctaccggcttctaccccgaccatgtggaactgtcttggtgggtcaacggcaaagaggtgcacagcggcgtgtgtaccgacccccagccactgaaagaacagcccgccctgaacgacagccggtactgcctgagcagcagactgagagtgtccgccaccttctggcagaacccccggaaccacttcagatgccaggtgcagttctacggcctgagcgagaacgacgagtggacccaggacagagccaagcccgtgacccagatcgtgtctgccgaagcctggggcagagccgatgatgtgattaagatccactggcaggaaaagaagtccaacaccatcctgggcagccaggaaggcaacaccatgaagaccaacgacacctacatgaagttcagctggctgaccgtgcccgagaagtccctggacaaagaacacagatgcatcgtgcggcacgaaaacaacaagaacggcgtggaccaggaaatcatcttcccacccatcaagaccgatgtgattacaatggaccccaaggacaactgctccaaggacgccaacgataccctgctgctccagctgaccaacaccagcgcctactacatgtacttgttgctgctgctgaagtccgtggtgtacttcgccatcatcacatgctgcctgctgatggctatggtcaagcggaaggacagccggggaagggccaagcgatctggatctggagcaacaaacttctcactactcaaacaagcaggtgacgtggaggagaatcccgggcctactagtatggactggatttggcgcatccttttccttgtcggcgctgctaccggcgcgcattccttcgaacaagtgcaactggttcagagcggagccgaagtgaagaaacctggggcctctgtgaaggtgtcctgcaaggccagcggctacaccttcaaggacacctacatccactgggtccgacaggcccctggacaaggacttgagtggatgggcagaatcgaccccgccaacggcaacaccaaatacgaccccaagttccagggcagagtgaccatgaccagagacaccagcatcagcaccgcctacatggaactgagccggctgagatccgatgacaccgccgtgtactattgcgctagaagaggcggagtggattggggccagggaacactggttaccgtgtctagtacgcgtatccagaaccctgatcctgccgtgtaccagctgcgggatagcaagagcagcgacaagagcgtgtgtctgttcaccgacttcgacagccagaccaacgtgtcccagagcaaggactccgacgtgtacatcaccgataagtgcgtgctggacatgcggagcatggacttcaagagcaactccgccgtggcctggtccaacaagtccgatttcgcctgcgccaacgccttcaacaacagcattatccccgaggacacattcttcccaagccccgagagcagcgactccaccgaccacgtgaagcccaaagagacagagaacaccaagcagcccagcaagagctgccacaagcccaaggccatcgtgcacaccgagaaagtgaacatgatgagcctgaccgtgctgggcctgcggatgctgttcgccaaaaccgtggccgtgaacttcctgctgaccgccaagctgttcttcctcctcaccgcc

SEQ ID NO: 6458 - DNA, 2577 bp, synthetic construct
  source 1..2577: mol_type = other DNA
atggccttaccagtgaccgccttgctcctgccgctggccttgctgctccacgccgccaggccggaagtgcagctggttgaatctggcggaggactggttcagcctggcggatctctgagactgtcttgtgccgccagcggcttcagcttcagcgacttttggatgagctgggtccgacaggcccctggcaaaggacttgaatgggtcgccacaatcagccaggccggcagcgagaaggactacgtggactctgtgaagggcagattcaccatcagccgggacaacgccaagaagtccctgtacctccagatgaacagcctgagagccgaggacaccgccgtgtactattgtgcctctggcgtgtacagcttcgactacagaggccagggcaccctggtcacagtctcttctggtaccggcggaggcggatctggcggcggaggtagcggtggcggaggatctgaattcgacatccagatgacacagagccctagcagcctgtctgccagcgtgggagacagagtgaccatcacatgcaaggccagccaggatgtgtctacagccgtggcctggttccagcagaagcctggaaaagcccctaagctgctgatctacagccccagctacagatacaccggcgtgcccagcagattttctggcagcggctctggcaccgacttcaccctgacaatatccagcctccagcctgaggacttcacctactactgccagcagctctacagcaccccttacacattcggccagggcaccaaggtggaaatcaaactcgaggacctgaagaacgtgttcccacctgaggtggccgtgttcgagcctagcgaggccgagatcagccacacccagaaagccaccctcgtgtgcctggctaccggcttctaccccgaccatgtggaactgtcttggtgggtcaacggcaaagaggtgcacagcggcgtgtgtaccgacccccagccactgaaagaacagcccgccctgaacgacagccggtactgcctgagcagcagactgagagtgtccgccaccttctggcagaacccccggaaccacttcagatgccaggtgcagttctacggcctgagcgagaacgacgagtggacccaggacagagccaagcccgtgacccagatcgtgtctgccgaagcctggggcagagccgatgatgtgattaagatccactggcaggaaaagaagtccaacaccatcctgggcagccaggaaggcaacaccatgaagaccaacgacacctacatgaagttcagctggctgaccgtgcccgagaagtccctggacaaagaacacagatgcatcgtgcggcacgaaaacaacaagaacggcgtggaccaggaaatcatcttcccacccatcaagaccgatgtgattacaatggaccccaaggacaactgctccaaggacgccaacgataccctgctgctccagctgaccaacaccagcgcctactacatgtacttgttgctgctgctgaagtccgtggtgtacttcgccatcatcacatgctgcctgctgatggctatggtcaagcggaaggacagccggggaagggccaagcgatctggatctggagcaacaaacttctcactactcaaacaagcaggtgacgtggaggagaatcccgggcctactagtatggactggatttggcgcatccttttccttgtcggcgctgctaccggcgcgcattccttcgaagaagtgcaactggttcagagcggagccgaagtgaagaaacctggggcctctgtgaaggtgtcctgcaaagccagcggctacacctttaccgactactacctggacgtggtcgtgcggcaagctcctggacaaggactggaatggatcggcagagtgaacccctacaacggcggcaccatctacaaccagaaattcaagggaagagtgaccctgaccagagacaccagcacctccacagcctacctggaactgagcagcctgagaagcgaagataccgccgtgtactactgcgccagggaccactacagatatgaccctctgctggactactggggccagggaaccctggttacagtgtctagtacgcgtatccagaaccctgatcctgccgtgtaccagctgcgggatagcaagagcagcgacaagagcgtgtgtctgttcaccgacttcgacagccagaccaacgtgtcccagagcaaggactccgacgtgtacatcaccgataagtgcgtgctggacatgcggagcatggacttcaagagcaactccgccgtggcctggtccaacaagtccgatttcgcctgcgccaacgccttcaacaacagcattatccccgaggacacattcttcccaagccccgagagcagcgactccaccgaccacgtgaagcccaaagagacagagaacaccaagcagcccagcaagagctgccacaagcccaaggccatcgtgcacaccgagaaagtgaacatgatgagcctgaccgtgctgggcctgcggatgctgttcgccaaaaccgtggccgtgaacttcctgctgaccgccaagctgttcttcctcctcaccgcc

SEQ ID NO: 6459 - DNA, 2595 bp, synthetic construct
  source 1..2595: mol_type = other DNA
atggccttaccagtgaccgccttgctcctgccgctggccttgctgctccacgccgccaggccggaagtgcagctggttgaatctggcggaggactggttcagcctggcggatctctgagactgtcttgtgccgccagcggcttcagcttcagcgacttttggatgagctgggtccgacaggcccctggcaaaggacttgaatgggtcgccacaatcagccaggccggcagcgagaaggactacgtggactctgtgaagggcagattcaccatcagccgggacaacgccaagaagtccctgtacctccagatgaacagcctgagagccgaggacaccgccgtgtactattgtgcctctggcgtgtacagcttcgactacagaggccagggcaccctggtcacagtctcttctggtaccggcggaggcggatctggcggcggaggtagcggtggcggaggatctgaattcgacatccagatgacacagagccctagcagcctgtctgccagcgtgggagacagagtgaccatcacctgtagagccagccagagcgtgtccaccagcagctacaactacatgcactggtatcagcagaagcccggcaagcctcctaagctgctgattaagtacgccagcaacctggaaagcggcgtgcccagcagattttctggcagcggctctggcaccgacttcaccctgacaatatccagcctccagcctgaggacttcgccacctactactgtcagcactcctgggagatccctctgacattcggccagggcaccaaggtggaaatcaaactcgaggacctgaagaacgtgttcccacctgaggtggccgtgttcgagcctagcgaggccgagatcagccacacccagaaagccaccctcgtgtgcctggctaccggcttctaccccgaccatgtggaactgtcttggtgggtcaacggcaaagaggtgcacagcggcgtgtgtaccgacccccagccactgaaagaacagcccgccctgaacgacagccggtactgcctgagcagcagactgagagtgtccgccaccttctggcagaacccccggaaccacttcagatgccaggtgcagttctacggcctgagcgagaacgacgagtggacccaggacagagccaagcccgtgacccagatcgtgtctgccgaagcctggggcagagccgatgatgtgattaagatccactggcaggaaaagaagtccaacaccatcctgggcagccaggaaggcaacaccatgaagaccaacgacacctacatgaagttcagctggctgaccgtgcccgagaagtccctggacaaagaacacagatgcatcgtgcggcacgaaaacaacaagaacggcgtggaccaggaaatcatcttcccacccatcaagaccgatgtgattacaatggaccccaaggacaactgctccaaggacgccaacgataccctgctgctccagctgaccaacaccagcgcctactacatgtacttgttgctgctgctgaagtccgtggtgtacttcgccatcatcacatgctgcctgctgatggctatggtcaagcggaaggacagccggggaagggccaagcgatctggatctggagcaacaaacttctcactactcaaacaagcaggtgacgtggaggagaatcccgggcctactagtatggactggatttggcgcatccttttccttgtcggcgctgctaccggcgcgcattccttcgaagaagtgcaactggttcagagcggagccgaagtgaagaaacctggggcctctgtgaaggtgtcctgcaaggccagcggctacagcttcaccgactattatatgcactgggtccgacaggctccaggccagggacttgagtggatcggcagaatcaacccctacaacggcgctgccttctacagccagaacttcaaggatagagtgaccctgaccgtggacaccagcaccagcacagcctacctggaactgagcagcctgagaagcgaggacaccgccgtgtactactgcgccattgagagaggcgctgacctggaaggctacgctatggattattggggccagggaaccctggtcaccgtgtcatctacgcgtatccagaaccctgatcctgccgtgtaccagctgcgggatagcaagagcagcgacaagagcgtgtgtctgttcaccgacttcgacagccagaccaacgtgtcccagagcaaggactccgacgtgtacatcaccgataagtgcgtgctggacatgcggagcatggacttcaagagcaactccgccgtggcctggtccaacaagtccgatttcgcctgcgccaacgccttcaacaacagcattatccccgaggacacattcttcccaagccccgagagcagcgactccaccgaccacgtgaagcccaaagagacagagaacaccaagcagcccagcaagagctgccacaagcccaaggccatcgtgcacaccgagaaagtgaacatgatgagcctgaccgtgctgggcctgcggatgctgttcgccaaaaccgtggccgtgaacttcctgctgaccgccaagctgttcttcctcctcaccgcc

SEQ ID NO: 6460 - DNA, 2589 bp, synthetic construct
  source 1..2589: mol_type = other DNA
atggccttaccagtgaccgccttgctcctgccgctggccttgctgctccacgccgccaggccggaagtgcagctggttgaatctggcggaggactggttcagcctggcggatctctgagactgtcttgtgccgccagcggcttcagcttcagcgacttttggatgagctgggtccgacaggcccctggcaaaggacttgaatgggtcgccacaatcagccaggccggcagcgagaaggactacgtggactctgtgaagggcagattcaccatcagccgggacaacgccaagaagtccctgtacctccagatgaacagcctgagagccgaggacaccgccgtgtactattgtgcctctggcgtgtacagcttcgactacagaggccagggcaccctggtcacagtctcttctggtaccggcggaggcggatctggcggcggaggtagcggtggcggaggatctgaattcgagatcgtgctgacacagtctccagccacactgagcgcttctccaggcgagagagtgaccctgacctgtagagccagcagcaacgtgatctccagctacgtgcactggtatcagcagaagcctggcagcagccccagactgtttctgtacagcaccagcaatctggcctccggcgtgccaagcagattttctggctctggcagcggcaccgacttcacctttaccatctctagcctggaagccgaggacgccgccacctactactgtcagcagtacagcggctaccctctgaccttcggccagggcacaagactggaaatcaaactcgaggacctgaagaacgtgttcccacctgaggtggccgtgttcgagcctagcgaggccgagatcagccacacccagaaagccaccctcgtgtgcctggctaccggcttctaccccgaccatgtggaactgtcttggtgggtcaacggcaaagaggtgcacagcggcgtgtgtaccgacccccagccactgaaagaacagcccgccctgaacgacagccggtactgcctgagcagcagactgagagtgtccgccaccttctggcagaacccccggaaccacttcagatgccaggtgcagttctacggcctgagcgagaacgacgagtggacccaggacagagccaagcccgtgacccagatcgtgtctgccgaagcctggggcagagccgatgatgtgattaagatccactggcaggaaaagaagtccaacaccatcctgggcagccaggaaggcaacaccatgaagaccaacgacacctacatgaagttcagctggctgaccgtgcccgagaagtccctggacaaagaacacagatgcatcgtgcggcacgaaaacaacaagaacggcgtggaccaggaaatcatcttcccacccatcaagaccgatgtgattacaatggaccccaaggacaactgctccaaggacgccaacgataccctgctgctccagctgaccaacaccagcgcctactacatgtacttgttgctgctgctgaagtccgtggtgtacttcgccatcatcacatgctgcctgctgatggctatggtcaagcggaaggacagccggggaagggccaagcgatctggatctggagcaacaaacttctcactactcaaacaagcaggtgacgtggaggagaatcccgggcctactagtatggactggatttggcgcatccttttccttgtcggcgctgctaccggcgcgcattccttcgaacaagttcagctgcaagagtctggccctggcctggtcaagcctagcgaaacactgagcctgacctgcgccgtgtctggctactctatcaccagcgcctactattggaactggatcagacagcctcctggcaaaggactggaatggatcggctacatcagctacgacggcagaaacaactacaaccccagcctgaagaaccggatcaccatcaatcccgacaccagcaagaaccagttcagcctccagctgaacagcgtgacccctgaggataccgccgtgtactactgtgccagagaaggcgactacgacgtgggcaactactacgctatggactactggggccagggaaccctggtcacagtctcttctacgcgtatccagaaccctgatcctgccgtgtaccagctgcgggatagcaagagcagcgacaagagcgtgtgtctgttcaccgacttcgacagccagaccaacgtgtcccagagcaaggactccgacgtgtacatcaccgataagtgcgtgctggacatgcggagcatggacttcaagagcaactccgccgtggcctggtccaacaagtccgatttcgcctgcgccaacgccttcaacaacagcattatccccgaggacacattcttcccaagccccgagagcagcgactccaccgaccacgtgaagcccaaagagacagagaacaccaagcagcccagcaagagctgccacaagcccaaggccatcgtgcacaccgagaaagtgaacatgatgagcctgaccgtgctgggcctgcggatgctgttcgccaaaaccgtggccgtgaacttcctgctgaccgccaagctgttcttcctcctcaccgcc

SEQ ID NO: 6461 - DNA, 2589 bp, synthetic construct
  source 1..2589: mol_type = other DNA
atggccttaccagtgaccgccttgctcctgccgctggccttgctgctccacgccgccaggccggaagtgcagctggttgaatctggcggaggactggttcagcctggcggatctctgagactgtcttgtgccgccagcggcttcagcttcagcgacttttggatgagctgggtccgacaggcccctggcaaaggacttgaatgggtcgccacaatcagccaggccggcagcgagaaggactacgtggactctgtgaagggcagattcaccatcagccgggacaacgccaagaagtccctgtacctccagatgaacagcctgagagccgaggacaccgccgtgtactattgtgcctctggcgtgtacagcttcgactacagaggccagggcaccctggtcacagtctcttctggtaccggcggaggcggatctggcggcggaggtagcggtggcggaggatctgaattcgagatcgtgctgacacagtctcccgccacactgtcactgtctccaggcgaaagagccacactgagctgtagagccagcagcaacgtgatctccagctacgtgcactggtatcagcagaagcctggacaggcccctcggctgctgatctacagcacaagcaatctggcctctggcatccccgccagattttctggctctggaagcggcaccgacttcaccctgaccataagcagcctggaacctgaggacttcgccgtgtactactgccagcagtatagcggctaccctctgaccttcggccagggcacaagactggaaatcaaactcgaggacctgaagaacgtgttcccacctgaggtggccgtgttcgagcctagcgaggccgagatcagccacacccagaaagccaccctcgtgtgcctggctaccggcttctaccccgaccatgtggaactgtcttggtgggtcaacggcaaagaggtgcacagcggcgtgtgtaccgacccccagccactgaaagaacagcccgccctgaacgacagccggtactgcctgagcagcagactgagagtgtccgccaccttctggcagaacccccggaaccacttcagatgccaggtgcagttctacggcctgagcgagaacgacgagtggacccaggacagagccaagcccgtgacccagatcgtgtctgccgaagcctggggcagagccgatgatgtgattaagatccactggcaggaaaagaagtccaacaccatcctgggcagccaggaaggcaacaccatgaagaccaacgacacctacatgaagttcagctggctgaccgtgcccgagaagtccctggacaaagaacacagatgcatcgtgcggcacgaaaacaacaagaacggcgtggaccaggaaatcatcttcccacccatcaagaccgatgtgattacaatggaccccaaggacaactgctccaaggacgccaacgataccctgctgctccagctgaccaacaccagcgcctactacatgtacttgttgctgctgctgaagtccgtggtgtacttcgccatcatcacatgctgcctgctgatggctatggtcaagcggaaggacagccggggaagggccaagcgatctggatctggagcaacaaacttctcactactcaaacaagcaggtgacgtggaggagaatcccgggcctactagtatggactggatttggcgcatccttttccttgtcggcgctgctaccggcgcgcattccttcgaagaagtgcaactggtggaaagtggcggcggactggtgcaacctggaagaagcctgagactgtcctgtgccgccagcggctactctatcacaagcgcctactactggaactgggtccgacaggctcctggcaaaggactggaatgggtgtcctacatcagctacgacggcagaaacaactacaaccccagcctgaagaaccgcttcaccatcagccgggacaacgccaagaagtccctgtacctccagatgaacagcctgagagccgaggacacagccctgtactattgcgccaaagagggcgactacgacgtcggcaactactacgctatggactactggggccagggaaccaccgtgactgtctcttctacgcgtatccagaaccctgatcctgccgtgtaccagctgcgggatagcaagagcagcgacaagagcgtgtgtctgttcaccgacttcgacagccagaccaacgtgtcccagagcaaggactccgacgtgtacatcaccgataagtgcgtgctggacatgcggagcatggacttcaagagcaactccgccgtggcctggtccaacaagtccgatttcgcctgcgccaacgccttcaacaacagcattatccccgaggacacattcttcccaagccccgagagcagcgactccaccgaccacgtgaagcccaaagagacagagaacaccaagcagcccagcaagagctgccacaagcccaaggccatcgtgcacaccgagaaagtgaacatgatgagcctgaccgtgctgggcctgcggatgctgttcgccaaaaccgtggccgtgaacttcctgctgaccgccaagctgttcttcctcctcaccgcc

SEQ ID NO: 6462 - DNA, 2586 bp, synthetic construct
  source 1..2586: mol_type = other DNA
atggccttaccagtgaccgccttgctcctgccgctggccttgctgctccacgccgccaggccggaagtgcagctggttgaatctggcggaggactggttcagcctggcggatctctgagactgtcttgtgccgccagcggcttcagcttcagcgacttttggatgagctgggtccgacaggcccctggcaaaggacttgaatgggtcgccacaatcagccaggccggcagcgagaaggactacgtggactctgtgaagggcagattcaccatcagccgggacaacgccaagaagtccctgtacctccagatgaacagcctgagagccgaggacaccgccgtgtactattgtgcctctggcgtgtacagcttcgactacagaggccagggcaccctggtcacagtctcttctggtaccggcggaggcggatctggcggcggaggtagcggtggcggaggatctgaattcgacgtggtcatgacacagaccccactgagcctgcctgtgtctctgggagatcaggccagcatctcctgtagaagcagccagagcctggtgcacagcaacggcaacacctacctgcggtggtatctccagaagcctggacagagccccaaggtgctgatctacaaggtgtccaacagagtgtccggcgtgcccgatagattttctggcagcggctctggcaccgacttcaccctgaagatcaatagagtggaagccgaggacctgggcgtgtacttctgtagccagagcacccatgtgccttggacctttggcggaggcaccaagctggaaatcaagctcgaggacctgaagaacgtgttcccacctgaggtggccgtgttcgagcctagcgaggccgagatcagccacacccagaaagccaccctcgtgtgcctggctaccggcttctaccccgaccatgtggaactgtcttggtgggtcaacggcaaagaggtgcacagcggcgtgtgtaccgacccccagccactgaaagaacagcccgccctgaacgacagccggtactgcctgagcagcagactgagagtgtccgccaccttctggcagaacccccggaaccacttcagatgccaggtgcagttctacggcctgagcgagaacgacgagtggacccaggacagagccaagcccgtgacccagatcgtgtctgccgaagcctggggcagagccgatgatgtgattaagatccactggcaggaaaagaagtccaacaccatcctgggcagccaggaaggcaacaccatgaagaccaacgacacctacatgaagttcagctggctgaccgtgcccgagaagtccctggacaaagaacacagatgcatcgtgcggcacgaaaacaacaagaacggcgtggaccaggaaatcatcttcccacccatcaagaccgatgtgattacaatggaccccaaggacaactgctccaaggacgccaacgataccctgctgctccagctgaccaacaccagcgcctactacatgtacttgttgctgctgctgaagtccgtggtgtacttcgccatcatcacatgctgcctgctgatggctatggtcaagcggaaggacagccggggaagggccaagcgatctggatctggagcaacaaacttctcactactcaaacaagcaggtgacgtggaggagaatcccgggcctactagtatggactggatttggcgcatccttttccttgtcggcgctgctaccggcgcgcattccttcgaaggcgtgaagctggacgagacaggcggaggacttgttcaacctggcggagccatgaagctgagctgtgtgaccagcggctttaccttcggccactactggatgaactgggtccgacagtcccctgagaaaggactggaatgggtcgcccagttcagaaacaagccctacaactacgaaacctactacagcgacagcgtgaagggcagattcaccatcagccgggacgacagcaagtccagcgtgtacctccagatgaacaacctgcgcgtggaagataccggcatctactactgtaccggggccagctacggcatggaatatctcggccagggcaccagcgtgaccgtgtctacaacgcgtatccagaaccctgatcctgccgtgtaccagctgcgggatagcaagagcagcgacaagagcgtgtgtctgttcaccgacttcgacagccagaccaacgtgtcccagagcaaggactccgacgtgtacatcaccgataagtgcgtgctggacatgcggagcatggacttcaagagcaactccgccgtggcctggtccaacaagtccgatttcgcctgcgccaacgccttcaacaacagcattatccccgaggacacattcttcccaagccccgagagcagcgactccaccgaccacgtgaagcccaaagagacagagaacaccaagcagcccagcaagagctgccacaagcccaaggccatcgtgcacaccgagaaagtgaacatgatgagcctgaccgtgctgggcctgcggatgctgttcgccaaaaccgtggccgtgaacttcctgctgaccgccaagctgttcttcctcctcaccgcc

SEQ ID NO: 6463 - DNA, 2604 bp, synthetic construct
  source 1..2604: mol_type = other DNA
atggccttaccagtgaccgccttgctcctgccgctggccttgctgctccacgccgccaggccggaagtgcagctggttgaatctggcggaggactggttcagcctggcggatctctgagactgtcttgtgccgccagcggcttcagcttcagcgacttttggatgagctgggtccgacaggcccctggcaaaggacttgaatgggtcgccacaatcagccaggccggcagcgagaaggactacgtggactctgtgaagggcagattcaccatcagccgggacaacgccaagaagtccctgtacctccagatgaacagcctgagagccgaggacaccgccgtgtactattgtgcctctggcgtgtacagcttcgactacagaggccagggcaccctggtcacagtctcttctggtaccggcggaggcggatctggcggcggaggtagcggtggcggaggatctgaattccaggtgcaactggtggaatctggcggcaatctggttcagcctggcggctctctgagactgtcttgtgccgccagcggcttcaccttcggcagcttttctatgagctgggtccgacaagctcctggcggaggacttgaatgggtggcaggactgtctgccagaagcagcctgacacactacgccgactctgtgaagggcagattcaccatcagccgggacaacgccaagaacagcgtgtacctccagatgaacagcctgagagtggaagataccgccgtgtactactgcgccagaagaagctacgacagcagcggctactggggccacttctacagctacatggatgtgtggggccagggcaccctggttacagtttctctcgaggacctgaagaacgtgttcccacctgaggtggccgtgttcgagcctagcgaggccgagatcagccacacccagaaagccaccctcgtgtgcctggctaccggcttctaccccgaccatgtggaactgtcttggtgggtcaacggcaaagaggtgcacagcggcgtgtgtaccgacccccagccactgaaagaacagcccgccctgaacgacagccggtactgcctgagcagcagactgagagtgtccgccaccttctggcagaacccccggaaccacttcagatgccaggtgcagttctacggcctgagcgagaacgacgagtggacccaggacagagccaagcccgtgacccagatcgtgtctgccgaagcctggggcagagccgatgatgtgattaagatccactggcaggaaaagaagtccaacaccatcctgggcagccaggaaggcaacaccatgaagaccaacgacacctacatgaagttcagctggctgaccgtgcccgagaagtccctggacaaagaacacagatgcatcgtgcggcacgaaaacaacaagaacggcgtggaccaggaaatcatcttcccacccatcaagaccgatgtgattacaatggaccccaaggacaactgctccaaggacgccaacgataccctgctgctccagctgaccaacaccagcgcctactacatgtacttgttgctgctgctgaagtccgtggtgtacttcgccatcatcacatgctgcctgctgatggctatggtcaagcggaaggacagccggggaagggccaagcgatctggatctggagcaacaaacttctcactactcaaacaagcaggtgacgtggaggagaatcccgggcctactagtatggactggatttggcgcatccttttccttgtcggcgctgctaccggcgcgcattccttcgaatctgtgctgacccagcctagctccgtgtctgctgctcctggacagaaagtgaccatctcctgtagcggcagcaccagcaacatcggcaacaactacgtgtcctggtatcagcagcaccccggcaaggcccctaagctgatgatctacgacgtgtccaagaggcccagcggcgtgccagatagattttccggcagcaagagcggcaacagcgccagcctggatattagcggactccagtctgaggacgaggccgactactattgcgccgcctgggatgatagcctgagcgagtttctgtttggcaccggcaccaagctgacagtgcttggaacgcgtatccagaaccctgatcctgccgtgtaccagctgcgggatagcaagagcagcgacaagagcgtgtgtctgttcaccgacttcgacagccagaccaacgtgtcccagagcaaggactccgacgtgtacatcaccgataagtgcgtgctggacatgcggagcatggacttcaagagcaactccgccgtggcctggtccaacaagtccgatttcgcctgcgccaacgccttcaacaacagcattatccccgaggacacattcttcccaagccccgagagcagcgactccaccgaccacgtgaagcccaaagagacagagaacaccaagcagcccagcaagagctgccacaagcccaaggccatcgtgcacaccgagaaagtgaacatgatgagcctgaccgtgctgggcctgcggatgctgttcgccaaaaccgtggccgtgaacttcctgctgaccgccaagctgttcttcctcctcaccgcc

SEQ ID NO: 6464 - DNA, 2589 bp, synthetic construct
  source 1..2589: mol_type = other DNA
atggccttaccagtgaccgccttgctcctgccgctggccttgctgctccacgccgccaggccggaagtgcagctggttgaatctggcggaggactggttcagcctggcggatctctgagactgtcttgtgccgccagcggcttcagcttcagcgacttttggatgagctgggtccgacaggcccctggcaaaggacttgaatgggtcgccacaatcagccaggccggcagcgagaaggactacgtggactctgtgaagggcagattcaccatcagccgggacaacgccaagaagtccctgtacctccagatgaacagcctgagagccgaggacaccgccgtgtactattgtgcctctggcgtgtacagcttcgactacagaggccagggcaccctggtcacagtctcttctggtaccggcggaggcggatctggcggcggaggtagcggtggcggaggatctgaattcgacgtggtcatgacacagagcccttctagcctgtctgccagcgtgggcgacagagtgacaatcacctgtcagagcagcctggacatcagccactacctgaactggtatcagcagaagcccggcaaggcccctaagctgctgatctacgacgccagcaatctggaaaccggcgtgcccagcagattttctggcagcggaagcggcacccacttcaccttcacaatatccagcctccagcctgaggacttcgccacctactactgccagcagtacgacaacctgcctctgacctttggcggaggcaccaagctggaaatcaagagactcgaggacctgaagaacgtgttcccacctgaggtggccgtgttcgagcctagcgaggccgagatcagccacacccagaaagccaccctcgtgtgcctggctaccggcttctaccccgaccatgtggaactgtcttggtgggtcaacggcaaagaggtgcacagcggcgtgtgtaccgacccccagccactgaaagaacagcccgccctgaacgacagccggtactgcctgagcagcagactgagagtgtccgccaccttctggcagaacccccggaaccacttcagatgccaggtgcagttctacggcctgagcgagaacgacgagtggacccaggacagagccaagcccgtgacccagatcgtgtctgccgaagcctggggcagagccgatgatgtgattaagatccactggcaggaaaagaagtccaacaccatcctgggcagccaggaaggcaacaccatgaagaccaacgacacctacatgaagttcagctggctgaccgtgcccgagaagtccctggacaaagaacacagatgcatcgtgcggcacgaaaacaacaagaacggcgtggaccaggaaatcatcttcccacccatcaagaccgatgtgattacaatggaccccaaggacaactgctccaaggacgccaacgataccctgctgctccagctgaccaacaccagcgcctactacatgtacttgttgctgctgctgaagtccgtggtgtacttcgccatcatcacatgctgcctgctgatggctatggtcaagcggaaggacagccggggaagggccaagcgatctggatctggagcaacaaacttctcactactcaaacaagcaggtgacgtggaggagaatcccgggcctactagtatggactggatttggcgcatccttttccttgtcggcgctgctaccggcgcgcattccttcgaacaagttcaactggttcaatcaggcggaggcgtggtgcaacctggtggctctctgagagtgtcttgtgctgcctctggcgtgaccctgagcgactatggaatgcactgggtccgacaggcccctggcaaaggacttgagtgggtcgccttcatcagaaacgacggcagcgacaagtattacgccgacagcgtgaagggcagattcaccatcagccgggacaacagcgagaaaaccgtgtctctccagatgtctagcctgagagccgaggacaccgccgtgtactactgtgccaagaatggcgagagcggccctctggactactggtatctggatctgtggggcagaggcaccctggtcacagtctcttctacgcgtatccagaaccctgatcctgccgtgtaccagctgcgggatagcaagagcagcgacaagagcgtgtgtctgttcaccgacttcgacagccagaccaacgtgtcccagagcaaggactccgacgtgtacatcaccgataagtgcgtgctggacatgcggagcatggacttcaagagcaactccgccgtggcctggtccaacaagtccgatttcgcctgcgccaacgccttcaacaacagcattatccccgaggacacattcttcccaagccccgagagcagcgactccaccgaccacgtgaagcccaaagagacagagaacaccaagcagcccagcaagagctgccacaagcccaaggccatcgtgcacaccgagaaagtgaacatgatgagcctgaccgtgctgggcctgcggatgctgttcgccaaaaccgtggccgtgaacttcctgctgaccgccaagctgttcttcctcctcaccgcc

SEQ ID NO: 6465 - DNA, 2601 bp, synthetic construct
  source 1..2601: mol_type = other DNA
atggccttaccagtgaccgccttgctcctgccgctggccttgctgctccacgccgccaggccggaagtgcagctggttgaatctggcggaggactggttcagcctggcggatctctgagactgtcttgtgccgccagcggcttcagcttcagcgacttttggatgagctgggtccgacaggcccctggcaaaggacttgaatgggtcgccacaatcagccaggccggcagcgagaaggactacgtggactctgtgaagggcagattcaccatcagccgggacaacgccaagaagtccctgtacctccagatgaacagcctgagagccgaggacaccgccgtgtactattgtgcctctggcgtgtacagcttcgactacagaggccagggcaccctggtcacagtctcttctggtaccggcggaggcggatctggcggcggaggtagcggtggcggaggatctgaattcagctacgagctgacacagcctccatccgtgtctggcacacctggacagagagtggctatctcctgtagcggcagcagcagcaacatcggcaccagaatggtcacctggtatcagcacgtgccaggcacagcccctaagctgctgatcttcaacaacaaccagcggcctagcggcgtgcccgatagattttctgccagcaagagcggcacaagcgccagcctggctatcatcggactccagtctgacgacgaggccgactactactgtgccacctgggacgacaacgtgaagtcctacgtgttcggcaccggcaccaaagtgacagtgcttggaagtagactcgaggacctgaagaacgtgttcccacctgaggtggccgtgttcgagcctagcgaggccgagatcagccacacccagaaagccaccctcgtgtgcctggctaccggcttctaccccgaccatgtggaactgtcttggtgggtcaacggcaaagaggtgcacagcggcgtgtgtaccgacccccagccactgaaagaacagcccgccctgaacgacagccggtactgcctgagcagcagactgagagtgtccgccaccttctggcagaacccccggaaccacttcagatgccaggtgcagttctacggcctgagcgagaacgacgagtggacccaggacagagccaagcccgtgacccagatcgtgtctgccgaagcctggggcagagccgatgatgtgattaagatccactggcaggaaaagaagtccaacaccatcctgggcagccaggaaggcaacaccatgaagaccaacgacacctacatgaagttcagctggctgaccgtgcccgagaagtccctggacaaagaacacagatgcatcgtgcggcacgaaaacaacaagaacggcgtggaccaggaaatcatcttcccacccatcaagaccgatgtgattacaatggaccccaaggacaactgctccaaggacgccaacgataccctgctgctccagctgaccaacaccagcgcctactacatgtacttgttgctgctgctgaagtccgtggtgtacttcgccatcatcacatgctgcctgctgatggctatggtcaagcggaaggacagccggggaagggccaagcgatctggatctggagcaacaaacttctcactactcaaacaagcaggtgacgtggaggagaatcccgggcctactagtatggactggatttggcgcatccttttccttgtcggcgctgctaccggcgcgcattccttcgaacttgaaatggcccaggttcagctccagcagtggggagctggactgctgaagcctagcgagacactgagcctgacctgtgctgtgtacggcggcagcttcagcggctactactggtcctggatcagacagcctcctggcaaaggactggaatggatcggcgagatcaaccacagcggctccaccaactacaaccccagcctgaagtccagagtgaccatcagcgtggacaccagcaagaaccagttctccctgaagctgagcagcgtgacagccgctgataccgccgtgtactattgcgctagagcccctcagtcttggtacgtgggagatgtgtggggccagggcacactggttacagtgtcatctacgcgtatccagaaccctgatcctgccgtgtaccagctgcgggatagcaagagcagcgacaagagcgtgtgtctgttcaccgacttcgacagccagaccaacgtgtcccagagcaaggactccgacgtgtacatcaccgataagtgcgtgctggacatgcggagcatggacttcaagagcaactccgccgtggcctggtccaacaagtccgatttcgcctgcgccaacgccttcaacaacagcattatccccgaggacacattcttcccaagccccgagagcagcgactccaccgaccacgtgaagcccaaagagacagagaacaccaagcagcccagcaagagctgccacaagcccaaggccatcgtgcacaccgagaaagtgaacatgatgagcctgaccgtgctgggcctgcggatgctgttcgccaaaaccgtggccgtgaacttcctgctgaccgccaagctgttcttcctcctcaccgcc

SEQ ID NO: 6466 - DNA, 2592 bp, synthetic construct
  source 1..2592: mol_type = other DNA
atggccttaccagtgaccgccttgctcctgccgctggccttgctgctccacgccgccaggccggaagtgcagctggttgaatctggcggaggactggttcagcctggcggatctctgagactgtcttgtgccgccagcggcttcagcttcagcgacttttggatgagctgggtccgacaggcccctggcaaaggacttgaatgggtcgccacaatcagccaggccggcagcgagaaggactacgtggactctgtgaagggcagattcaccatcagccgggacaacgccaagaagtccctgtacctccagatgaacagcctgagagccgaggacaccgccgtgtactattgtgcctctggcgtgtacagcttcgactacagaggccagggcaccctggtcacagtctcttctggtaccggcggaggcggatctggcggcggaggtagcggtggcggaggatctgaattccagtctgtgctgacacagcctcctagcctgtctgtggcccctggaaagacagccagcatcacatgcggcggcaacaacatcggcatgaagtccgtgcactggtatcagcagaggccaggacaggctcctgtgctggtcatctactacgacagcgacagaccctctggcatccccggcagattttccggcagcaactctggcaataccgccacactgaccatctccagagtggaagctggcgacgaggccgactactactgccaagtgtgggataccaccggcgatcaccctggctatgtgtttggcaccggcaccaaagtgacagtgcttctcgaggacctgaagaacgtgttcccacctgaggtggccgtgttcgagcctagcgaggccgagatcagccacacccagaaagccaccctcgtgtgcctggctaccggcttctaccccgaccatgtggaactgtcttggtgggtcaacggcaaagaggtgcacagcggcgtgtgtaccgacccccagccactgaaagaacagcccgccctgaacgacagccggtactgcctgagcagcagactgagagtgtccgccaccttctggcagaacccccggaaccacttcagatgccaggtgcagttctacggcctgagcgagaacgacgagtggacccaggacagagccaagcccgtgacccagatcgtgtctgccgaagcctggggcagagccgatgatgtgattaagatccactggcaggaaaagaagtccaacaccatcctgggcagccaggaaggcaacaccatgaagaccaacgacacctacatgaagttcagctggctgaccgtgcccgagaagtccctggacaaagaacacagatgcatcgtgcggcacgaaaacaacaagaacggcgtggaccaggaaatcatcttcccacccatcaagaccgatgtgattacaatggaccccaaggacaactgctccaaggacgccaacgataccctgctgctccagctgaccaacaccagcgcctactacatgtacttgttgctgctgctgaagtccgtggtgtacttcgccatcatcacatgctgcctgctgatggctatggtcaagcggaaggacagccggggaagggccaagcgatctggatctggagcaacaaacttctcactactcaaacaagcaggtgacgtggaggagaatcccgggcctactagtatggactggatttggcgcatccttttccttgtcggcgctgctaccggcgcgcattccttcgaacaagttcaactggttcagagcggagccgaagtgaagaaacctggcagcagcgtgaaggtgtcctgcaaagcaagcggcggcacctttagcagctacgccatctcttgggtccgacaggcacctggacaaggactggaatggatgggcggcatcatccccatcttcggcacagccaattacgcccagaaattccagggcagagtgaccatcaccgccgacgagtctacaagcaccgcctacatggaactgagcagcctgagaagcgaggacaccgccgtgtactattgtgccagaggcgtgtacggctacagcggctctgccccttatgatgagtggggccagggaaccctggtcaccgtttcttctacgcgtatccagaaccctgatcctgccgtgtaccagctgcgggatagcaagagcagcgacaagagcgtgtgtctgttcaccgacttcgacagccagaccaacgtgtcccagagcaaggactccgacgtgtacatcaccgataagtgcgtgctggacatgcggagcatggacttcaagagcaactccgccgtggcctggtccaacaagtccgatttcgcctgcgccaacgccttcaacaacagcattatccccgaggacacattcttcccaagccccgagagcagcgactccaccgaccacgtgaagcccaaagagacagagaacaccaagcagcccagcaagagctgccacaagcccaaggccatcgtgcacaccgagaaagtgaacatgatgagcctgaccgtgctgggcctgcggatgctgttcgccaaaaccgtggccgtgaacttcctgctgaccgccaagctgttcttcctcctcaccgcc

SEQ ID NO: 6467 - DNA, 2586 bp, synthetic construct
  source 1..2586: mol_type = other DNA
atggccttaccagtgaccgccttgctcctgccgctggccttgctgctccacgccgccaggccggaagtgcagctggttgaatctggcggaggactggttcagcctggcggatctctgagactgtcttgtgccgccagcggcttcagcttcagcgacttttggatgagctgggtccgacaggcccctggcaaaggacttgaatgggtcgccacaatcagccaggccggcagcgagaaggactacgtggactctgtgaagggcagattcaccatcagccgggacaacgccaagaagtccctgtacctccagatgaacagcctgagagccgaggacaccgccgtgtactattgtgcctctggcgtgtacagcttcgactacagaggccagggcaccctggtcacagtctcttctggtaccggcggaggcggatctggcggcggaggtagcggtggcggaggatctgaattcgaggtgcaactggttgagtctggcggaggactggtgcagcctggaagaagcctgagactgtcttgtgccgccagcggcttcaccttcgacgattatgccatgcactgggtccgacaggcccctggcaaaggacttgaatgggtgtccggcatctcctggaacagcggctctatcggctacgccgattccgtgaagggcagattcaccatcagccgggacaacgccaagaacagcctgtacctccagatgaactccctgagagccgaggacacagccctgtactactgcgccaaagacaaaggcggaggctactacgacttttggagcggcagcgattattggggccagggcacactggtcacagtgtctagcctcgaggacctgaagaacgtgttcccacctgaggtggccgtgttcgagcctagcgaggccgagatcagccacacccagaaagccaccctcgtgtgcctggctaccggcttctaccccgaccatgtggaactgtcttggtgggtcaacggcaaagaggtgcacagcggcgtgtgtaccgacccccagccactgaaagaacagcccgccctgaacgacagccggtactgcctgagcagcagactgagagtgtccgccaccttctggcagaacccccggaaccacttcagatgccaggtgcagttctacggcctgagcgagaacgacgagtggacccaggacagagccaagcccgtgacccagatcgtgtctgccgaagcctggggcagagccgatgatgtgattaagatccactggcaggaaaagaagtccaacaccatcctgggcagccaggaaggcaacaccatgaagaccaacgacacctacatgaagttcagctggctgaccgtgcccgagaagtccctggacaaagaacacagatgcatcgtgcggcacgaaaacaacaagaacggcgtggaccaggaaatcatcttcccacccatcaagaccgatgtgattacaatggaccccaaggacaactgctccaaggacgccaacgataccctgctgctccagctgaccaacaccagcgcctactacatgtacttgttgctgctgctgaagtccgtggtgtacttcgccatcatcacatgctgcctgctgatggctatggtcaagcggaaggacagccggggaagggccaagcgatctggatctggagcaacaaacttctcactactcaaacaagcaggtgacgtggaggagaatcccgggcctactagtatggactggatttggcgcatccttttccttgtcggcgctgctaccggcgcgcattccttcgaatcttctgagctgacacaggaccctgccgtgtctgttgctctgggccagacagtgcggattacctgtcagggcgatagcctgagaagctactacgcctcctggtatcagcagaagccaggccaggctcctgtgctggtcatctacggcaagaacaacagacccagcggcatccccgatagattcagcggaagcagctctggcaataccgccagcctgacaattactggcgctcaggccgaggacgaggccgactactactgcaacagcagagatagcagcggctgggttttcggcggaggcacaaaactgacagtgctgacgcgtatccagaaccctgatcctgccgtgtaccagctgcgggatagcaagagcagcgacaagagcgtgtgtctgttcaccgacttcgacagccagaccaacgtgtcccagagcaaggactccgacgtgtacatcaccgataagtgcgtgctggacatgcggagcatggacttcaagagcaactccgccgtggcctggtccaacaagtccgatttcgcctgcgccaacgccttcaacaacagcattatccccgaggacacattcttcccaagccccgagagcagcgactccaccgaccacgtgaagcccaaagagacagagaacaccaagcagcccagcaagagctgccacaagcccaaggccatcgtgcacaccgagaaagtgaacatgatgagcctgaccgtgctgggcctgcggatgctgttcgccaaaaccgtggccgtgaacttcctgctgaccgccaagctgttcttcctcctcaccgcc

SEQ ID NO: 6468 - DNA, 2613 bp, synthetic construct
  source 1..2613: mol_type = other DNA
atggccttaccagtgaccgccttgctcctgccgctggccttgctgctccacgccgccaggccggaagtgcagctggttgaatctggcggaggactggttcagcctggcggatctctgagactgtcttgtgccgccagcggcttcagcttcagcgacttttggatgagctgggtccgacaggcccctggcaaaggacttgaatgggtcgccacaatcagccaggccggcagcgagaaggactacgtggactctgtgaagggcagattcaccatcagccgggacaacgccaagaagtccctgtacctccagatgaacagcctgagagccgaggacaccgccgtgtactattgtgcctctggcgtgtacagcttcgactacagaggccagggcaccctggtcacagtctcttctggtaccggcggaggcggatctggcggcggaggtagcggtggcggaggatctgaattcgaagtgcagctccagcagtctggacctggcctggttaagcctagccagacactgagcctgacctgtgccatcagcggcgatagcgtgctgagcaacagcgacacctggaactggatcagacagagccctagcagaggactggaatggctgggcagaacctaccacagaagcacttggtacgacgactacgccagctctgtgcggggcagagtgtccatcaatgtggacaccagcaagaaccagtacagcctgcaactgaacgccgtgacacctgaggataccggcgtgtactactgcgccagagacagactccaggacggcaactcttggagcgacgcctttgatgtgtggggccagggcacaatggtcaccgtttctagcctcgaggacctgaagaacgtgttcccacctgaggtggccgtgttcgagcctagcgaggccgagatcagccacacccagaaagccaccctcgtgtgcctggctaccggcttctaccccgaccatgtggaactgtcttggtgggtcaacggcaaagaggtgcacagcggcgtgtgtaccgacccccagccactgaaagaacagcccgccctgaacgacagccggtactgcctgagcagcagactgagagtgtccgccaccttctggcagaacccccggaaccacttcagatgccaggtgcagttctacggcctgagcgagaacgacgagtggacccaggacagagccaagcccgtgacccagatcgtgtctgccgaagcctggggcagagccgatgatgtgattaagatccactggcaggaaaagaagtccaacaccatcctgggcagccaggaaggcaacaccatgaagaccaacgacacctacatgaagttcagctggctgaccgtgcccgagaagtccctggacaaagaacacagatgcatcgtgcggcacgaaaacaacaagaacggcgtggaccaggaaatcatcttcccacccatcaagaccgatgtgattacaatggaccccaaggacaactgctccaaggacgccaacgataccctgctgctccagctgaccaacaccagcgcctactacatgtacttgttgctgctgctgaagtccgtggtgtacttcgccatcatcacatgctgcctgctgatggctatggtcaagcggaaggacagccggggaagggccaagcgatctggatctggagcaacaaacttctcactactcaaacaagcaggtgacgtggaggagaatcccgggcctactagtatggactggatttggcgcatccttttccttgtcggcgctgctaccggcgcgcattccttcgaacaatctgctctgacacagcctgccagcgtgtcaggatctcctggacagagcatcaccatctcttgcaccggcaccagctctgatgtcggcggctacaattacgtgtcctggtatcagcagcaccccggcaaggcccctaagctgatgatctacgacgtgtccaacagacccagcggcgtgtccaatagattctccggcagcaagagcggcaacaccgccagcctgacaatttctggactgcaagccgaggacgaggccgactactactgtagcagctacaccagcagcagcacactggtgtacgtgttcggcacaggcaccaaagtgaccgtgcttacgcgtatccagaaccctgatcctgccgtgtaccagctgcgggatagcaagagcagcgacaagagcgtgtgtctgttcaccgacttcgacagccagaccaacgtgtcccagagcaaggactccgacgtgtacatcaccgataagtgcgtgctggacatgcggagcatggacttcaagagcaactccgccgtggcctggtccaacaagtccgatttcgcctgcgccaacgccttcaacaacagcattatccccgaggacacattcttcccaagccccgagagcagcgactccaccgaccacgtgaagcccaaagagacagagaacaccaagcagcccagcaagagctgccacaagcccaaggccatcgtgcacaccgagaaagtgaacatgatgagcctgaccgtgctgggcctgcggatgctgttcgccaaaaccgtggccgtgaacttcctgctgaccgccaagctgttcttcctcctcaccgcc

SEQ ID NO: 6469 - DNA, 2547 bp, synthetic construct
  source 1..2547: mol_type = other DNA
atggccttaccagtgaccgccttgctcctgccgctggccttgctgctccacgccgccaggccggaagtgcagctggttgaatctggcggaggactggttcagcctggcggatctctgagactgtcttgtgccgccagcggcttcagcttcagcgacttttggatgagctgggtccgacaggcccctggcaaaggacttgaatgggtcgccacaatcagccaggccggcagcgagaaggactacgtggactctgtgaagggcagattcaccatcagccgggacaacgccaagaagtccctgtacctccagatgaacagcctgagagccgaggacaccgccgtgtactattgtgcctctggcgtgtacagcttcgactacagaggccagggcaccctggtcacagtctcttctggtaccggcggaggcggatctggcggcggaggtagcggtggcggaggatctgaattccaggtgcaactggttcagtctggggccgaagtgaagaaacctggggcctctgtgaaggtgtcctgcaaggcttccggctacacctttaccagctacgacatcaactgggtccgacaggccacaggccaaggactggaatggatgggctggatgaaccccaacagcggcaataccggctacgcccagaaattccagggcagagtgaccatgaccagaaacaccagcatcagcaccgcctacatggaactgagcagcctgagaagcgaggacaccgccgtgtactattgcgccagaggcgacagcaccaaggtggaaatcaaactcgaggacctgaagaacgtgttcccacctgaggtggccgtgttcgagcctagcgaggccgagatcagccacacccagaaagccaccctcgtgtgcctggctaccggcttctaccccgaccatgtggaactgtcttggtgggtcaacggcaaagaggtgcacagcggcgtgtgtaccgacccccagccactgaaagaacagcccgccctgaacgacagccggtactgcctgagcagcagactgagagtgtccgccaccttctggcagaacccccggaaccacttcagatgccaggtgcagttctacggcctgagcgagaacgacgagtggacccaggacagagccaagcccgtgacccagatcgtgtctgccgaagcctggggcagagccgatgatgtgattaagatccactggcaggaaaagaagtccaacaccatcctgggcagccaggaaggcaacaccatgaagaccaacgacacctacatgaagttcagctggctgaccgtgcccgagaagtccctggacaaagaacacagatgcatcgtgcggcacgaaaacaacaagaacggcgtggaccaggaaatcatcttcccacccatcaagaccgatgtgattacaatggaccccaaggacaactgctccaaggacgccaacgataccctgctgctccagctgaccaacaccagcgcctactacatgtacttgttgctgctgctgaagtccgtggtgtacttcgccatcatcacatgctgcctgctgatggctatggtcaagcggaaggacagccggggaagggccaagcgatctggatctggagcaacaaacttctcactactcaaacaagcaggtgacgtggaggagaatcccgggcctactagtatggactggatttggcgcatccttttccttgtcggcgctgctaccggcgcgcattccttcgaacaatctgtgctgacccagcctagatccgtgtctggctctcctggacagagcgtgaccatctcttgtaccggcaccagctctgatgtcggcggctacaattacgtgtcctggtatcagcagcaccccggcgaagcccctaagctgattatctacgacgccgacaagcggcccagcggcatcagcaatagattcagctctggcaagagcggcaacaccgccagcctgacaatcagcggactccaggtggaagatgaggccgactactactgctgctcctatgccggcggaagcacctgggttttcggaggcggtacaaaagtgaccgtgctgacgcgtatccagaaccctgatcctgccgtgtaccagctgcgggatagcaagagcagcgacaagagcgtgtgtctgttcaccgacttcgacagccagaccaacgtgtcccagagcaaggactccgacgtgtacatcaccgataagtgcgtgctggacatgcggagcatggacttcaagagcaactccgccgtggcctggtccaacaagtccgatttcgcctgcgccaacgccttcaacaacagcattatccccgaggacacattcttcccaagccccgagagcagcgactccaccgaccacgtgaagcccaaagagacagagaacaccaagcagcccagcaagagctgccacaagcccaaggccatcgtgcacaccgagaaagtgaacatgatgagcctgaccgtgctgggcctgcggatgctgttcgccaaaaccgtggccgtgaacttcctgctgaccgccaagctgttcttcctcctcaccgcc

SEQ ID NO: 6470 - DNA, 2613 bp, synthetic construct
  source 1..2613: mol_type = other DNA
atggccttaccagtgaccgccttgctcctgccgctggccttgctgctccacgccgccaggccggaagtgcagctggttgaatctggcggaggactggttcagcctggcggatctctgagactgtcttgtgccgccagcggcttcagcttcagcgacttttggatgagctgggtccgacaggcccctggcaaaggacttgaatgggtcgccacaatcagccaggccggcagcgagaaggactacgtggactctgtgaagggcagattcaccatcagccgggacaacgccaagaagtccctgtacctccagatgaacagcctgagagccgaggacaccgccgtgtactattgtgcctctggcgtgtacagcttcgactacagaggccagggcaccctggtcacagtctcttctggtaccggcggaggcggatctggcggcggaggtagcggtggcggaggatctgaattcgaagtgcagctccagcagtctggacctggcctggttaagcctagccagacactgagcctgacctgtgccatcagcggcgatagcgtgtcctctaatagcgccgcctggaactggatcagacagagccctagcagaggactggaatggctgggcagaacctactaccgcagcaagtggtacagcgactacgccgtgtccgtgaagtcccggatcaccatcaatcccgacaccagcaagaaccagttcagcctgcaactgaacagcgtgacccctgaggataccgccgtgtactactgcgccagagatccctacgacttttggagcggctaccccgacgcctttgacatctggggacagggcacaatggtcaccgtttctagcctcgaggacctgaagaacgtgttcccacctgaggtggccgtgttcgagcctagcgaggccgagatcagccacacccagaaagccaccctcgtgtgcctggctaccggcttctaccccgaccatgtggaactgtcttggtgggtcaacggcaaagaggtgcacagcggcgtgtgtaccgacccccagccactgaaagaacagcccgccctgaacgacagccggtactgcctgagcagcagactgagagtgtccgccaccttctggcagaacccccggaaccacttcagatgccaggtgcagttctacggcctgagcgagaacgacgagtggacccaggacagagccaagcccgtgacccagatcgtgtctgccgaagcctggggcagagccgatgatgtgattaagatccactggcaggaaaagaagtccaacaccatcctgggcagccaggaaggcaacaccatgaagaccaacgacacctacatgaagttcagctggctgaccgtgcccgagaagtccctggacaaagaacacagatgcatcgtgcggcacgaaaacaacaagaacggcgtggaccaggaaatcatcttcccacccatcaagaccgatgtgattacaatggaccccaaggacaactgctccaaggacgccaacgataccctgctgctccagctgaccaacaccagcgcctactacatgtacttgttgctgctgctgaagtccgtggtgtacttcgccatcatcacatgctgcctgctgatggctatggtcaagcggaaggacagccggggaagggccaagcgatctggatctggagcaacaaacttctcactactcaaacaagcaggtgacgtggaggagaatcccgggcctactagtatggactggatttggcgcatccttttccttgtcggcgctgctaccggcgcgcattccttcgaacaatctgctctgacacagcctgccagcgtgtcaggatctcctggacagagcatcaccatctcttgcaccggcaccagctctgatgtcggcggctacaattacgtgtcctggtatcagcagcaccccggcaaggcccctaaagtgattatcagcgaagtgaacaacagacccagcggcgtgtcccacagattcagcggctctaagtctggcaacaccgccagcctgacaatctctggactgcaagccgaggacgaggccgactacttctgtagcagctacaccagcggcagaaccctgtacgtgttcggcacaggcagcaaagtgacagtgctgggaacgcgtatccagaaccctgatcctgccgtgtaccagctgcgggatagcaagagcagcgacaagagcgtgtgtctgttcaccgacttcgacagccagaccaacgtgtcccagagcaaggactccgacgtgtacatcaccgataagtgcgtgctggacatgcggagcatggacttcaagagcaactccgccgtggcctggtccaacaagtccgatttcgcctgcgccaacgccttcaacaacagcattatccccgaggacacattcttcccaagccccgagagcagcgactccaccgaccacgtgaagcccaaagagacagagaacaccaagcagcccagcaagagctgccacaagcccaaggccatcgtgcacaccgagaaagtgaacatgatgagcctgaccgtgctgggcctgcggatgctgttcgccaaaaccgtggccgtgaacttcctgctgaccgccaagctgttcttcctcctcaccgcc

SEQ ID NO: 6471 - DNA, 2610 bp, synthetic construct
  source 1..2610: mol_type = other DNA
atggccttaccagtgaccgccttgctcctgccgctggccttgctgctccacgccgccaggccggaagtgcagctggttgaatctggcggaggactggttcagcctggcggatctctgagactgtcttgtgccgccagcggcttcagcttcagcgacttttggatgagctgggtccgacaggcccctggcaaaggacttgaatgggtcgccacaatcagccaggccggcagcgagaaggactacgtggactctgtgaagggcagattcaccatcagccgggacaacgccaagaagtccctgtacctccagatgaacagcctgagagccgaggacaccgccgtgtactattgtgcctctggcgtgtacagcttcgactacagaggccagggcaccctggtcacagtctcttctggtaccggcggaggcggatctggcggcggaggtagcggtggcggaggatctgaattccaatctgctctgacacagcctgccagcgcctctggatctcctggacagagcgtgaccatctcctgtaccggcacctcttctgatgtcggcggctacaactacgtgtcctggtatcagcagcaccccggcaaggcccctaagctgatgatctacgacgtgtccaacagacccagcggcgtgtccaatagattctccggcagcaagagcggcaacaccgccagcctgacaatttctggactgcaagccgaggacgaggccgactactactgtagcagctacaccagcagcagcacactgtacgtgttcggcacaggcacccagctcacagttcttctcgaggacctgaagaacgtgttcccacctgaggtggccgtgttcgagcctagcgaggccgagatcagccacacccagaaagccaccctcgtgtgcctggctaccggcttctaccccgaccatgtggaactgtcttggtgggtcaacggcaaagaggtgcacagcggcgtgtgtaccgacccccagccactgaaagaacagcccgccctgaacgacagccggtactgcctgagcagcagactgagagtgtccgccaccttctggcagaacccccggaaccacttcagatgccaggtgcagttctacggcctgagcgagaacgacgagtggacccaggacagagccaagcccgtgacccagatcgtgtctgccgaagcctggggcagagccgatgatgtgattaagatccactggcaggaaaagaagtccaacaccatcctgggcagccaggaaggcaacaccatgaagaccaacgacacctacatgaagttcagctggctgaccgtgcccgagaagtccctggacaaagaacacagatgcatcgtgcggcacgaaaacaacaagaacggcgtggaccaggaaatcatcttcccacccatcaagaccgatgtgattacaatggaccccaaggacaactgctccaaggacgccaacgataccctgctgctccagctgaccaacaccagcgcctactacatgtacttgttgctgctgctgaagtccgtggtgtacttcgccatcatcacatgctgcctgctgatggctatggtcaagcggaaggacagccggggaagggccaagcgatctggatctggagcaacaaacttctcactactcaaacaagcaggtgacgtggaggagaatcccgggcctactagtatggactggatttggcgcatccttttccttgtcggcgctgctaccggcgcgcattccttcgaagaagtgcagctccagcagtctggacctggcctggttaagcctagccagacactgagcctgacctgtgccatcagcggcgattccatgctgagcaacagcgacacctggaactggatcagacagagccccagcagaggcctggaatggctgggcagaacataccacagaagcacttggtacgacgactacgccagctctgtgcggggcagagtgtccatcaatgtggacaccagcaagaaccagtacagcctgcaactgaacgccgtgacacctgaggataccggcgtgtactactgtgccagagtgcggctccaggacggcaattcttggagcgacgcctttgatgtgtggggccagggcacaatggtcaccgtttctagcacgcgtatccagaaccctgatcctgccgtgtaccagctgcgggatagcaagagcagcgacaagagcgtgtgtctgttcaccgacttcgacagccagaccaacgtgtcccagagcaaggactccgacgtgtacatcaccgataagtgcgtgctggacatgcggagcatggacttcaagagcaactccgccgtggcctggtccaacaagtccgatttcgcctgcgccaacgccttcaacaacagcattatccccgaggacacattcttcccaagccccgagagcagcgactccaccgaccacgtgaagcccaaagagacagagaacaccaagcagcccagcaagagctgccacaagcccaaggccatcgtgcacaccgagaaagtgaacatgatgagcctgaccgtgctgggcctgcggatgctgttcgccaaaaccgtggccgtgaacttcctgctgaccgccaagctgttcttcctcctcaccgcc

SEQ ID NO: 6472 - DNA, 2610 bp, synthetic construct
  source 1..2610: mol_type = other DNA
atggccttaccagtgaccgccttgctcctgccgctggccttgctgctccacgccgccaggccggaagtgcagctggttgaatctggcggaggactggttcagcctggcggatctctgagactgtcttgtgccgccagcggcttcagcttcagcgacttttggatgagctgggtccgacaggcccctggcaaaggacttgaatgggtcgccacaatcagccaggccggcagcgagaaggactacgtggactctgtgaagggcagattcaccatcagccgggacaacgccaagaagtccctgtacctccagatgaacagcctgagagccgaggacaccgccgtgtactattgtgcctctggcgtgtacagcttcgactacagaggccagggcaccctggtcacagtctcttctggtaccggcggaggcggatctggcggcggaggtagcggtggcggaggatctgaattcgacgtgatgctgacccagacaccactgagcctgcctgtgtctctgggcgatcaggccagcatctcctgtagaagcagccagagcatcctgcacagcaccggcgatacctacctggaatggtatctccagaagcctggacagagccccaagctgctgattaacaaggtgtccaaccggctgagcggcgtgcccgatagattttctggcagcggctctggcaccgacttcaccctgaagatcagcagagtggaagccgaggacctgggcgtgtactactgcttccaaggcagccatgttccttggacctttggcggaggcaccaagctggaaatcaagagagctgacgccgctcctaccgtgtccatctttcctctcgaggacctgaagaacgtgttcccacctgaggtggccgtgttcgagcctagcgaggccgagatcagccacacccagaaagccaccctcgtgtgcctggctaccggcttctaccccgaccatgtggaactgtcttggtgggtcaacggcaaagaggtgcacagcggcgtgtgtaccgacccccagccactgaaagaacagcccgccctgaacgacagccggtactgcctgagcagcagactgagagtgtccgccaccttctggcagaacccccggaaccacttcagatgccaggtgcagttctacggcctgagcgagaacgacgagtggacccaggacagagccaagcccgtgacccagatcgtgtctgccgaagcctggggcagagccgatgatgtgattaagatccactggcaggaaaagaagtccaacaccatcctgggcagccaggaaggcaacaccatgaagaccaacgacacctacatgaagttcagctggctgaccgtgcccgagaagtccctggacaaagaacacagatgcatcgtgcggcacgaaaacaacaagaacggcgtggaccaggaaatcatcttcccacccatcaagaccgatgtgattacaatggaccccaaggacaactgctccaaggacgccaacgataccctgctgctccagctgaccaacaccagcgcctactacatgtacttgttgctgctgctgaagtccgtggtgtacttcgccatcatcacatgctgcctgctgatggctatggtcaagcggaaggacagccggggaagggccaagcgatctggatctggagcaacaaacttctcactactcaaacaagcaggtgacgtggaggagaatcccgggcctactagtatggactggatttggcgcatccttttccttgtcggcgctgctaccggcgcgcattccttcgaacaagtgaagctccagcagagcggccctagccttgtgaaacctggcgcttccgtgaagatgagctgcaaggccagcggctacaccttcaccgatttctacatgaaatgggtcaagcagagccacggcaagtctctggaatggatcggcgacatcaaccccaacatcggagacaccttctacaaccagaagttcaagggcaaagccacactgaccgtggacaagagcagcagcaccgcctacatgcagctcaacagcctgaccagcgaggacagcgccgtgtacttttgttccgtgggctacttcgacgtgtggggagccggaacaaccgtgacagtctcttctacgcgtatccagaaccctgatcctgccgtgtaccagctgcgggatagcaagagcagcgacaagagcgtgtgtctgttcaccgacttcgacagccagaccaacgtgtcccagagcaaggactccgacgtgtacatcaccgataagtgcgtgctggacatgcggagcatggacttcaagagcaactccgccgtggcctggtccaacaagtccgatttcgcctgcgccaacgccttcaacaacagcattatccccgaggacacattcttcccaagccccgagagcagcgactccaccgaccacgtgaagcccaaagagacagagaacaccaagcagcccagcaagagctgccacaagcccaaggccatcgtgcacaccgagaaagtgaacatgatgagcctgaccgtgctgggcctgcggatgctgttcgccaaaaccgtggccgtgaacttcctgctgaccgccaagctgttcttcctcctcaccgcc

SEQ ID NO: 6473 - DNA, 2598 bp, synthetic construct
  source 1..2598: mol_type = other DNA
atggccttaccagtgaccgccttgctcctgccgctggccttgctgctccacgccgccaggccggaagtgcagctggttgaatctggcggaggactggttcagcctggcggatctctgagactgtcttgtgccgccagcggcttcagcttcagcgacttttggatgagctgggtccgacaggcccctggcaaaggacttgaatgggtcgccacaatcagccaggccggcagcgagaaggactacgtggactctgtgaagggcagattcaccatcagccgggacaacgccaagaagtccctgtacctccagatgaacagcctgagagccgaggacaccgccgtgtactattgtgcctctggcgtgtacagcttcgactacagaggccagggcaccctggtcacagtctcttctggtaccggcggaggcggatctggcggcggaggtagcggtggcggaggatctgaattcgagatcgtgctgacacagtctcccgccacactgtcactgtctccaggcgaaagagccacactgagctgtagagccagccagagcgtgtccatctacctggcctggtatcagcagaagcctggacaggctccccggctgctgatctacgatgccagcaatagagccacaggcatccccgccagattttctggctctggcagcggcaccgatttcaccctgaccataagcagcctggaacctgaggacttcgccgtgtactactgccagcagagaagcaactggcctcctttcacattcggccctggcaccaaggtggacatcaaactcgaggacctgaagaacgtgttcccacctgaggtggccgtgttcgagcctagcgaggccgagatcagccacacccagaaagccaccctcgtgtgcctggctaccggcttctaccccgaccatgtggaactgtcttggtgggtcaacggcaaagaggtgcacagcggcgtgtgtaccgacccccagccactgaaagaacagcccgccctgaacgacagccggtactgcctgagcagcagactgagagtgtccgccaccttctggcagaacccccggaaccacttcagatgccaggtgcagttctacggcctgagcgagaacgacgagtggacccaggacagagccaagcccgtgacccagatcgtgtctgccgaagcctggggcagagccgatgatgtgattaagatccactggcaggaaaagaagtccaacaccatcctgggcagccaggaaggcaacaccatgaagaccaacgacacctacatgaagttcagctggctgaccgtgcccgagaagtccctggacaaagaacacagatgcatcgtgcggcacgaaaacaacaagaacggcgtggaccaggaaatcatcttcccacccatcaagaccgatgtgattacaatggaccccaaggacaactgctccaaggacgccaacgataccctgctgctccagctgaccaacaccagcgcctactacatgtacttgttgctgctgctgaagtccgtggtgtacttcgccatcatcacatgctgcctgctgatggctatggtcaagcggaaggacagccggggaagggccaagcgatctggatctggagcaacaaacttctcactactcaaacaagcaggtgacgtggaggagaatcccgggcctactagtatggactggatttggcgcatccttttccttgtcggcgctgctaccggcgcgcattccttcgaacaggtgcagcttgttgaaagcggaggcggagttgtgcagcctggcagaagtctgagactgtcttgtgccgccagcggcttcaccttcagcagctatggaatgcactgggtccgacaggcccctggcaaaggacttgaatgggttgccgtgatctgggacgacggcagcaacaagtattacgtggacagcgtgaagggcagattcaccatcagccgggacaacagcaagaacaccctgtacctccagatgaacagcctgagagccgaggacacagccgtgtattattgcgccagagatgactactacggcagcggctccttcaacagctactatggcacagacgtgtggggccagggcacaacagttaccgttagctctacgcgtatccagaaccctgatcctgccgtgtaccagctgcgggatagcaagagcagcgacaagagcgtgtgtctgttcaccgacttcgacagccagaccaacgtgtcccagagcaaggactccgacgtgtacatcaccgataagtgcgtgctggacatgcggagcatggacttcaagagcaactccgccgtggcctggtccaacaagtccgatttcgcctgcgccaacgccttcaacaacagcattatccccgaggacacattcttcccaagccccgagagcagcgactccaccgaccacgtgaagcccaaagagacagagaacaccaagcagcccagcaagagctgccacaagcccaaggccatcgtgcacaccgagaaagtgaacatgatgagcctgaccgtgctgggcctgcggatgctgttcgccaaaaccgtggccgtgaacttcctgctgaccgccaagctgttcttcctcctcaccgcc

SEQ ID NO: 6474 - DNA, 2553 bp, synthetic construct
  source 1..2553: mol_type = other DNA
atggccttaccagtgaccgccttgctcctgccgctggccttgctgctccacgccgccaggccggaagtgcagctggttgaatctggcggaggactggttcagcctggcggatctctgagactgtcttgtgccgccagcggcttcagcttcagcgacttttggatgagctgggtccgacaggcccctggcaaaggacttgaatgggtcgccacaatcagccaggccggcagcgagaaggactacgtggactctgtgaagggcagattcaccatcagccgggacaacgccaagaagtccctgtacctccagatgaacagcctgagagccgaggacaccgccgtgtactattgtgcctctggcgtgtacagcttcgactacagaggccagggcaccctggtcacagtctcttctggtaccggcggaggcggatctggcggcggaggtagcggtggcggaggatctgaattcgacatccagatgacacagagccctagcagcctgtctgccagcgtgggagacagagtgaccatcacctgtagagccagccagggcatctcttcttggctggcctggtatcagcagaagcccgagaaggcccctaagagcctgatctatgccgccagctctctccagagcggagtgcctagcagattttctggcagcggctccggcaccgatttcaccctgacaatatccagcctccagcctgaggacttcgccacctactactgccagcagtacaacagctacccctacaccttcggccagggcaccaagctggaaatcaaactcgaggacctgaagaacgtgttcccacctgaggtggccgtgttcgagcctagcgaggccgagatcagccacacccagaaagccaccctcgtgtgcctggctaccggcttctaccccgaccatgtggaactgtcttggtgggtcaacggcaaagaggtgcacagcggcgtgtgtaccgacccccagccactgaaagaacagcccgccctgaacgacagccggtactgcctgagcagcagactgagagtgtccgccaccttctggcagaacccccggaaccacttcagatgccaggtgcagttctacggcctgagcgagaacgacgagtggacccaggacagagccaagcccgtgacccagatcgtgtctgccgaagcctggggcagagccgatgatgtgattaagatccactggcaggaaaagaagtccaacaccatcctgggcagccaggaaggcaacaccatgaagaccaacgacacctacatgaagttcagctggctgaccgtgcccgagaagtccctggacaaagaacacagatgcatcgtgcggcacgaaaacaacaagaacggcgtggaccaggaaatcatcttcccacccatcaagaccgatgtgattacaatggaccccaaggacaactgctccaaggacgccaacgataccctgctgctccagctgaccaacaccagcgcctactacatgtacttgttgctgctgctgaagtccgtggtgtacttcgccatcatcacatgctgcctgctgatggctatggtcaagcggaaggacagccggggaagggccaagcgatctggatctggagcaacaaacttctcactactcaaacaagcaggtgacgtggaggagaatcccgggcctactagtatggactggatttggcgcatccttttccttgtcggcgctgctaccggcgcgcattccttcgaagaagtgcaactggttcaatctggcggcggactggttcatccaggcggttctctgagactgagctgtgccggctctggcttcaccttcagcacctacctgatgtactgggtccgacaggcccctggcaagacactggaatgggtgtccgctattggcagcggaggcgatacctactacgccgactctgtgaagggcagattcaccatcagccgggacaacgccaagaacagcctgtacctccagatgaactccctgagagccgaggacatggccgtgtactactgtgccagaggactcggctattggggccagggaacactggtcacagtgtcctctacgcgtatccagaaccctgatcctgccgtgtaccagctgcgggatagcaagagcagcgacaagagcgtgtgtctgttcaccgacttcgacagccagaccaacgtgtcccagagcaaggactccgacgtgtacatcaccgataagtgcgtgctggacatgcggagcatggacttcaagagcaactccgccgtggcctggtccaacaagtccgatttcgcctgcgccaacgccttcaacaacagcattatccccgaggacacattcttcccaagccccgagagcagcgactccaccgaccacgtgaagcccaaagagacagagaacaccaagcagcccagcaagagctgccacaagcccaaggccatcgtgcacaccgagaaagtgaacatgatgagcctgaccgtgctgggcctgcggatgctgttcgccaaaaccgtggccgtgaacttcctgctgaccgccaagctgttcttcctcctcaccgcc

SEQ ID NO: 6475 - DNA, 2610 bp, synthetic construct
  source 1..2610: mol_type = other DNA
atggccttaccagtgaccgccttgctcctgccgctggccttgctgctccacgccgccaggccggaagtgcagctggttgaatctggcggaggactggttcagcctggcggatctctgagactgtcttgtgccgccagcggcttcagcttcagcgacttttggatgagctgggtccgacaggcccctggcaaaggacttgaatgggtcgccacaatcagccaggccggcagcgagaaggactacgtggactctgtgaagggcagattcaccatcagccgggacaacgccaagaagtccctgtacctccagatgaacagcctgagagccgaggacaccgccgtgtactattgtgcctctggcgtgtacagcttcgactacagaggccagggcaccctggtcacagtctcttctggtaccggcggaggcggatctggcggcggaggtagcggtggcggaggatctgaattcctgcctgttctgacacagcctccatccgtgtctgtggcccctggaaagaccgccagaatcacatgcggcggcaacaacatcggcagcaagagcgtgcactggtatcagcagaagcctggacaggctcctgtgctggtggtgtacgacgacagcgatagacctagcggcatccccgagagattcagcggcagcaattccggcaataccgccacactgaccatcagcagagtggaagctggcgacgaggccgactactactgccaagtgtgggacagcagcagcgactacgtggtgtttggcggcggaacaaagctgacagtgcttctcgaggacctgaagaacgtgttcccacctgaggtggccgtgttcgagcctagcgaggccgagatcagccacacccagaaagccaccctcgtgtgcctggctaccggcttctaccccgaccatgtggaactgtcttggtgggtcaacggcaaagaggtgcacagcggcgtgtgtaccgacccccagccactgaaagaacagcccgccctgaacgacagccggtactgcctgagcagcagactgagagtgtccgccaccttctggcagaacccccggaaccacttcagatgccaggtgcagttctacggcctgagcgagaacgacgagtggacccaggacagagccaagcccgtgacccagatcgtgtctgccgaagcctggggcagagccgatgatgtgattaagatccactggcaggaaaagaagtccaacaccatcctgggcagccaggaaggcaacaccatgaagaccaacgacacctacatgaagttcagctggctgaccgtgcccgagaagtccctggacaaagaacacagatgcatcgtgcggcacgaaaacaacaagaacggcgtggaccaggaaatcatcttcccacccatcaagaccgatgtgattacaatggaccccaaggacaactgctccaaggacgccaacgataccctgctgctccagctgaccaacaccagcgcctactacatgtacttgttgctgctgctgaagtccgtggtgtacttcgccatcatcacatgctgcctgctgatggctatggtcaagcggaaggacagccggggaagggccaagcgatctggatctggagcaacaaacttctcactactcaaacaagcaggtgacgtggaggagaatcccgggcctactagtatggactggatttggcgcatccttttccttgtcggcgctgctaccggcgcgcattccttcgaagaagttcaactggtgcagagcggagccgaagtgaagaagccaggcgagagcctgaagattagctgcaaaggcagcggctacagcttcaccagctactggatcggctgggtccgacagatgcctggcaaaggactggaatggatgggcatcatctaccccggcgacagcgacaccagatacagccctagctttcagggccaagtgaccatctccgccgacaagagcatcagcacagcctacctccagtggtcctctctgaaggccagcgataccgccatgtactactgcgccagacaagtctggggatggcaaggcggcatgtaccccaggtctaactggtggtacaacctggactcttggggccagggcacactggtcacagtctcttctacgcgtatccagaaccctgatcctgccgtgtaccagctgcgggatagcaagagcagcgacaagagcgtgtgtctgttcaccgacttcgacagccagaccaacgtgtcccagagcaaggactccgacgtgtacatcaccgataagtgcgtgctggacatgcggagcatggacttcaagagcaactccgccgtggcctggtccaacaagtccgatttcgcctgcgccaacgccttcaacaacagcattatccccgaggacacattcttcccaagccccgagagcagcgactccaccgaccacgtgaagcccaaagagacagagaacaccaagcagcccagcaagagctgccacaagcccaaggccatcgtgcacaccgagaaagtgaacatgatgagcctgaccgtgctgggcctgcggatgctgttcgccaaaaccgtggccgtgaacttcctgctgaccgccaagctgttcttcctcctcaccgcc

SEQ ID NO: 6476 - DNA, 2589 bp, synthetic construct
  source 1..2589: mol_type = other DNA
atggccttaccagtgaccgccttgctcctgccgctggccttgctgctccacgccgccaggccggaagtgcagctggttgaatctggcggaggactggttcagcctggcggatctctgagactgtcttgtgccgccagcggcttcagcttcagcgacttttggatgagctgggtccgacaggcccctggcaaaggacttgaatgggtcgccacaatcagccaggccggcagcgagaaggactacgtggactctgtgaagggcagattcaccatcagccgggacaacgccaagaagtccctgtacctccagatgaacagcctgagagccgaggacaccgccgtgtactattgtgcctctggcgtgtacagcttcgactacagaggccagggcaccctggtcacagtctcttctggtaccggcggaggcggatctggcggcggaggtagcggtggcggaggatctgaattcgagctggtcatgacacagagccctgcttctctggccgtgtcactgggacagagagccaccatctcttgcagagccagcgagagcgtggacagctacggcaagagcttcatgcactggtatcagctcaagcccggccagcctcctaagctgctgatctacagagcctccaacctggaaagcggcgtgccagccagattttctggcagcggcagcagaaccgacttcaccctgaccattgatcccgtggaagccgatgatgccgccacctactactgccagcagaacaacgaggacccctggacatttggcggaggcaccaagctggaaatcaaactcgaggacctgaagaacgtgttcccacctgaggtggccgtgttcgagcctagcgaggccgagatcagccacacccagaaagccaccctcgtgtgcctggctaccggcttctaccccgaccatgtggaactgtcttggtgggtcaacggcaaagaggtgcacagcggcgtgtgtaccgacccccagccactgaaagaacagcccgccctgaacgacagccggtactgcctgagcagcagactgagagtgtccgccaccttctggcagaacccccggaaccacttcagatgccaggtgcagttctacggcctgagcgagaacgacgagtggacccaggacagagccaagcccgtgacccagatcgtgtctgccgaagcctggggcagagccgatgatgtgattaagatccactggcaggaaaagaagtccaacaccatcctgggcagccaggaaggcaacaccatgaagaccaacgacacctacatgaagttcagctggctgaccgtgcccgagaagtccctggacaaagaacacagatgcatcgtgcggcacgaaaacaacaagaacggcgtggaccaggaaatcatcttcccacccatcaagaccgatgtgattacaatggaccccaaggacaactgctccaaggacgccaacgataccctgctgctccagctgaccaacaccagcgcctactacatgtacttgttgctgctgctgaagtccgtggtgtacttcgccatcatcacatgctgcctgctgatggctatggtcaagcggaaggacagccggggaagggccaagcgatctggatctggagcaacaaacttctcactactcaaacaagcaggtgacgtggaggagaatcccgggcctactagtatggactggatttggcgcatccttttccttgtcggcgctgctaccggcgcgcattccttcgaagaagtgcagctcgaacagtctggccccgagcttgtgaaacctggcgcttccgtgaagatgagctgcaaggccagcggctacaccttcaccaactactacatgaaatgggtcaagcagagccacggcaagtccctggaatggatcggcgatctgaaccccaacaacggcgacaccttctacaaccagaagttcaagggcaaagccacactgaccgtggacaagagcagcaacaccgcctacatgcagctcaactccctgaccagcgaggacagcgccgtgtactactgtgccagaaccggcagatacgaagagaacgctatggactactggggccagggcacaagcgtgacagtctcttctacgcgtatccagaaccctgatcctgccgtgtaccagctgcgggatagcaagagcagcgacaagagcgtgtgtctgttcaccgacttcgacagccagaccaacgtgtcccagagcaaggactccgacgtgtacatcaccgataagtgcgtgctggacatgcggagcatggacttcaagagcaactccgccgtggcctggtccaacaagtccgatttcgcctgcgccaacgccttcaacaacagcattatccccgaggacacattcttcccaagccccgagagcagcgactccaccgaccacgtgaagcccaaagagacagagaacaccaagcagcccagcaagagctgccacaagcccaaggccatcgtgcacaccgagaaagtgaacatgatgagcctgaccgtgctgggcctgcggatgctgttcgccaaaaccgtggccgtgaacttcctgctgaccgccaagctgttcttcctcctcaccgcc

SEQ ID NO: 6477 - DNA, 2571 bp, synthetic construct
  source 1..2571: mol_type = other DNA
atggccttaccagtgaccgccttgctcctgccgctggccttgctgctccacgccgccaggccggaagtgcagctggttgaatctggcggaggactggttcagcctggcggatctctgagactgtcttgtgccgccagcggcttcagcttcagcgacttttggatgagctgggtccgacaggcccctggcaaaggacttgaatgggtcgccacaatcagccaggccggcagcgagaaggactacgtggactctgtgaagggcagattcaccatcagccgggacaacgccaagaagtccctgtacctccagatgaacagcctgagagccgaggacaccgccgtgtactattgtgcctctggcgtgtacagcttcgactacagaggccagggcaccctggtcacagtctcttctggtaccggcggaggcggatctggcggcggaggtagcggtggcggaggatctgaattcgacgtggtcatgacacagagcccttctagcctgtctgccagcgtgggcgacagagtgaccatcacctgtatggcctccgaggacatctacatccggctggcctggtatcagcagaagcctggaaacgcccctaagctgctgatctacgccgccacctctctggaaacaggcgtgccaagcagattttccggcagcggctctggcaccgatttcaccctgacaatatccagcctccagcctgaggacttcgccacctactactgccagcagtattggagcagcccctggacatttggcggaggcaccaaggtggaaatcaaactcgaggacctgaagaacgtgttcccacctgaggtggccgtgttcgagcctagcgaggccgagatcagccacacccagaaagccaccctcgtgtgcctggctaccggcttctaccccgaccatgtggaactgtcttggtgggtcaacggcaaagaggtgcacagcggcgtgtgtaccgacccccagccactgaaagaacagcccgccctgaacgacagccggtactgcctgagcagcagactgagagtgtccgccaccttctggcagaacccccggaaccacttcagatgccaggtgcagttctacggcctgagcgagaacgacgagtggacccaggacagagccaagcccgtgacccagatcgtgtctgccgaagcctggggcagagccgatgatgtgattaagatccactggcaggaaaagaagtccaacaccatcctgggcagccaggaaggcaacaccatgaagaccaacgacacctacatgaagttcagctggctgaccgtgcccgagaagtccctggacaaagaacacagatgcatcgtgcggcacgaaaacaacaagaacggcgtggaccaggaaatcatcttcccacccatcaagaccgatgtgattacaatggaccccaaggacaactgctccaaggacgccaacgataccctgctgctccagctgaccaacaccagcgcctactacatgtacttgttgctgctgctgaagtccgtggtgtacttcgccatcatcacatgctgcctgctgatggctatggtcaagcggaaggacagccggggaagggccaagcgatctggatctggagcaacaaacttctcactactcaaacaagcaggtgacgtggaggagaatcccgggcctactagtatggactggatttggcgcatccttttccttgtcggcgctgctaccggcgcgcattccttcgaacaggttcagctgcaagagtctggccccggactggtcaagcctagccaaacactgagcctgacctgtaccgtgtccggctacagcatcaccagcgactacacctggaactggatcagacagcctcctggcaacggactggaatggatcggctacatcacctacagcggcagcaccagctacaaccccagcctgaaaagccgggtgctgatctccgtggacaccagcaagaatcaggtgtccctgaagctgagcagcgtgacagccgctgataccgccgtgtactactgtgccagactggggagaagatacacaatggactactggggccagggcaccaccgtgacagtttcttctacgcgtatccagaaccctgatcctgccgtgtaccagctgcgggatagcaagagcagcgacaagagcgtgtgtctgttcaccgacttcgacagccagaccaacgtgtcccagagcaaggactccgacgtgtacatcaccgataagtgcgtgctggacatgcggagcatggacttcaagagcaactccgccgtggcctggtccaacaagtccgatttcgcctgcgccaacgccttcaacaacagcattatccccgaggacacattcttcccaagccccgagagcagcgactccaccgaccacgtgaagcccaaagagacagagaacaccaagcagcccagcaagagctgccacaagcccaaggccatcgtgcacaccgagaaagtgaacatgatgagcctgaccgtgctgggcctgcggatgctgttcgccaaaaccgtggccgtgaacttcctgctgaccgccaagctgttcttcctcctcaccgcc

SEQ ID NO: 6478 - DNA, 2583 bp, synthetic construct
  source 1..2583: mol_type = other DNA
atggccttaccagtgaccgccttgctcctgccgctggccttgctgctccacgccgccaggccggaagtgcagctggttgaatctggcggaggactggttcagcctggcggatctctgagactgtcttgtgccgccagcggcttcagcttcagcgacttttggatgagctgggtccgacaggcccctggcaaaggacttgaatgggtcgccacaatcagccaggccggcagcgagaaggactacgtggactctgtgaagggcagattcaccatcagccgggacaacgccaagaagtccctgtacctccagatgaacagcctgagagccgaggacaccgccgtgtactattgtgcctctggcgtgtacagcttcgactacagaggccagggcaccctggtcacagtctcttctggtaccggcggaggcggatctggcggcggaggtagcggtggcggaggatctgaattcgatattgtgctgactcagagccctgccactctgagccttagtccaggcgacagagctaccatctcctgtagggcctctgaatccgtgaccattctgggctctcatctcatatattggtatcaacaaaagccgggccagcctccacggctgctcattcaactggcctctaacgtgcagaccggcgtgccagctagattttctggctctggctcccggaccgactttacactgacaatcagctccgtggaacccgaagattttgccgtctattattgcctccagtccaggaccattcctcggacattcggccagggaacaaaactcgaaatcaagcggctcgaggacctgaagaacgtgttcccacctgaggtggccgtgttcgagcctagcgaggccgagatcagccacacccagaaagccaccctcgtgtgcctggctaccggcttctaccccgaccatgtggaactgtcttggtgggtcaacggcaaagaggtgcacagcggcgtgtgtaccgacccccagccactgaaagaacagcccgccctgaacgacagccggtactgcctgagcagcagactgagagtgtccgccaccttctggcagaacccccggaaccacttcagatgccaggtgcagttctacggcctgagcgagaacgacgagtggacccaggacagagccaagcccgtgacccagatcgtgtctgccgaagcctggggcagagccgatgatgtgattaagatccactggcaggaaaagaagtccaacaccatcctgggcagccaggaaggcaacaccatgaagaccaacgacacctacatgaagttcagctggctgaccgtgcccgagaagtccctggacaaagaacacagatgcatcgtgcggcacgaaaacaacaagaacggcgtggaccaggaaatcatcttcccacccatcaagaccgatgtgattacaatggaccccaaggacaactgctccaaggacgccaacgataccctgctgctccagctgaccaacaccagcgcctactacatgtacttgttgctgctgctgaagtccgtggtgtacttcgccatcatcacatgctgcctgctgatggctatggtcaagcggaaggacagccggggaagggccaagcgatctggatctggagcaacaaacttctcactactcaaacaagcaggtgacgtggaggagaatcccgggcctactagtatggactggatttggcgcatccttttccttgtcggcgctgctaccggcgcgcattccttcgaacaggtgcagctcgttcagagtggccccgaagtgaaaaagccaggcgagtccgtgaagatttcctgcaaagcctccggctacacattccggcactactctatgaattgggtcaagcaggccccaggccagggccttaagtggatgggacgcatcaataccgagtccggcgtgccaatctacgccgatgacttcaaaggccggttcagcttcaccgtggatacctctgcctccaccgcctacctggaaatcagcagcctgaccagcgaggatacagctgtgtacttctgtagcaacgattacctctacagcctggatttctggggacagggaaccacactgaccgtgtctagcacgcgtatccagaaccctgatcctgccgtgtaccagctgcgggatagcaagagcagcgacaagagcgtgtgtctgttcaccgacttcgacagccagaccaacgtgtcccagagcaaggactccgacgtgtacatcaccgataagtgcgtgctggacatgcggagcatggacttcaagagcaactccgccgtggcctggtccaacaagtccgatttcgcctgcgccaacgccttcaacaacagcattatccccgaggacacattcttcccaagccccgagagcagcgactccaccgaccacgtgaagcccaaagagacagagaacaccaagcagcccagcaagagctgccacaagcccaaggccatcgtgcacaccgagaaagtgaacatgatgagcctgaccgtgctgggcctgcggatgctgttcgccaaaaccgtggccgtgaacttcctgctgaccgccaagctgttcttcctcctcaccgcc

SEQ ID NO: 6479 - DNA, 2583 bp, synthetic construct
  source 1..2583: mol_type = other DNA
atggccttaccagtgaccgccttgctcctgccgctggccttgctgctccacgccgccaggccggaagtgcagctggttgaatctggcggaggactggttcagcctggcggatctctgagactgtcttgtgccgccagcggcttcagcttcagcgacttttggatgagctgggtccgacaggcccctggcaaaggacttgaatgggtcgccacaatcagccaggccggcagcgagaaggactacgtggactctgtgaagggcagattcaccatcagccgggacaacgccaagaagtccctgtacctccagatgaacagcctgagagccgaggacaccgccgtgtactattgtgcctctggcgtgtacagcttcgactacagaggccagggcaccctggtcacagtctcttctggtaccggcggaggcggatctggcggcggaggtagcggtggcggaggatctgaattcgacatcgtgctgacacagtctcccgccacactgtcactgagccctggcgatagagccacactgagctgtagagccagcgagagcgtgacaatcctgggcagccacctgatctactggtatcagcagaagcccggacaggcccctagactgctgattcagctcgccagcaatgtgcagacaggcatccctgccagattttccggcagcggcagcagaaccgatttcaccctgaccataagcagcctggaacctgaggacttcgccgtgtactactgcctccagagccggacaatccccagaacctttggacagggcaccaagctggaaatcaagagactcgaggacctgaagaacgtgttcccacctgaggtggccgtgttcgagcctagcgaggccgagatcagccacacccagaaagccaccctcgtgtgcctggctaccggcttctaccccgaccatgtggaactgtcttggtgggtcaacggcaaagaggtgcacagcggcgtgtgtaccgacccccagccactgaaagaacagcccgccctgaacgacagccggtactgcctgagcagcagactgagagtgtccgccaccttctggcagaacccccggaaccacttcagatgccaggtgcagttctacggcctgagcgagaacgacgagtggacccaggacagagccaagcccgtgacccagatcgtgtctgccgaagcctggggcagagccgatgatgtgattaagatccactggcaggaaaagaagtccaacaccatcctgggcagccaggaaggcaacaccatgaagaccaacgacacctacatgaagttcagctggctgaccgtgcccgagaagtccctggacaaagaacacagatgcatcgtgcggcacgaaaacaacaagaacggcgtggaccaggaaatcatcttcccacccatcaagaccgatgtgattacaatggaccccaaggacaactgctccaaggacgccaacgataccctgctgctccagctgaccaacaccagcgcctactacatgtacttgttgctgctgctgaagtccgtggtgtacttcgccatcatcacatgctgcctgctgatggctatggtcaagcggaaggacagccggggaagggccaagcgatctggatctggagcaacaaacttctcactactcaaacaagcaggtgacgtggaggagaatcccgggcctactagtatggactggatttggcgcatccttttccttgtcggcgctgctaccggcgcgcattccttcgaacaggttcagctggtgcagtctggcagcgagctgaagaaacctggcgagagcgtgaagatcagctgcaaggccagcggctacaccttcacacactacagcatgaactgggtccgacaggcccctggacaaggactggaatggatgggcagaatcaacaccgagacaggcgagcccctgtacgccgacgatttcaagggcagattcgtgttcagcctggacaccagcgccagcacagcctatctccagatcagctctctgaaggccgaggacaccgccgtgtactactgctccaacgactacctgtactccctggactattggggccagggcacactggtcacagtgtctagtacgcgtatccagaaccctgatcctgccgtgtaccagctgcgggatagcaagagcagcgacaagagcgtgtgtctgttcaccgacttcgacagccagaccaacgtgtcccagagcaaggactccgacgtgtacatcaccgataagtgcgtgctggacatgcggagcatggacttcaagagcaactccgccgtggcctggtccaacaagtccgatttcgcctgcgccaacgccttcaacaacagcattatccccgaggacacattcttcccaagccccgagagcagcgactccaccgaccacgtgaagcccaaagagacagagaacaccaagcagcccagcaagagctgccacaagcccaaggccatcgtgcacaccgagaaagtgaacatgatgagcctgaccgtgctgggcctgcggatgctgttcgccaaaaccgtggccgtgaacttcctgctgaccgccaagctgttcttcctcctcaccgcc

SEQ ID NO: 6480 - DNA, 2586 bp, synthetic construct
  source 1..2586: mol_type = other DNA
atggccttaccagtgaccgccttgctcctgccgctggccttgctgctccacgccgccaggccggaagtgcagctggttgaatctggcggaggactggttcagcctggcggatctctgagactgtcttgtgccgccagcggcttcagcttcagcgacttttggatgagctgggtccgacaggcccctggcaaaggacttgaatgggtcgccacaatcagccaggccggcagcgagaaggactacgtggactctgtgaagggcagattcaccatcagccgggacaacgccaagaagtccctgtacctccagatgaacagcctgagagccgaggacaccgccgtgtactattgtgcctctggcgtgtacagcttcgactacagaggccagggcaccctggtcacagtctcttctggtaccggcggaggcggatctggcggcggaggtagcggtggcggaggatctgaattcgacatccagctgactcagagccctagctttctgagcgccagcgtgggcgacagagtgaccattacatgtagagccagccagggcatcagcaccgacctgaactggtatcagcagaagcctggcaaggcccctaagctgctgatctacgccgccagcaatctggaaagcggcgtgccaagcagattttccggctctggcagcggcaccgagttcaccctgacaatatctagcctccagcctgaggacttcgccacctactactgccagcagagctacaactggccctacacctttggcggaggcaccaaggtggaaatcaagagactcgaggacctgaagaacgtgttcccacctgaggtggccgtgttcgagcctagcgaggccgagatcagccacacccagaaagccaccctcgtgtgcctggctaccggcttctaccccgaccatgtggaactgtcttggtgggtcaacggcaaagaggtgcacagcggcgtgtgtaccgacccccagccactgaaagaacagcccgccctgaacgacagccggtactgcctgagcagcagactgagagtgtccgccaccttctggcagaacccccggaaccacttcagatgccaggtgcagttctacggcctgagcgagaacgacgagtggacccaggacagagccaagcccgtgacccagatcgtgtctgccgaagcctggggcagagccgatgatgtgattaagatccactggcaggaaaagaagtccaacaccatcctgggcagccaggaaggcaacaccatgaagaccaacgacacctacatgaagttcagctggctgaccgtgcccgagaagtccctggacaaagaacacagatgcatcgtgcggcacgaaaacaacaagaacggcgtggaccaggaaatcatcttcccacccatcaagaccgatgtgattacaatggaccccaaggacaactgctccaaggacgccaacgataccctgctgctccagctgaccaacaccagcgcctactacatgtacttgttgctgctgctgaagtccgtggtgtacttcgccatcatcacatgctgcctgctgatggctatggtcaagcggaaggacagccggggaagggccaagcgatctggatctggagcaacaaacttctcactactcaaacaagcaggtgacgtggaggagaatcccgggcctactagtatggactggatttggcgcatccttttccttgtcggcgctgctaccggcgcgcattccttcgaagaagttcagctggttgaatcaggcggaggactcgtgaaacctggcggctctctgagactgtcttgtgccgccagcggcttcaccttcagcaacttcgagatgaactgggtccgacaggccccaggcaaaggactggaatgggtgtccggcatcagctccaatggccggtacatcaactacgccgacagcgtgaagggcagattcaccatcagccgggacaacgccaagaacagcctgtacctccagatgaactccctgagagccgaggacaccgccgtgtactattgtgccagagtggtggacttcgaccaggactacaacggcttcgactattggggccagggcaccctggttaccgttagctctacgcgtatccagaaccctgatcctgccgtgtaccagctgcgggatagcaagagcagcgacaagagcgtgtgtctgttcaccgacttcgacagccagaccaacgtgtcccagagcaaggactccgacgtgtacatcaccgataagtgcgtgctggacatgcggagcatggacttcaagagcaactccgccgtggcctggtccaacaagtccgatttcgcctgcgccaacgccttcaacaacagcattatccccgaggacacattcttcccaagccccgagagcagcgactccaccgaccacgtgaagcccaaagagacagagaacaccaagcagcccagcaagagctgccacaagcccaaggccatcgtgcacaccgagaaagtgaacatgatgagcctgaccgtgctgggcctgcggatgctgttcgccaaaaccgtggccgtgaacttcctgctgaccgccaagctgttcttcctcctcaccgcc

SEQ ID NO: 6481 - DNA, 2580 bp, synthetic construct
  source 1..2580: mol_type = other DNA
atggccttaccagtgaccgccttgctcctgccgctggccttgctgctccacgccgccaggccggaagtgcagctggttgaatctggcggaggactggttcagcctggcggatctctgagactgtcttgtgccgccagcggcttcagcttcagcgacttttggatgagctgggtccgacaggcccctggcaaaggacttgaatgggtcgccacaatcagccaggccggcagcgagaaggactacgtggactctgtgaagggcagattcaccatcagccgggacaacgccaagaagtccctgtacctccagatgaacagcctgagagccgaggacaccgccgtgtactattgtgcctctggcgtgtacagcttcgactacagaggccagggcaccctggtcacagtctcttctggtaccggcggaggcggatctggcggcggaggtagcggtggcggaggatctgaattcgacatccaactgactcagagccccagctttctgagcgcctctgtgggcgacagagtgaccatcacatgtagtctcagcctgggcatcagcacatggcgggattggtttccgccgaggcttggcaggggccttgagccgctgacctacgccgccagcacactgcaaagcggagtgcctagcagattttccggcagcggctctggcaccgagttcaccctgacaatatccagcctccagcctgaggacttcgccacctactactgccagcagctcaacagctaccctctgacctttggcggaggcaccaaggtggaaatcaagagactcgaggacctgaagaacgtgttcccacctgaggtggccgtgttcgagcctagcgaggccgagatcagccacacccagaaagccaccctcgtgtgcctggctaccggcttctaccccgaccatgtggaactgtcttggtgggtcaacggcaaagaggtgcacagcggcgtgtgtaccgacccccagccactgaaagaacagcccgccctgaacgacagccggtactgcctgagcagcagactgagagtgtccgccaccttctggcagaacccccggaaccacttcagatgccaggtgcagttctacggcctgagcgagaacgacgagtggacccaggacagagccaagcccgtgacccagatcgtgtctgccgaagcctggggcagagccgatgatgtgattaagatccactggcaggaaaagaagtccaacaccatcctgggcagccaggaaggcaacaccatgaagaccaacgacacctacatgaagttcagctggctgaccgtgcccgagaagtccctggacaaagaacacagatgcatcgtgcggcacgaaaacaacaagaacggcgtggaccaggaaatcatcttcccacccatcaagaccgatgtgattacaatggaccccaaggacaactgctccaaggacgccaacgataccctgctgctccagctgaccaacaccagcgcctactacatgtacttgttgctgctgctgaagtccgtggtgtacttcgccatcatcacatgctgcctgctgatggctatggtcaagcggaaggacagccggggaagggccaagcgatctggatctggagcaacaaacttctcactactcaaacaagcaggtgacgtggaggagaatcccgggcctactagtatggactggatttggcgcatccttttccttgtcggcgctgctaccggcgcgcattccttcgaagaagttcaactggttgagtctggtggcggcctggttaagcctggcggatctctgagactgagctgtgccgccagcggcttcacctttagcacatacggcatgagctgggtccgacaggcccctggaaaaggacttgagtgggtcgcctacatcaacaacggctccggctacatctactacgccgacagcgtgaagggcagattcaccatcagccgggacaacgccaagaacagcctgtacctccagatgaactccctgagagccgaggacaccgccgtgtactattgtgccagaggacagtggtggagcggcggagactttgattattggggccagggcaccctggtcaccgtttcttctacgcgtatccagaaccctgatcctgccgtgtaccagctgcgggatagcaagagcagcgacaagagcgtgtgtctgttcaccgacttcgacagccagaccaacgtgtcccagagcaaggactccgacgtgtacatcaccgataagtgcgtgctggacatgcggagcatggacttcaagagcaactccgccgtggcctggtccaacaagtccgatttcgcctgcgccaacgccttcaacaacagcattatccccgaggacacattcttcccaagccccgagagcagcgactccaccgaccacgtgaagcccaaagagacagagaacaccaagcagcccagcaagagctgccacaagcccaaggccatcgtgcacaccgagaaagtgaacatgatgagcctgaccgtgctgggcctgcggatgctgttcgccaaaaccgtggccgtgaacttcctgctgaccgccaagctgttcttcctcctcaccgcc

SEQ ID NO: 6482 - DNA, 2583 bp, synthetic construct
  source 1..2583: mol_type = other DNA
atggccttaccagtgaccgccttgctcctgccgctggccttgctgctccacgccgccaggccggaagtgcagctggttgaatctggcggaggactggttcagcctggcggatctctgagactgtcttgtgccgccagcggcttcagcttcagcgacttttggatgagctgggtccgacaggcccctggcaaaggacttgaatgggtcgccacaatcagccaggccggcagcgagaaggactacgtggactctgtgaagggcagattcaccatcagccgggacaacgccaagaagtccctgtacctccagatgaacagcctgagagccgaggacaccgccgtgtactattgtgcctctggcgtgtacagcttcgactacagaggccagggcaccctggtcacagtctcttctggtaccggcggaggcggatctggcggcggaggtagcggtggcggaggatctgaattcgagatcgtgctgacacagtctcccgccacactgtcactgtctccaggcgaaagagccacactgagctgtagcgccagcagcagcgtgtcctacatgtactggtatcagcagaagcccggacaggcccctagactgctgatctacagaaccagcaacctggcctctggcatccccgccagattttctggctctggcagcggcaccgatttcaccctgaccataagcagcctggaacctgaggacttcgccgtgtactactgccagcagtaccacagctaccccaccacctttggacagggcaccaaggtggaaatcaagcggacagttctcgaggacctgaagaacgtgttcccacctgaggtggccgtgttcgagcctagcgaggccgagatcagccacacccagaaagccaccctcgtgtgcctggctaccggcttctaccccgaccatgtggaactgtcttggtgggtcaacggcaaagaggtgcacagcggcgtgtgtaccgacccccagccactgaaagaacagcccgccctgaacgacagccggtactgcctgagcagcagactgagagtgtccgccaccttctggcagaacccccggaaccacttcagatgccaggtgcagttctacggcctgagcgagaacgacgagtggacccaggacagagccaagcccgtgacccagatcgtgtctgccgaagcctggggcagagccgatgatgtgattaagatccactggcaggaaaagaagtccaacaccatcctgggcagccaggaaggcaacaccatgaagaccaacgacacctacatgaagttcagctggctgaccgtgcccgagaagtccctggacaaagaacacagatgcatcgtgcggcacgaaaacaacaagaacggcgtggaccaggaaatcatcttcccacccatcaagaccgatgtgattacaatggaccccaaggacaactgctccaaggacgccaacgataccctgctgctccagctgaccaacaccagcgcctactacatgtacttgttgctgctgctgaagtccgtggtgtacttcgccatcatcacatgctgcctgctgatggctatggtcaagcggaaggacagccggggaagggccaagcgatctggatctggagcaacaaacttctcactactcaaacaagcaggtgacgtggaggagaatcccgggcctactagtatggactggatttggcgcatccttttccttgtcggcgctgctaccggcgcgcattccttcgaagaagtgcagctggttgaatcaggtggcggcctggttcaacctggcggatctctgagactgtcttgtgccgccagcggcttcagcttcaacacctacgccatgaactgggtccgacaggctcctggcaaaggactggaatgggtgtcccacatcagaagcaagagcaacaacttcgccacctactacgccgacagcgtgaaggacagattcaccatcagccgggacaacgccaagaacagcctgtacctccagatgaactccctgagagccgaggacaccgccgtgtattattgcgccagacaaggcggcgacttccctatggattattggggccagggcaccctggtcaccgtttcttctacgcgtatccagaaccctgatcctgccgtgtaccagctgcgggatagcaagagcagcgacaagagcgtgtgtctgttcaccgacttcgacagccagaccaacgtgtcccagagcaaggactccgacgtgtacatcaccgataagtgcgtgctggacatgcggagcatggacttcaagagcaactccgccgtggcctggtccaacaagtccgatttcgcctgcgccaacgccttcaacaacagcattatccccgaggacacattcttcccaagccccgagagcagcgactccaccgaccacgtgaagcccaaagagacagagaacaccaagcagcccagcaagagctgccacaagcccaaggccatcgtgcacaccgagaaagtgaacatgatgagcctgaccgtgctgggcctgcggatgctgttcgccaaaaccgtggccgtgaacttcctgctgaccgccaagctgttcttcctcctcaccgcc

SEQ ID NO: 6483 - DNA, 2571 bp, synthetic construct
  source 1..2571: mol_type = other DNA
atggccttaccagtgaccgccttgctcctgccgctggccttgctgctccacgccgccaggccggaagtgcagctggttgaatctggcggaggactggttcagcctggcggatctctgagactgtcttgtgccgccagcggcttcagcttcagcgacttttggatgagctgggtccgacaggcccctggcaaaggacttgaatgggtcgccacaatcagccaggccggcagcgagaaggactacgtggactctgtgaagggcagattcaccatcagccgggacaacgccaagaagtccctgtacctccagatgaacagcctgagagccgaggacaccgccgtgtactattgtgcctctggcgtgtacagcttcgactacagaggccagggcaccctggtcacagtctcttctggtaccggcggaggcggatctggcggcggaggtagcggtggcggaggatctgaattcgacgtggtcatgacacagagcccttctagcctgtctgccagcgtgggcgacagagtgaccatcacctgtaaagccagcgaggacatctacatccggctggcctggtatcagcagaagcctggaaaggcccctaagctgctgatctacgccgccacctctctggaaacaggcgtgccaagcagattttccggcagcggctctggcaccgatttcaccctgacaatatccagcctccagcctgaggacttcgccacctactactgccagcagtattggaccacaccttggacctttggcggaggcaccaaggtggaaatcaaactcgaggacctgaagaacgtgttcccacctgaggtggccgtgttcgagcctagcgaggccgagatcagccacacccagaaagccaccctcgtgtgcctggctaccggcttctaccccgaccatgtggaactgtcttggtgggtcaacggcaaagaggtgcacagcggcgtgtgtaccgacccccagccactgaaagaacagcccgccctgaacgacagccggtactgcctgagcagcagactgagagtgtccgccaccttctggcagaacccccggaaccacttcagatgccaggtgcagttctacggcctgagcgagaacgacgagtggacccaggacagagccaagcccgtgacccagatcgtgtctgccgaagcctggggcagagccgatgatgtgattaagatccactggcaggaaaagaagtccaacaccatcctgggcagccaggaaggcaacaccatgaagaccaacgacacctacatgaagttcagctggctgaccgtgcccgagaagtccctggacaaagaacacagatgcatcgtgcggcacgaaaacaacaagaacggcgtggaccaggaaatcatcttcccacccatcaagaccgatgtgattacaatggaccccaaggacaactgctccaaggacgccaacgataccctgctgctccagctgaccaacaccagcgcctactacatgtacttgttgctgctgctgaagtccgtggtgtacttcgccatcatcacatgctgcctgctgatggctatggtcaagcggaaggacagccggggaagggccaagcgatctggatctggagcaacaaacttctcactactcaaacaagcaggtgacgtggaggagaatcccgggcctactagtatggactggatttggcgcatccttttccttgtcggcgctgctaccggcgcgcattccttcgaacaggtgcagctccaagagtctggccctggactggtcaagcctagccagacactgagcctgacctgtaccgtgtccggctacagcatcaccatcgactacacctggaactggatcagacagcctcctggcaaaggactggaatggatcggctacatcacctacagcggcagcaccgactacaaccccagcctgaaaagccgggtgctgatctccgtggacaccagcaagaatcaggtgtccctgaagctgagcagcgtgacagccgctgataccgccgtgtactactgtgccagactgggcagaagatacgccctggattattggggccagggcaccaccgtgacagtgtcatctacgcgtatccagaaccctgatcctgccgtgtaccagctgcgggatagcaagagcagcgacaagagcgtgtgtctgttcaccgacttcgacagccagaccaacgtgtcccagagcaaggactccgacgtgtacatcaccgataagtgcgtgctggacatgcggagcatggacttcaagagcaactccgccgtggcctggtccaacaagtccgatttcgcctgcgccaacgccttcaacaacagcattatccccgaggacacattcttcccaagccccgagagcagcgactccaccgaccacgtgaagcccaaagagacagagaacaccaagcagcccagcaagagctgccacaagcccaaggccatcgtgcacaccgagaaagtgaacatgatgagcctgaccgtgctgggcctgcggatgctgttcgccaaaaccgtggccgtgaacttcctgctgaccgccaagctgttcttcctcctcaccgcc

SEQ ID NO: 6484 - DNA, 2586 bp, synthetic construct
  source 1..2586: mol_type = other DNA
atggccttaccagtgaccgccttgctcctgccgctggccttgctgctccacgccgccaggccggaagtgcagctggttgaatctggcggaggactggttcagcctggcggatctctgagactgtcttgtgccgccagcggcttcagcttcagcgacttttggatgagctgggtccgacaggcccctggcaaaggacttgaatgggtcgccacaatcagccaggccggcagcgagaaggactacgtggactctgtgaagggcagattcaccatcagccgggacaacgccaagaagtccctgtacctccagatgaacagcctgagagccgaggacaccgccgtgtactattgtgcctctggcgtgtacagcttcgactacagaggccagggcaccctggtcacagtctcttctggtaccggcggaggcggatctggcggcggaggtagcggtggcggaggatctgaattcgacatccagatgacccagaccacaagcagcctgtctgccagcctgggcgacagagtgaccatctcttgtagagccagccaggacatcagcaactacctgaactggtatcagcagaaacccgacggcaccgtgaagctgctgatctactacaccagcatcctgcacagcggcgtgcccagcagattttctggctctggcagcggcaccgactacagcctgaccatcagcaatctggaacaagaggacttcgctacctacttctgccagcaaggcaacaccctgccttggacatttggcggaggcaccaagctggaaatcaaagctctcgaggacctgaagaacgtgttcccacctgaggtggccgtgttcgagcctagcgaggccgagatcagccacacccagaaagccaccctcgtgtgcctggctaccggcttctaccccgaccatgtggaactgtcttggtgggtcaacggcaaagaggtgcacagcggcgtgtgtaccgacccccagccactgaaagaacagcccgccctgaacgacagccggtactgcctgagcagcagactgagagtgtccgccaccttctggcagaacccccggaaccacttcagatgccaggtgcagttctacggcctgagcgagaacgacgagtggacccaggacagagccaagcccgtgacccagatcgtgtctgccgaagcctggggcagagccgatgatgtgattaagatccactggcaggaaaagaagtccaacaccatcctgggcagccaggaaggcaacaccatgaagaccaacgacacctacatgaagttcagctggctgaccgtgcccgagaagtccctggacaaagaacacagatgcatcgtgcggcacgaaaacaacaagaacggcgtggaccaggaaatcatcttcccacccatcaagaccgatgtgattacaatggaccccaaggacaactgctccaaggacgccaacgataccctgctgctccagctgaccaacaccagcgcctactacatgtacttgttgctgctgctgaagtccgtggtgtacttcgccatcatcacatgctgcctgctgatggctatggtcaagcggaaggacagccggggaagggccaagcgatctggatctggagcaacaaacttctcactactcaaacaagcaggtgacgtggaggagaatcccgggcctactagtatggactggatttggcgcatccttttccttgtcggcgctgctaccggcgcgcattccttcgaagaagtgcaactggttgaatctggcggcggactggttaagcctggcggatctctgaagctgagctgtgccgcctctggcttcgccttcagcatctacgatatgagctgggtccgacagacccctgagaagagactggaatgggtcgcctacatctctagcggcggagggacctactatcccgacacagtgaagggcagattcaccatctccagagacaacgccaagaacaccctgtacctccagatgagcagcctgaagtccgaggacaccgccatgtactactgcgccagacacagcggctatggcacacattggggagtgctgtttgcctactggggccagggaacactggtcacagtttctgctacgcgtatccagaaccctgatcctgccgtgtaccagctgcgggatagcaagagcagcgacaagagcgtgtgtctgttcaccgacttcgacagccagaccaacgtgtcccagagcaaggactccgacgtgtacatcaccgataagtgcgtgctggacatgcggagcatggacttcaagagcaactccgccgtggcctggtccaacaagtccgatttcgcctgcgccaacgccttcaacaacagcattatccccgaggacacattcttcccaagccccgagagcagcgactccaccgaccacgtgaagcccaaagagacagagaacaccaagcagcccagcaagagctgccacaagcccaaggccatcgtgcacaccgagaaagtgaacatgatgagcctgaccgtgctgggcctgcggatgctgttcgccaaaaccgtggccgtgaacttcctgctgaccgccaagctgttcttcctcctcaccgcc

SEQ ID NO: 6485 - DNA, 2616 bp, synthetic construct
  source 1..2616: mol_type = other DNA
atggccttaccagtgaccgccttgctcctgccgctggccttgctgctccacgccgccaggccggaagtgcagctggttgaatctggcggaggactggttcagcctggcggatctctgagactgtcttgtgccgccagcggcttcagcttcagcgacttttggatgagctgggtccgacaggcccctggcaaaggacttgaatgggtcgccacaatcagccaggccggcagcgagaaggactacgtggactctgtgaagggcagattcaccatcagccgggacaacgccaagaagtccctgtacctccagatgaacagcctgagagccgaggacaccgccgtgtactattgtgcctctggcgtgtacagcttcgactacagaggccagggcaccctggtcacagtctcttctggtaccggcggaggcggatctggcggcggaggtagcggtggcggaggatctgaattcgacatcgtgatgacacagagccctgatagcctggccgtgtctctgggagagagagccaccatcaactgcaagagcagccagagcctgctgtacagaagcaaccagaagaactacctggcctggtatcagcagaagcccggccagcctcctaagctgctgatctactgggccagcaccagagaaagcggcgtgcccgatagattttctggctctggcagcggcaccgacttcaccctgacaatttctagcctgcaagccgaggacgtggccgtgtactactgccagcagtattacaactaccccagaaccttcggccagggcaccaaggtggaaatcaagagaacagttctcgaggacctgaagaacgtgttcccacctgaggtggccgtgttcgagcctagcgaggccgagatcagccacacccagaaagccaccctcgtgtgcctggctaccggcttctaccccgaccatgtggaactgtcttggtgggtcaacggcaaagaggtgcacagcggcgtgtgtaccgacccccagccactgaaagaacagcccgccctgaacgacagccggtactgcctgagcagcagactgagagtgtccgccaccttctggcagaacccccggaaccacttcagatgccaggtgcagttctacggcctgagcgagaacgacgagtggacccaggacagagccaagcccgtgacccagatcgtgtctgccgaagcctggggcagagccgatgatgtgattaagatccactggcaggaaaagaagtccaacaccatcctgggcagccaggaaggcaacaccatgaagaccaacgacacctacatgaagttcagctggctgaccgtgcccgagaagtccctggacaaagaacacagatgcatcgtgcggcacgaaaacaacaagaacggcgtggaccaggaaatcatcttcccacccatcaagaccgatgtgattacaatggaccccaaggacaactgctccaaggacgccaacgataccctgctgctccagctgaccaacaccagcgcctactacatgtacttgttgctgctgctgaagtccgtggtgtacttcgccatcatcacatgctgcctgctgatggctatggtcaagcggaaggacagccggggaagggccaagcgatctggatctggagcaacaaacttctcactactcaaacaagcaggtgacgtggaggagaatcccgggcctactagtatggactggatttggcgcatccttttccttgtcggcgctgctaccggcgcgcattccttcgaagaagttcagctgcttgaatcaggcggcggactggttcaacctggcggatctctgagactgagctgtgccgccagcggctacagcatcacaagcgactatgcctggaactgggtccgacaggcccctggcaaaggactggaatgggtgtcctacatcagcaacagcggcagcaccagctacaaccccagcctgaagtcccggttcaccatcagcagagacaacagcaagaacaccctgtacctccagatgaacagcctgagagctgaggacaccgccgtgtattattgcgccaaagagcggaactacgactacgacgattactactacgctatggactactggggccagggaaccctggtcacagtctcttctacgcgtatccagaaccctgatcctgccgtgtaccagctgcgggatagcaagagcagcgacaagagcgtgtgtctgttcaccgacttcgacagccagaccaacgtgtcccagagcaaggactccgacgtgtacatcaccgataagtgcgtgctggacatgcggagcatggacttcaagagcaactccgccgtggcctggtccaacaagtccgatttcgcctgcgccaacgccttcaacaacagcattatccccgaggacacattcttcccaagccccgagagcagcgactccaccgaccacgtgaagcccaaagagacagagaacaccaagcagcccagcaagagctgccacaagcccaaggccatcgtgcacaccgagaaagtgaacatgatgagcctgaccgtgctgggcctgcggatgctgttcgccaaaaccgtggccgtgaacttcctgctgaccgccaagctgttcttcctcctcaccgcc

SEQ ID NO: 6486 - DNA, 2595 bp, synthetic construct
  source 1..2595: mol_type = other DNA
atggccttaccagtgaccgccttgctcctgccgctggccttgctgctccacgccgccaggccggaagtgcagctggttgaatctggcggaggactggttcagcctggcggatctctgagactgtcttgtgccgccagcggcttcagcttcagcgacttttggatgagctgggtccgacaggcccctggcaaaggacttgaatgggtcgccacaatcagccaggccggcagcgagaaggactacgtggactctgtgaagggcagattcaccatcagccgggacaacgccaagaagtccctgtacctccagatgaacagcctgagagccgaggacaccgccgtgtactattgtgcctctggcgtgtacagcttcgactacagaggccagggcaccctggtcacagtctcttctggtaccggcggaggcggatctggcggcggaggtagcggtggcggaggatctgaattcgacgtggtcatgacacagagccctctgagcctgcctgtgacacttggacagcctgccagcatcagctgtagaagcagccagagcctgctgcacagcagcggcaatacctacctggaatggtatcagcagaggcccggacagagccccagacctctgatctacaagatcagcacccggttcagcggcgtgcccgatagattttctggctctggcagcggcaccgacttcaccctgaagattagcagagtggaagccgaggacgtgggcgtgtactactgcttccaaggcagccacgtgccatacacctttggcggcggaacaaaggtggaaatcaagagactcgaggacctgaagaacgtgttcccacctgaggtggccgtgttcgagcctagcgaggccgagatcagccacacccagaaagccaccctcgtgtgcctggctaccggcttctaccccgaccatgtggaactgtcttggtgggtcaacggcaaagaggtgcacagcggcgtgtgtaccgacccccagccactgaaagaacagcccgccctgaacgacagccggtactgcctgagcagcagactgagagtgtccgccaccttctggcagaacccccggaaccacttcagatgccaggtgcagttctacggcctgagcgagaacgacgagtggacccaggacagagccaagcccgtgacccagatcgtgtctgccgaagcctggggcagagccgatgatgtgattaagatccactggcaggaaaagaagtccaacaccatcctgggcagccaggaaggcaacaccatgaagaccaacgacacctacatgaagttcagctggctgaccgtgcccgagaagtccctggacaaagaacacagatgcatcgtgcggcacgaaaacaacaagaacggcgtggaccaggaaatcatcttcccacccatcaagaccgatgtgattacaatggaccccaaggacaactgctccaaggacgccaacgataccctgctgctccagctgaccaacaccagcgcctactacatgtacttgttgctgctgctgaagtccgtggtgtacttcgccatcatcacatgctgcctgctgatggctatggtcaagcggaaggacagccggggaagggccaagcgatctggatctggagcaacaaacttctcactactcaaacaagcaggtgacgtggaggagaatcccgggcctactagtatggactggatttggcgcatccttttccttgtcggcgctgctaccggcgcgcattccttcgaacaagttcagctggttcagagcggagccgaagtgaagaaacctggggcctctgtgaaggtgtcctgcaaagcctctggcctgaccatcgaggactactacatgcactgggtccgacaggcccctggacaaggacttgaatggatgggctggatcgaccccgagaacggcgatacagagtacggccctaagttccagggcagagtgaccatgaccagagacaccagcatcaacaccgcctacatggaactgagccggctgagatccgatgacaccgccgtgtactattgcgccgtgcacaatgcccactacggcacttggtttgcctattggggccagggcacactggtcaccgttagctctacgcgtatccagaaccctgatcctgccgtgtaccagctgcgggatagcaagagcagcgacaagagcgtgtgtctgttcaccgacttcgacagccagaccaacgtgtcccagagcaaggactccgacgtgtacatcaccgataagtgcgtgctggacatgcggagcatggacttcaagagcaactccgccgtggcctggtccaacaagtccgatttcgcctgcgccaacgccttcaacaacagcattatccccgaggacacattcttcccaagccccgagagcagcgactccaccgaccacgtgaagcccaaagagacagagaacaccaagcagcccagcaagagctgccacaagcccaaggccatcgtgcacaccgagaaagtgaacatgatgagcctgaccgtgctgggcctgcggatgctgttcgccaaaaccgtggccgtgaacttcctgctgaccgccaagctgttcttcctcctcaccgcc

SEQ ID NO: 6487 - DNA, 2571 bp, synthetic construct
  source 1..2571: mol_type = other DNA
atggccttaccagtgaccgccttgctcctgccgctggccttgctgctccacgccgccaggccggaagtgcagctggttgaatctggcggaggactggttcagcctggcggatctctgagactgtcttgtgccgccagcggcttcagcttcagcgacttttggatgagctgggtccgacaggcccctggcaaaggacttgaatgggtcgccacaatcagccaggccggcagcgagaaggactacgtggactctgtgaagggcagattcaccatcagccgggacaacgccaagaagtccctgtacctccagatgaacagcctgagagccgaggacaccgccgtgtactattgtgcctctggcgtgtacagcttcgactacagaggccagggcaccctggtcacagtctcttctggtaccggcggaggcggatctggcggcggaggtagcggtggcggaggatctgaattcgacatccagatgacacagagccctagcagcctgtctgccagcgtgggagacagagtgaccatcacctgtagagccagcgagaacatctacagcaacctggcctggtatcagcagaagcctggcaaggcccctaagctgctgatctacgccgccaccaatctggctgatggcgtgccaagcagattttccggctctggcagcggcaccgatttcaccctgacaatatccagcctccagcctgaggacttcgccacctactactgccagcacttttggggcacccctacattcggccagggcaccaaggtggaaatcaagagaacagttctcgaggacctgaagaacgtgttcccacctgaggtggccgtgttcgagcctagcgaggccgagatcagccacacccagaaagccaccctcgtgtgcctggctaccggcttctaccccgaccatgtggaactgtcttggtgggtcaacggcaaagaggtgcacagcggcgtgtgtaccgacccccagccactgaaagaacagcccgccctgaacgacagccggtactgcctgagcagcagactgagagtgtccgccaccttctggcagaacccccggaaccacttcagatgccaggtgcagttctacggcctgagcgagaacgacgagtggacccaggacagagccaagcccgtgacccagatcgtgtctgccgaagcctggggcagagccgatgatgtgattaagatccactggcaggaaaagaagtccaacaccatcctgggcagccaggaaggcaacaccatgaagaccaacgacacctacatgaagttcagctggctgaccgtgcccgagaagtccctggacaaagaacacagatgcatcgtgcggcacgaaaacaacaagaacggcgtggaccaggaaatcatcttcccacccatcaagaccgatgtgattacaatggaccccaaggacaactgctccaaggacgccaacgataccctgctgctccagctgaccaacaccagcgcctactacatgtacttgttgctgctgctgaagtccgtggtgtacttcgccatcatcacatgctgcctgctgatggctatggtcaagcggaaggacagccggggaagggccaagcgatctggatctggagcaacaaacttctcactactcaaacaagcaggtgacgtggaggagaatcccgggcctactagtatggactggatttggcgcatccttttccttgtcggcgctgctaccggcgcgcattccttcgaagaagtgcagctggttgaatcaggtggcggcctggttcaacctggcggatctctgagactgagctgtgccgcctctggcttcagcctgacaaattacggcgtgcactgggtccgacaggcccctggaaaaggactggaatgggtgtccgtgatttggagcggcggcagcaccgattacaacgccgccttcatcagccggttcaccatcagcgccgacaccagcaagaataccgcctacctccagatgaactccctgagagccgaggacaccgccgtgtactattgcgccagagaactgatccacgctatggacaactggggccagggaaccctggtcacagtctcttctacgcgtatccagaaccctgatcctgccgtgtaccagctgcgggatagcaagagcagcgacaagagcgtgtgtctgttcaccgacttcgacagccagaccaacgtgtcccagagcaaggactccgacgtgtacatcaccgataagtgcgtgctggacatgcggagcatggacttcaagagcaactccgccgtggcctggtccaacaagtccgatttcgcctgcgccaacgccttcaacaacagcattatccccgaggacacattcttcccaagccccgagagcagcgactccaccgaccacgtgaagcccaaagagacagagaacaccaagcagcccagcaagagctgccacaagcccaaggccatcgtgcacaccgagaaagtgaacatgatgagcctgaccgtgctgggcctgcggatgctgttcgccaaaaccgtggccgtgaacttcctgctgaccgccaagctgttcttcctcctcaccgcc

SEQ ID NO: 6488 - DNA, 2592 bp, synthetic construct
  source 1..2592: mol_type = other DNA
atggccttaccagtgaccgccttgctcctgccgctggccttgctgctccacgccgccaggccggaagtgcagctggttgaatctggcggaggactggttcagcctggcggatctctgagactgtcttgtgccgccagcggcttcagcttcagcgacttttggatgagctgggtccgacaggcccctggcaaaggacttgaatgggtcgccacaatcagccaggccggcagcgagaaggactacgtggactctgtgaagggcagattcaccatcagccgggacaacgccaagaagtccctgtacctccagatgaacagcctgagagccgaggacaccgccgtgtactattgtgcctctggcgtgtacagcttcgactacagaggccagggcaccctggtcacagtctcttctggtaccggcggaggcggatctggcggcggaggtagcggtggcggaggatctgaattcgacttcgtgatgacacagagccctctgagcctgcctgtgacacctggcgaacctgccagcatcagctgtagaagcagccagagcatcgtgcacagcaacggcaacacctacctggaatggtatctccagaagcctggacagagcccacagctgctgatctacaaggtgtccaacagattcagcggcgtgcccgacagattttctggcagcggctctggcaccgacttcaccctgaagattagcagagtggaagccgaggacgtgggcgtgtactactgcttccaaggctctcacgtgcccctgacctttggacagggcaccaagctggaaatcaagagactcgaggacctgaagaacgtgttcccacctgaggtggccgtgttcgagcctagcgaggccgagatcagccacacccagaaagccaccctcgtgtgcctggctaccggcttctaccccgaccatgtggaactgtcttggtgggtcaacggcaaagaggtgcacagcggcgtgtgtaccgacccccagccactgaaagaacagcccgccctgaacgacagccggtactgcctgagcagcagactgagagtgtccgccaccttctggcagaacccccggaaccacttcagatgccaggtgcagttctacggcctgagcgagaacgacgagtggacccaggacagagccaagcccgtgacccagatcgtgtctgccgaagcctggggcagagccgatgatgtgattaagatccactggcaggaaaagaagtccaacaccatcctgggcagccaggaaggcaacaccatgaagaccaacgacacctacatgaagttcagctggctgaccgtgcccgagaagtccctggacaaagaacacagatgcatcgtgcggcacgaaaacaacaagaacggcgtggaccaggaaatcatcttcccacccatcaagaccgatgtgattacaatggaccccaaggacaactgctccaaggacgccaacgataccctgctgctccagctgaccaacaccagcgcctactacatgtacttgttgctgctgctgaagtccgtggtgtacttcgccatcatcacatgctgcctgctgatggctatggtcaagcggaaggacagccggggaagggccaagcgatctggatctggagcaacaaacttctcactactcaaacaagcaggtgacgtggaggagaatcccgggcctactagtatggactggatttggcgcatccttttccttgtcggcgctgctaccggcgcgcattccttcgaagaagtgcagctggttgaaagcggagccgaagtgaagaaacctggggcctctgtgaaggtgtcctgcaaggccagcggctacacctttaccagctactggattcactgggtccgacaggcccctggacaaggacttgagtggatgggcgagaacgacccctccaacggcaggaccaactacaacgagaagttcaagaaccgcgtgaccctgaccgtggacaccagcatctctaccgcctacatggaactgagccggctgagatccgatgacaccgccgtgtactattgcgccagaggacccaactacttttacagcatggactactggggccagggcacaatggtcaccgttagctctacgcgtatccagaaccctgatcctgccgtgtaccagctgcgggatagcaagagcagcgacaagagcgtgtgtctgttcaccgacttcgacagccagaccaacgtgtcccagagcaaggactccgacgtgtacatcaccgataagtgcgtgctggacatgcggagcatggacttcaagagcaactccgccgtggcctggtccaacaagtccgatttcgcctgcgccaacgccttcaacaacagcattatccccgaggacacattcttcccaagccccgagagcagcgactccaccgaccacgtgaagcccaaagagacagagaacaccaagcagcccagcaagagctgccacaagcccaaggccatcgtgcacaccgagaaagtgaacatgatgagcctgaccgtgctgggcctgcggatgctgttcgccaaaaccgtggccgtgaacttcctgctgaccgccaagctgttcttcctcctcaccgcc

SEQ ID NO: 6489 - DNA, 2571 bp, synthetic construct
  source 1..2571: mol_type = other DNA
atggccttaccagtgaccgccttgctcctgccgctggccttgctgctccacgccgccaggccggaagtgcagctggttgaatctggcggaggactggttcagcctggcggatctctgagactgtcttgtgccgccagcggcttcagcttcagcgacttttggatgagctgggtccgacaggcccctggcaaaggacttgaatgggtcgccacaatcagccaggccggcagcgagaaggactacgtggactctgtgaagggcagattcaccatcagccgggacaacgccaagaagtccctgtacctccagatgaacagcctgagagccgaggacaccgccgtgtactattgtgcctctggcgtgtacagcttcgactacagaggccagggcaccctggtcacagtctcttctggtaccggcggaggcggatctggcggcggaggtagcggtggcggaggatctgaattcgacatccagctgactcagagccctagctttctgagcgccagcgtgggcgacagagtgaccatcacatgtagcgccagatccagcatcagcttcatgtactggtatcagcagaagcccggcaaggcccctaagctgctgatctacgacaccagcaatctggcctctggcgtgcccagcagattttctggaagcggcagcggcaccgagttcaccctgacaatctctagcctggaagccgaggatgccgccacctactattgccagcagtggtccagctatcccctgacatttggacagggcaccaagctggaaatcaaactcgaggacctgaagaacgtgttcccacctgaggtggccgtgttcgagcctagcgaggccgagatcagccacacccagaaagccaccctcgtgtgcctggctaccggcttctaccccgaccatgtggaactgtcttggtgggtcaacggcaaagaggtgcacagcggcgtgtgtaccgacccccagccactgaaagaacagcccgccctgaacgacagccggtactgcctgagcagcagactgagagtgtccgccaccttctggcagaacccccggaaccacttcagatgccaggtgcagttctacggcctgagcgagaacgacgagtggacccaggacagagccaagcccgtgacccagatcgtgtctgccgaagcctggggcagagccgatgatgtgattaagatccactggcaggaaaagaagtccaacaccatcctgggcagccaggaaggcaacaccatgaagaccaacgacacctacatgaagttcagctggctgaccgtgcccgagaagtccctggacaaagaacacagatgcatcgtgcggcacgaaaacaacaagaacggcgtggaccaggaaatcatcttcccacccatcaagaccgatgtgattacaatggaccccaaggacaactgctccaaggacgccaacgataccctgctgctccagctgaccaacaccagcgcctactacatgtacttgttgctgctgctgaagtccgtggtgtacttcgccatcatcacatgctgcctgctgatggctatggtcaagcggaaggacagccggggaagggccaagcgatctggatctggagcaacaaacttctcactactcaaacaagcaggtgacgtggaggagaatcccgggcctactagtatggactggatttggcgcatccttttccttgtcggcgctgctaccggcgcgcattccttcgaacaggttcagctggttcagtctggggccgaagtgaagaaacctggggcctctgtgaaggtgtcctgcaaggcttccggctacacctttaccggctcttggatgaactgggtccgacaggctcctggacagggactcgaatggatcggcagaatctatcctggcgacggcgagacaaactacaacggcaagttcaaggaccgcgtgacaatcaccgccgacaagagcacaagcaccgcctacatggaactgagcagcctgcggagcgaagataccgccgtgtactactgcgcccggatctacggcaacaacgtgtacttcgatgtgtggggccagggcacaaccgtgacagtctcttctacgcgtatccagaaccctgatcctgccgtgtaccagctgcgggatagcaagagcagcgacaagagcgtgtgtctgttcaccgacttcgacagccagaccaacgtgtcccagagcaaggactccgacgtgtacatcaccgataagtgcgtgctggacatgcggagcatggacttcaagagcaactccgccgtggcctggtccaacaagtccgatttcgcctgcgccaacgccttcaacaacagcattatccccgaggacacattcttcccaagccccgagagcagcgactccaccgaccacgtgaagcccaaagagacagagaacaccaagcagcccagcaagagctgccacaagcccaaggccatcgtgcacaccgagaaagtgaacatgatgagcctgaccgtgctgggcctgcggatgctgttcgccaaaaccgtggccgtgaacttcctgctgaccgccaagctgttcttcctcctcaccgcc

SEQ ID NO: 6490 - DNA, 2595 bp, synthetic construct
  source 1..2595: mol_type = other DNA
atggccttaccagtgaccgccttgctcctgccgctggccttgctgctccacgccgccaggccggaagtgcagctggttgaatctggcggaggactggttcagcctggcggatctctgagactgtcttgtgccgccagcggcttcagcttcagcgacttttggatgagctgggtccgacaggcccctggcaaaggacttgaatgggtcgccacaatcagccaggccggcagcgagaaggactacgtggactctgtgaagggcagattcaccatcagccgggacaacgccaagaagtccctgtacctccagatgaacagcctgagagccgaggacaccgccgtgtactattgtgcctctggcgtgtacagcttcgactacagaggccagggcaccctggtcacagtctcttctggtaccggcggaggcggatctggcggcggaggtagcggtggcggaggatctgaattccagctggtgctgacacagtctccaagcgcctctgccagcctgggatctagcgtgaagctgacctgtacactgagcagcggccacaagaccgacaccatcgactggtatcagcagcagcctggcaaggcccctagatacctgatgaagctggaaggcagcggcagctacaacaaaggctctggcgtgcccgatagattcagcggcagttcttctggcgctgattggtatctgaccatcagcagcctccagagcgaggacgaggccgattactactgcggcacagactaccccggcaactacctgtttggcggcggaacacagctgacagtgcttggcctcgaggacctgaagaacgtgttcccacctgaggtggccgtgttcgagcctagcgaggccgagatcagccacacccagaaagccaccctcgtgtgcctggctaccggcttctaccccgaccatgtggaactgtcttggtgggtcaacggcaaagaggtgcacagcggcgtgtgtaccgacccccagccactgaaagaacagcccgccctgaacgacagccggtactgcctgagcagcagactgagagtgtccgccaccttctggcagaacccccggaaccacttcagatgccaggtgcagttctacggcctgagcgagaacgacgagtggacccaggacagagccaagcccgtgacccagatcgtgtctgccgaagcctggggcagagccgatgatgtgattaagatccactggcaggaaaagaagtccaacaccatcctgggcagccaggaaggcaacaccatgaagaccaacgacacctacatgaagttcagctggctgaccgtgcccgagaagtccctggacaaagaacacagatgcatcgtgcggcacgaaaacaacaagaacggcgtggaccaggaaatcatcttcccacccatcaagaccgatgtgattacaatggaccccaaggacaactgctccaaggacgccaacgataccctgctgctccagctgaccaacaccagcgcctactacatgtacttgttgctgctgctgaagtccgtggtgtacttcgccatcatcacatgctgcctgctgatggctatggtcaagcggaaggacagccggggaagggccaagcgatctggatctggagcaacaaacttctcactactcaaacaagcaggtgacgtggaggagaatcccgggcctactagtatggactggatttggcgcatccttttccttgtcggcgctgctaccggcgcgcattccttcgaacaagaacagctggttgaaagcggcggaggactggttcaacctggcggttctctgagactgagctgtgccgccagcggcttcaccttcagcgactactacatgagctggatcagacaggccccaggcaaaggactggaatgggtcgccacaatctaccccagcagcggcaagacctactacgccgattctgccaagggcagactgaccatctccagcgacaacgccaaggacagcctgtacctccagatgaacagcctgagagccgaggacaccgccgtgtactactgcaccagagatagctacgccgacgacgccgctctgtttgacatttggggccagggcaccaccgtgaccgtttcttctacgcgtatccagaaccctgatcctgccgtgtaccagctgcgggatagcaagagcagcgacaagagcgtgtgtctgttcaccgacttcgacagccagaccaacgtgtcccagagcaaggactccgacgtgtacatcaccgataagtgcgtgctggacatgcggagcatggacttcaagagcaactccgccgtggcctggtccaacaagtccgatttcgcctgcgccaacgccttcaacaacagcattatccccgaggacacattcttcccaagccccgagagcagcgactccaccgaccacgtgaagcccaaagagacagagaacaccaagcagcccagcaagagctgccacaagcccaaggccatcgtgcacaccgagaaagtgaacatgatgagcctgaccgtgctgggcctgcggatgctgttcgccaaaaccgtggccgtgaacttcctgctgaccgccaagctgttcttcctcctcaccgcc

SEQ ID NO: 6491 - DNA, 2571 bp, synthetic construct; identical to SEQ ID NO: 6487
  source 1..2571: mol_type = other DNA

SEQ ID NO: 6492 - DNA, 2592 bp, synthetic construct; identical to SEQ ID NO: 6488
  source 1..2592: mol_type = other DNA

SEQ ID NO: 6493 - DNA, 2571 bp, synthetic construct; identical to SEQ ID NO: 6489
  source 1..2571: mol_type = other DNA

SEQ ID NO: 6494 - DNA, 2595 bp, synthetic construct; identical to SEQ ID NO: 6490
  source 1..2595: mol_type = other DNA

SEQ ID NO: 6495 - DNA, 2592 bp, synthetic construct
  source 1..2592: mol_type = other DNA
atggccttaccagtgaccgccttgctcctgccgctggccttgctgctccacgccgccaggccggaagtgcagctggttgaatctggcggaggactggttcagcctggcggatctctgagactgtcttgtgccgccagcggcttcagcttcagcgacttttggatgagctgggtccgacaggcccctggcaaaggacttgaatgggtcgccacaatcagccaggccggcagcgagaaggactacgtggactctgtgaagggcagattcaccatcagccgggacaacgccaagaagtccctgtacctccagatgaacagcctgagagccgaggacaccgccgtgtactattgtgcctctggcgtgtacagcttcgactacagaggccagggcaccctggtcacagtctcttctggtaccggcggaggcggatctggcggcggaggtagcggtggcggaggatctgaattcgatatccagctcactcaaagcccctctagtctctctgcctcagtgggggatcgggtcagttttacttgtcaagcttcacaggatatcaacaacttccttaattggtatcagcagaagccaggaaaagcacccaagctgctcatctatgatgcctcaaatttggagacgggtgttcccagtcgattctctgggtcagggtccgggaccgactttacgtttacgatctcctctctgcagcccgaagacatcgccacatactattgtcaacagtacggcaacttgcctttcacatttgggggcgggactaaggttgaaatcaagaggctcgaggacctgaagaacgtgttcccacctgaggtggccgtgttcgagcctagcgaggccgagatcagccacacccagaaagccaccctcgtgtgcctggctaccggcttctaccccgaccatgtggaactgtcttggtgggtcaacggcaaagaggtgcacagcggcgtgtgtaccgacccccagccactgaaagaacagcccgccctgaacgacagccggtactgcctgagcagcagactgagagtgtccgccaccttctggcagaacccccggaaccacttcagatgccaggtgcagttctacggcctgagcgagaacgacgagtggacccaggacagagccaagcccgtgacccagatcgtgtctgccgaagcctggggcagagccgatgatgtgattaagatccactggcaggaaaagaagtccaacaccatcctgggcagccaggaaggcaacaccatgaagaccaacgacacctacatgaagttcagctggctgaccgtgcccgagaagtccctggacaaagaacacagatgcatcgtgcggcacgaaaacaacaagaacggcgtggaccaggaaatcatcttcccacccatcaagaccgatgtgattacaatggaccccaaggacaactgctccaaggacgccaacgataccctgctgctccagctgaccaacaccagcgcctactacatgtacttgttgctgctgctgaagtccgtggtgtacttcgccatcatcacatgctgcctgctgatggctatggtcaagcggaaggacagccggggaagggccaagcgatctggatctggagcaacaaacttctcactactcaaacaagcaggtgacgtggaggagaatcccgggcctactagtatggactggatttggcgcatccttttccttgtcggcgctgctaccggcgcgcattccttcgaacaggtacagctgcaggaatctgggcccggacttgtcaagccaagtcagacactttctcttacatgtaccgtgagcggcggaagtataagcagtggaggcttttactggtcttggatacggcagcacccaggcaaaggcttggagtggattggatacattcatcattcaggatctacacactataatccatcccttaagtcccgggtcaccattagcattgatacgtctaagaatctgttcagtctcaggctgtcctccgtcactgctgccgacacagccgtgtactactgcgcctccttggtttactgcggaggcgactgttatagcggctttgattattgggggcaggggaccctcgtaaccgtgagctctacgcgtatccagaaccctgatcctgccgtgtaccagctgcgggatagcaagagcagcgacaagagcgtgtgtctgttcaccgacttcgacagccagaccaacgtgtcccagagcaaggactccgacgtgtacatcaccgataagtgcgtgctggacatgcggagcatggacttcaagagcaactccgccgtggcctggtccaacaagtccgatttcgcctgcgccaacgccttcaacaacagcattatccccgaggacacattcttcccaagccccgagagcagcgactccaccgaccacgtgaagcccaaagagacagagaacaccaagcagcccagcaagagctgccacaagcccaaggccatcgtgcacaccgagaaagtgaacatgatgagcctgaccgtgctgggcctgcggatgctgttcgccaaaaccgtggccgtgaacttcctgctgaccgccaagctgttcttcctcctcaccgcc

SEQ ID NO: 6496 - DNA, 2580 bp, synthetic construct
  source 1..2580: mol_type = other DNA
atggccttaccagtgaccgccttgctcctgccgctggccttgctgctccacgccgccaggccggaagtgcagctggttgaatctggcggaggactggttcagcctggcggatctctgagactgtcttgtgccgccagcggcttcagcttcagcgacttttggatgagctgggtccgacaggcccctggcaaaggacttgaatgggtcgccacaatcagccaggccggcagcgagaaggactacgtggactctgtgaagggcagattcaccatcagccgggacaacgccaagaagtccctgtacctccagatgaacagcctgagagccgaggacaccgccgtgtactattgtgcctctggcgtgtacagcttcgactacagaggccagggcaccctggtcacagtctcttctggtaccggcggaggcggatctggcggcggaggtagcggtggcggaggatctgaattcgacattcagatgacacagagccctagcagcctgagcgcctctgtgggagacagagtgaccatcacatgcaagagcagccagagcgtgctgtactccagcaatcagaagaactacctggcctggttccagcagaagcctggcaaggctcctaagctgctgatctactgggccagcaccagagaaagcggcgtgccaagcagattttctggcagcggctctggcaccgacttcaccctgacaatatccagcctccagcctgaggacttcgccacctacttttgccaccagtacctgagcagctacacattcggacagggcaccaaggtggaaatcaagcggctcgaggacctgaagaacgtgttcccacctgaggtggccgtgttcgagcctagcgaggccgagatcagccacacccagaaagccaccctcgtgtgcctggctaccggcttctaccccgaccatgtggaactgtcttggtgggtcaacggcaaagaggtgcacagcggcgtgtgtaccgacccccagccactgaaagaacagcccgccctgaacgacagccggtactgcctgagcagcagactgagagtgtccgccaccttctggcagaacccccggaaccacttcagatgccaggtgcagttctacggcctgagcgagaacgacgagtggacccaggacagagccaagcccgtgacccagatcgtgtctgccgaagcctggggcagagccgatgatgtgattaagatccactggcaggaaaagaagtccaacaccatcctgggcagccaggaaggcaacaccatgaagaccaacgacacctacatgaagttcagctggctgaccgtgcccgagaagtccctggacaaagaacacagatgcatcgtgcggcacgaaaacaacaagaacggcgtggaccaggaaatcatcttcccacccatcaagaccgatgtgattacaatggaccccaaggacaactgctccaaggacgccaacgataccctgctgctccagctgaccaacaccagcgcctactacatgtacttgttgctgctgctgaagtccgtggtgtacttcgccatcatcacatgctgcctgctgatggctatggtcaagcggaaggacagccggggaagggccaagcgatctggatctggagcaacaaacttctcactactcaaacaagcaggtgacgtggaggagaatcccgggcctactagtatggactggatttggcgcatccttttccttgtcggcgctgctaccggcgcgcattccttcgaagaggtgcagctggttgaatctggcggaggactggttcagcctggcggatctctgagactgtcttgtgccgccagcggctacaccttcaccacctattggatgcactgggtccgacaggcccctggcaaaggacttgagtgggtcggatatatcaggcccagcaccggctacacagagtacaaccagaagttcaaggaccgcttcaccatcagcgccgacaccagcaagaataccgcctacctccagatgaacagcctgagagccgaggacaccgccgtgtactactgtgccagatccagatggctgctggactattggggccagggcacactggttacagtttctacgcgtatccagaaccctgatcctgccgtgtaccagctgcgggatagcaagagcagcgacaagagcgtgtgtctgttcaccgacttcgacagccagaccaacgtgtcccagagcaaggactccgacgtgtacatcaccgataagtgcgtgctggacatgcggagcatggacttcaagagcaactccgccgtggcctggtccaacaagtccgatttcgcctgcgccaacgccttcaacaacagcattatccccgaggacacattcttcccaagccccgagagcagcgactccaccgaccacgtgaagcccaaagagacagagaacaccaagcagcccagcaagagctgccacaagcccaaggccatcgtgcacaccgagaaagtgaacatgatgagcctgaccgtgctgggcctgcggatgctgttcgccaaaaccgtggccgtgaacttcctgctgaccgccaagctgttcttcctcctcaccgcc

SEQ ID NO: 6497 - DNA, 2571 bp, synthetic construct
  source 1..2571: mol_type = other DNA
atggccttaccagtgaccgccttgctcctgccgctggccttgctgctccacgccgccaggccggaagtgcagctggttgaatctggcggaggactggttcagcctggcggatctctgagactgtcttgtgccgccagcggcttcagcttcagcgacttttggatgagctgggtccgacaggcccctggcaaaggacttgaatgggtcgccacaatcagccaggccggcagcgagaaggactacgtggactctgtgaagggcagattcaccatcagccgggacaacgccaagaagtccctgtacctccagatgaacagcctgagagccgaggacaccgccgtgtactattgtgcctctggcgtgtacagcttcgactacagaggccagggcaccctggtcacagtctcttctggtaccggcggaggcggatctggcggcggaggtagcggtggcggaggatctgaattcgacatccagatgacacagagccctagcagcctgtctgccagcgtgggagacagagtgaccatcacctgtagagccagccaggacatcagcaactacctgaactggtatcagcagaagcccggcaaggcccctaagctgctgatctactacaccagcagactgcacagcggcgtgcccagcagattttctggctctggcagcggcaccgacttcaccctgacaatatctagcctccagcctgaggacttcgccacctactattgccagcagggcaacaccctgccttacacatttggacagggcaccaaggtggaaatcaagagactcgaggacctgaagaacgtgttcccacctgaggtggccgtgttcgagcctagcgaggccgagatcagccacacccagaaagccaccctcgtgtgcctggctaccggcttctaccccgaccatgtggaactgtcttggtgggtcaacggcaaagaggtgcacagcggcgtgtgtaccgacccccagccactgaaagaacagcccgccctgaacgacagccggtactgcctgagcagcagactgagagtgtccgccaccttctggcagaacccccggaaccacttcagatgccaggtgcagttctacggcctgagcgagaacgacgagtggacccaggacagagccaagcccgtgacccagatcgtgtctgccgaagcctggggcagagccgatgatgtgattaagatccactggcaggaaaagaagtccaacaccatcctgggcagccaggaaggcaacaccatgaagaccaacgacacctacatgaagttcagctggctgaccgtgcccgagaagtccctggacaaagaacacagatgcatcgtgcggcacgaaaacaacaagaacggcgtggaccaggaaatcatcttcccacccatcaagaccgatgtgattacaatggaccccaaggacaactgctccaaggacgccaacgataccctgctgctccagctgaccaacaccagcgcctactacatgtacttgttgctgctgctgaagtccgtggtgtacttcgccatcatcacatgctgcctgctgatggctatggtcaagcggaaggacagccggggaagggccaagcgatctggatctggagcaacaaacttctcactactcaaacaagcaggtgacgtggaggagaatcccgggcctactagtatggactggatttggcgcatccttttccttgtcggcgctgctaccggcgcgcattccttcgaagaagtgcagctggttgaatcaggtggcggcctggttcaacctggcggatctctgagactgagctgtgccgccagcggcttcaccttcagcgactactttatgagctgggtccgacaggcccctggcaaaggacttgaatgggtcgccaccatcagcaatggcggcacctacacttactaccccgacagcgtgaagggcagattcaccatctccagagacaacagcaagaacaccctgtacctccagatgaactccctgagagccgaggacaccgccgtgtactactgcgccagattcgacggctacatcttcgactattggggccagggcaccctggtcacagtctcttctacgcgtatccagaaccctgatcctgccgtgtaccagctgcgggatagcaagagcagcgacaagagcgtgtgtctgttcaccgacttcgacagccagaccaacgtgtcccagagcaaggactccgacgtgtacatcaccgataagtgcgtgctggacatgcggagcatggacttcaagagcaactccgccgtggcctggtccaacaagtccgatttcgcctgcgccaacgccttcaacaacagcattatccccgaggacacattcttcccaagccccgagagcagcgactccaccgaccacgtgaagcccaaagagacagagaacaccaagcagcccagcaagagctgccacaagcccaaggccatcgtgcacaccgagaaagtgaacatgatgagcctgaccgtgctgggcctgcggatgctgttcgccaaaaccgtggccgtgaacttcctgctgaccgccaagctgttcttcctcctcaccgcc

SEQ ID NO: 6498 - DNA, 2586 bp, synthetic construct
  source 1..2586: mol_type = other DNA
atggccttaccagtgaccgccttgctcctgccgctggccttgctgctccacgccgccaggccggaagtgcagctggttgaatctggcggaggactggttcagcctggcggatctctgagactgtcttgtgccgccagcggcttcagcttcagcgacttttggatgagctgggtccgacaggcccctggcaaaggacttgaatgggtcgccacaatcagccaggccggcagcgagaaggactacgtggactctgtgaagggcagattcaccatcagccgggacaacgccaagaagtccctgtacctccagatgaacagcctgagagccgaggacaccgccgtgtactattgtgcctctggcgtgtacagcttcgactacagaggccagggcaccctggtcacagtctcttctggtaccggcggaggcggatctggcggcggaggtagcggtggcggaggatctgaattcgacatccagatgacacagactacatcctccctgtctgcctctctgggagacagagtcaccatcagttgcagggcaagtcaggacattagtaagtacctgaactggtatcagcagaaaccagatggaactgttaaactcctgatctaccatacatcaagattacactcaggagtcccatcaaggttcagtggcagtgggtctggaacagattattctctcaccattagcaacctggagcaagaagatattgccacttacttttgccaacagggtaatacgcttccgtacacgttcggaggggggaccaagctggagatcacactcgagatccagaaccctgatcctgccgtgtaccagctgcgggatagcaagagcagcgacaagagcgtgtgtctgttcaccgacttcgacagccagaccaacgtgtcccagagcaaggactccgacgtgtacatcaccgataagtgcgtgctggacatgcggagcatggacttcaagagcaactccgccgtggcctggtccaacaagtccgatttcgcctgcgccaacgccttcaacaacagcattatccccgaggacacattcttcccaagccccgagagcagcgactccaccgaccacgtgaagcccaaagagacagagaacaccaagcagcccagcaagagctgccacaagcccaaggccatcgtgcacaccgagaaagtgaacatgatgagcctgaccgtgctgggcctgcggatgctgttcgccaaaaccgtggccgtgaacttcctgctgaccgccaagctgttcttcctcctcaccgcccgcgccaagagaagcggatctggcgtgaagcagaccctgaatttcgacctgctgaagctggctggcgacgtggaatccaacccaggccctactagtatggactggatttggcgcatccttttccttgtcggcgctgctaccggcgcgcattccttcgaagtgaaactgcaggagtcaggacctggcctggtggcgccctcacagagcctgtccgtcacatgcactgtctcaggggtctcattacccgactatggtgtaagctggattcgccagcctccacgaaagggtctggagtggctgggagtaatatggggtagtgaaaccacatactataattcagctctcaaatccagactgaccatcatcaaggacaactccaagagccaagttttcttaaaaatgaacagtctgcaaactgatgacacagccatttactactgtgccaaacattattactacggtggtagctatgctatggactactggggccaaggaacctcagtcaccgtctcctcaacgcgtgaggacctgaagaacgtgttcccacctgaggtggccgtgttcgagcctagcgaggccgagatcagccacacccagaaagccaccctcgtgtgcctggctaccggcttctaccccgaccatgtggaactgtcttggtgggtcaacggcaaagaggtgcacagcggcgtgtgtaccgacccccagccactgaaagaacagcccgccctgaacgacagccggtactgcctgagcagcagactgagagtgtccgccaccttctggcagaacccccggaaccacttcagatgccaggtgcagttctacggcctgagcgagaacgacgagtggacccaggacagagccaagcccgtgacccagatcgtgtctgccgaagcctggggcagagccgatgatgtgattaagatccactggcaggaaaagaagtccaacaccatcctgggcagccaggaaggcaacaccatgaagaccaacgacacctacatgaagttcagctggctgaccgtgcccgagaagtccctggacaaagaacacagatgcatcgtgcggcacgaaaacaacaagaacggcgtggaccaggaaatcatcttcccacccatcaagaccgatgtgattacaatggaccccaaggacaactgctccaaggacgccaacgataccctgctgctccagctgaccaacaccagcgcctactacatgtacttgttgctgctgctgaagtccgtggtgtacttcgccatcatcacatgctgcctgctgatggctatggtcaagcggaaggacagccgggga

SEQ ID NO: 6499 - DNA, 2589 bp, synthetic construct
  source 1..2589: mol_type = other DNA
atggccttaccagtgaccgccttgctcctgccgctggccttgctgctccacgccgccaggccggaagtgcagctggttgaatctggcggaggactggttcagcctggcggatctctgagactgtcttgtgccgccagcggcttcagcttcagcgacttttggatgagctgggtccgacaggcccctggcaaaggacttgaatgggtcgccacaatcagccaggccggcagcgagaaggactacgtggactctgtgaagggcagattcaccatcagccgggacaacgccaagaagtccctgtacctccagatgaacagcctgagagccgaggacaccgccgtgtactattgtgcctctggcgtgtacagcttcgactacagaggccagggcaccctggtcacagtctcttctggtaccggcggaggcggatctggcggcggaggtagcggtggcggaggatctgaattcgagatcgtgatgacccagagccctgccaccctgtctctgagccctggcgaaagagccaccctgagctgtagagccagccaggacatcagcaagtacctgaactggtatcagcagaagcccggccaggcccccagactgctgatctaccacaccagcagactgcacagcggcatccccgccagattttctggctctggcagcggcaccgactacaccctgacaatcagcagcctccagcccgaggacttcgccgtgtacttctgtcagcaaggcaacaccctgccctacaccttcggccagggcaccaagctggaaatcaagctcgagatccagaaccctgatcctgccgtgtaccagctgcgggatagcaagagcagcgacaagagcgtgtgtctgttcaccgacttcgacagccagaccaacgtgtcccagagcaaggactccgacgtgtacatcaccgataagtgcgtgctggacatgcggagcatggacttcaagagcaactccgccgtggcctggtccaacaagtccgatttcgcctgcgccaacgccttcaacaacagcattatccccgaggacacattcttcccaagccccgagagcagcgactccaccgaccacgtgaagcccaaagagacagagaacaccaagcagcccagcaagagctgccacaagcccaaggccatcgtgcacaccgagaaagtgaacatgatgagcctgaccgtgctgggcctgcggatgctgttcgccaaaaccgtggccgtgaacttcctgctgaccgccaagctgttcttcctcctcaccgcccgcgccaagagaagcggatctggcgtgaagcagaccctgaatttcgacctgctgaagctggctggcgacgtggaatccaacccaggccctactagtatggactggatttggcgcatccttttccttgtcggcgctgctaccggcgcgcattccttcgaacaggtgcaactccaggaatctggccctggcctcgtgaagcccagcgagacactgagcctgacctgtaccgtgtccggcgtgtccctgcctgactatggcgtgtcctggatcagacagccccctggcaagggcctggaatggatcggagtgatttggggcagcgaaaccacctactacaacagctccctgaagtccagagtgaccatctccaaggacaactccaagaaccaggtgtccctgaagctgagcagcgtgacagccgccgacaccgccgtgtattactgcgccaagcactactactacggcggcagctacgctatggactactggggccagggaaccctcgtgaccgtgtctagtacgcgtgaggacctgaagaacgtgttcccacctgaggtggccgtgttcgagcctagcgaggccgagatcagccacacccagaaagccaccctcgtgtgcctggctaccggcttctaccccgaccatgtggaactgtcttggtgggtcaacggcaaagaggtgcacagcggcgtgtgtaccgacccccagccactgaaagaacagcccgccctgaacgacagccggtactgcctgagcagcagactgagagtgtccgccaccttctggcagaacccccggaaccacttcagatgccaggtgcagttctacggcctgagcgagaacgacgagtggacccaggacagagccaagcccgtgacccagatcgtgtctgccgaagcctggggcagagccgatgatgtgattaagatccactggcaggaaaagaagtccaacaccatcctgggcagccaggaaggcaacaccatgaagaccaacgacacctacatgaagttcagctggctgaccgtgcccgagaagtccctggacaaagaacacagatgcatcgtgcggcacgaaaacaacaagaacggcgtggaccaggaaatcatcttcccacccatcaagaccgatgtgattacaatggaccccaaggacaactgctccaaggacgccaacgataccctgctgctccagctgaccaacaccagcgcctactacatgtacttgttgctgctgctgaagtccgtggtgtacttcgccatcatcacatgctgcctgctgatggctatggtcaagcggaaggacagccgggga

SEQ ID NO: 6500 - DNA, 2592 bp, synthetic construct
  source 1..2592: mol_type = other DNA
atggccttaccagtgaccgccttgctcctgccgctggccttgctgctccacgccgccaggccggaagtgcagctggttgaatctggcggaggactggttcagcctggcggatctctgagactgtcttgtgccgccagcggcttcagcttcagcgacttttggatgagctgggtccgacaggcccctggcaaaggacttgaatgggtcgccacaatcagccaggccggcagcgagaaggactacgtggactctgtgaagggcagattcaccatcagccgggacaacgccaagaagtccctgtacctccagatgaacagcctgagagccgaggacaccgccgtgtactattgtgcctctggcgtgtacagcttcgactacagaggccagggcaccctggtcacagtctcttctggtaccggcggaggcggatctggcggcggaggtagcggtggcggaggatctgaattcgacgagatcgtgctgacacagagccccgccaccctgtcactgtctccaggcgaaagagccaccctgagctgtagcgccagcagcagcgtgtcctacatgcactggtatcagcagaagcccggccaggcccccagactgctgatctacgataccagcaagctggcctccggcatccccgccagattttctggcagcggctccggcaccgacttcaccctgacaatcagcagcctggaacccgaggacgtggccgtgtactactgttttcaaggcagcgtgtaccccttcaccttcggccagggcaccaagctggaaatcaagagactcgagatccagaaccctgatcctgccgtgtaccagctgcgggatagcaagagcagcgacaagagcgtgtgtctgttcaccgacttcgacagccagaccaacgtgtcccagagcaaggactccgacgtgtacatcaccgataagtgcgtgctggacatgcggagcatggacttcaagagcaactccgccgtggcctggtccaacaagtccgatttcgcctgcgccaacgccttcaacaacagcattatccccgaggacacattcttcccaagccccgagagcagcgactccaccgaccacgtgaagcccaaagagacagagaacaccaagcagcccagcaagagctgccacaagcccaaggccatcgtgcacaccgagaaagtgaacatgatgagcctgaccgtgctgggcctgcggatgctgttcgccaaaaccgtggccgtgaacttcctgctgaccgccaagctgttcttcctcctcaccgcccgcgccaagagaagcggatctggcgtgaagcagaccctgaatttcgacctgctgaagctggctggcgacgtggaatccaacccaggccctactagtatggactggatttggcgcatccttttccttgtcggcgctgctaccggcgcgcattccttcgaacaggtgcagctccaggaatctggccctggcctcgtgaagcctagccagaccctgagcctgacctgtaccgtgtctggcggcagcatcagcacaagcggcatgggcgtgggctggatcagacagcaccctggcaagggcctggaatggatcggccacatttggtgggacgacgacaagcggtacaaccccgccctgaagtccagagtgaccatcagcgtggacaccagcaagaaccagttcagcctgaagctgagcagcgtgacagccgccgataccgccgtgtattattgcgcccggatggaactgtggtcctactacttcgactactggggccagggaaccctcgtgaccgtgtctagtacgcgtgaggacctgaagaacgtgttcccacctgaggtggccgtgttcgagcctagcgaggccgagatcagccacacccagaaagccaccctcgtgtgcctggctaccggcttctaccccgaccatgtggaactgtcttggtgggtcaacggcaaagaggtgcacagcggcgtgtgtaccgacccccagccactgaaagaacagcccgccctgaacgacagccggtactgcctgagcagcagactgagagtgtccgccaccttctggcagaacccccggaaccacttcagatgccaggtgcagttctacggcctgagcgagaacgacgagtggacccaggacagagccaagcccgtgacccagatcgtgtctgccgaagcctggggcagagccgatgatgtgattaagatccactggcaggaaaagaagtccaacaccatcctgggcagccaggaaggcaacaccatgaagaccaacgacacctacatgaagttcagctggctgaccgtgcccgagaagtccctggacaaagaacacagatgcatcgtgcggcacgaaaacaacaagaacggcgtggaccaggaaatcatcttcccacccatcaagaccgatgtgattacaatggaccccaaggacaactgctccaaggacgccaacgataccctgctgctccagctgaccaacaccagcgcctactacatgtacttgttgctgctgctgaagtccgtggtgtacttcgccatcatcacatgctgcctgctgatggctatggtcaagcggaaggacagccgggga

SEQ ID NO: 6501 - DNA, 2586 bp, synthetic construct
  source 1..2586: mol_type = other DNA
atggccttaccagtgaccgccttgctcctgccgctggccttgctgctccacgccgccaggccggaagtgcagctggttgaatctggcggaggactggttcagcctggcggatctctgagactgtcttgtgccgccagcggcttcagcttcagcgacttttggatgagctgggtccgacaggcccctggcaaaggacttgaatgggtcgccacaatcagccaggccggcagcgagaaggactacgtggactctgtgaagggcagattcaccatcagccgggacaacgccaagaagtccctgtacctccagatgaacagcctgagagccgaggacaccgccgtgtactattgtgcctctggcgtgtacagcttcgactacagaggccagggcaccctggtcacagtctcttctggtaccggcggaggcggatctggcggcggaggtagcggtggcggaggatctgaattcgactacatccacgtgacacagagccctagcagcctgtccgtgtccatcggcgatagagtgaccatcaactgccagacctctcaaggcgtgggcagcgacctgcactggtatcagcacaaacctggcagagcccctaagctgctgatccaccatgccagctctgtggaagatggcgtgcccagcagattttccggcaccggatttcacaccagcttcaacctgacaatcaacgacctccaggccgacgacatcggcacctactactgtcaagtgctccagagcttcggcagaggcagcagactggatacaaaactcgagatccagaaccctgatcctgccgtgtaccagctgcgggatagcaagagcagcgacaagagcgtgtgtctgttcaccgacttcgacagccagaccaacgtgtcccagagcaaggactccgacgtgtacatcaccgataagtgcgtgctggacatgcggagcatggacttcaagagcaactccgccgtggcctggtccaacaagtccgatttcgcctgcgccaacgccttcaacaacagcattatccccgaggacacattcttcccaagccccgagagcagcgactccaccgaccacgtgaagcccaaagagacagagaacaccaagcagcccagcaagagctgccacaagcccaaggccatcgtgcacaccgagaaagtgaacatgatgagcctgaccgtgctgggcctgcggatgctgttcgccaaaaccgtggccgtgaacttcctgctgaccgccaagctgttcttcctcctcaccgcccgcgccaagagaagcggatctggcgtgaagcagaccctgaatttcgacctgctgaagctggctggcgacgtggaatccaacccaggccctactagtatggactggatttggcgcatccttttccttgtcggcgctgctaccggcgcgcattccttcgaaagggcacacctggtgcagtctggcaccgccatgaagaaacctggcgcttccgtcagagtgtcctgtcagacaagcggctacaccttcacagcccacatcctgttctggttcagacaggccccaggcagaggactggaatgggtcggatggatcaagccccagtacggggccgtgaatttcggcggaggcttcagagacagagtgaccctgaccagggacgtgtaccgggaaatcgcctacatggacatccggggcctgaagcctgatgacaccgccgtgtactactgcgccagggatagaagctacggcgacagctcttgggctctcgatgcttggggacagggcacaacagtggtggtgtctgctacgcgtgaggacctgaagaacgtgttcccacctgaggtggccgtgttcgagcctagcgaggccgagatcagccacacccagaaagccaccctcgtgtgcctggctaccggcttctaccccgaccatgtggaactgtcttggtgggtcaacggcaaagaggtgcacagcggcgtgtgtaccgacccccagccactgaaagaacagcccgccctgaacgacagccggtactgcctgagcagcagactgagagtgtccgccaccttctggcagaacccccggaaccacttcagatgccaggtgcagttctacggcctgagcgagaacgacgagtggacccaggacagagccaagcccgtgacccagatcgtgtctgccgaagcctggggcagagccgatgatgtgattaagatccactggcaggaaaagaagtccaacaccatcctgggcagccaggaaggcaacaccatgaagaccaacgacacctacatgaagttcagctggctgaccgtgcccgagaagtccctggacaaagaacacagatgcatcgtgcggcacgaaaacaacaagaacggcgtggaccaggaaatcatcttcccacccatcaagaccgatgtgattacaatggaccccaaggacaactgctccaaggacgccaacgataccctgctgctccagctgaccaacaccagcgcctactacatgtacttgttgctgctgctgaagtccgtggtgtacttcgccatcatcacatgctgcctgctgatggctatggtcaagcggaaggacagccgggga

SEQ ID NO: 6502 - DNA, 2616 bp, synthetic construct
  source 1..2616: mol_type = other DNA
atggccttaccagtgaccgccttgctcctgccgctggccttgctgctccacgccgccaggccggaagtgcagctggttgaatctggcggaggactggttcagcctggcggatctctgagactgtcttgtgccgccagcggcttcagcttcagcgacttttggatgagctgggtccgacaggcccctggcaaaggacttgaatgggtcgccacaatcagccaggccggcagcgagaaggactacgtggactctgtgaagggcagattcaccatcagccgggacaacgccaagaagtccctgtacctccagatgaacagcctgagagccgaggacaccgccgtgtactattgtgcctctggcgtgtacagcttcgactacagaggccagggcaccctggtcacagtctcttctggtaccggcggaggcggatctggcggcggaggtagcggtggcggaggatctgaattcgacgtgcagatgatccagacccccgatagcctggccgtgtccctgggacagagagccaccatctcttgcagagccagcgagagcgtggacaactacggcatcagcttcatgcactggtatcagcagaagcccggccagagccccaagctgctgatctacagagcctccaacctggaaagcggcatccccgccagattttccggcagcggcagcagaaccgacttcaccctgaccatcaaccccgtggaaaccgacgacgtggcaacctactactgccagcagaacaacaaggacccccccacctttggcggaggcaccaagctggaaatcaagctcgagatccagaaccctgatcctgccgtgtaccagctgcgggatagcaagagcagcgacaagagcgtgtgtctgttcaccgacttcgacagccagaccaacgtgtcccagagcaaggactccgacgtgtacatcaccgataagtgcgtgctggacatgcggagcatggacttcaagagcaactccgccgtggcctggtccaacaagtccgatttcgcctgcgccaacgccttcaacaacagcattatccccgaggacacattcttcccaagccccgagagcagcgactccaccgaccacgtgaagcccaaagagacagagaacaccaagcagcccagcaagagctgccacaagcccaaggccatcgtgcacaccgagaaagtgaacatgatgagcctgaccgtgctgggcctgcggatgctgttcgccaaaaccgtggccgtgaacttcctgctgaccgccaagctgttcttcctcctcaccgcccgcgccaagagaagcggatctggcgtgaagcagaccctgaatttcgacctgctgaagctggctggcgacgtggaatccaacccaggccctactagtatggactggatttggcgcatccttttccttgtcggcgctgctaccggcgcgcattccttcgaagggggaggcggctctcaggtgcaactccagcagtctggcgctgagcttgtgaagcctggggccagcgtgaagattagctgcaaggccagcggctacgccttcagcagctactggatgaactgggtcaagcagcggcctggcaagggcctggaatggatcggccaaatctaccccggcgacggcgacaccacctacaacggcaagttcaagggcaaggccaccctgacagccgacaagagcagcagcaccgtgtacatgcaactgaacagcctgaccagcgaggacagcgccgtgtacttctgcgtgcggtactactacggcagctccggctacttcgactattggggccagggcaccacactgaccgtgtcctctacgcgtgaggacctgaagaacgtgttcccacctgaggtggccgtgttcgagcctagcgaggccgagatcagccacacccagaaagccaccctcgtgtgcctggctaccggcttctaccccgaccatgtggaactgtcttggtgggtcaacggcaaagaggtgcacagcggcgtgtgtaccgacccccagccactgaaagaacagcccgccctgaacgacagccggtactgcctgagcagcagactgagagtgtccgccaccttctggcagaacccccggaaccacttcagatgccaggtgcagttctacggcctgagcgagaacgacgagtggacccaggacagagccaagcccgtgacccagatcgtgtctgccgaagcctggggcagagccgatgatgtgattaagatccactggcaggaaaagaagtccaacaccatcctgggcagccaggaaggcaacaccatgaagaccaacgacacctacatgaagttcagctggctgaccgtgcccgagaagtccctggacaaagaacacagatgcatcgtgcggcacgaaaacaacaagaacggcgtggaccaggaaatcatcttcccacccatcaagaccgatgtgattacaatggaccccaaggacaactgctccaaggacgccaacgataccctgctgctccagctgaccaacaccagcgcctactacatgtacttgttgctgctgctgaagtccgtggtgtacttcgccatcatcacatgctgcctgctgatggctatggtcaagcggaaggacagccgggga

SEQ ID NO: 6503 - DNA, 2589 bp, synthetic construct
  source 1..2589: mol_type = other DNA
atggccttaccagtgaccgccttgctcctgccgctggccttgctgctccacgccgccaggccggaagtgcagctggttgaatctggcggaggactggttcagcctggcggatctctgagactgtcttgtgccgccagcggcttcagcttcagcgacttttggatgagctgggtccgacaggcccctggcaaaggacttgaatgggtcgccacaatcagccaggccggcagcgagaaggactacgtggactctgtgaagggcagattcaccatcagccgggacaacgccaagaagtccctgtacctccagatgaacagcctgagagccgaggacaccgccgtgtactattgtgcctctggcgtgtacagcttcgactacagaggccagggcaccctggtcacagtctcttctggtaccggcggaggcggatctggcggcggaggtagcggtggcggaggatctgaattcgacgtgcagatgatccagacccccagcagcctgtctgccagcctgggcgatagagtgaccatcagctgtcgggccagccaggacatcggcaactacctgaactggtatcagcagaaacccgacggcaccgtgaagctgctgatctactacaccagcagactgcacagcggcgtgcccagcagattttctggcagcggctctggcaccgagtacagcctgaccatctccaacctggaacaggaagatattgctacctacttctgtcagcaaggcagcgccctgccccctacatttggcggcggaacaaagctggaaatcaacctcgagatccagaaccctgatcctgccgtgtaccagctgcgggatagcaagagcagcgacaagagcgtgtgtctgttcaccgacttcgacagccagaccaacgtgtcccagagcaaggactccgacgtgtacatcaccgataagtgcgtgctggacatgcggagcatggacttcaagagcaactccgccgtggcctggtccaacaagtccgatttcgcctgcgccaacgccttcaacaacagcattatccccgaggacacattcttcccaagccccgagagcagcgactccaccgaccacgtgaagcccaaagagacagagaacaccaagcagcccagcaagagctgccacaagcccaaggccatcgtgcacaccgagaaagtgaacatgatgagcctgaccgtgctgggcctgcggatgctgttcgccaaaaccgtggccgtgaacttcctgctgaccgccaagctgttcttcctcctcaccgcccgcgccaagagaagcggatctggcgtgaagcagaccctgaatttcgacctgctgaagctggctggcgacgtggaatccaacccaggccctactagtatggactggatttggcgcatccttttccttgtcggcgctgctaccggcgcgcattccttcgaagctctccagctccagcagtctggcgcagaactcgtgcggcctggcgcttctgtgaccctgagctgtaaagccagcggctacaccttcaccgactacgagatgcactgggtcaagcagacccctgtgcacggcctggaatggatcggagccatcgaccctgagacaggcggcaccgcctacaaccagaagttcgagggcaaggccatcctgaccgccgacaagagcagcagcacagcctacatggaactgcggagcctgacctccgaggacagccccgtgtactactgtgccagacggcggtactacggcagcagctccttcgactattggggccagggcaccaccctgaccgtgtctagtacgcgtgaggacctgaagaacgtgttcccacctgaggtggccgtgttcgagcctagcgaggccgagatcagccacacccagaaagccaccctcgtgtgcctggctaccggcttctaccccgaccatgtggaactgtcttggtgggtcaacggcaaagaggtgcacagcggcgtgtgtaccgacccccagccactgaaagaacagcccgccctgaacgacagccggtactgcctgagcagcagactgagagtgtccgccaccttctggcagaacccccggaaccacttcagatgccaggtgcagttctacggcctgagcgagaacgacgagtggacccaggacagagccaagcccgtgacccagatcgtgtctgccgaagcctggggcagagccgatgatgtgattaagatccactggcaggaaaagaagtccaacaccatcctgggcagccaggaaggcaacaccatgaagaccaacgacacctacatgaagttcagctggctgaccgtgcccgagaagtccctggacaaagaacacagatgcatcgtgcggcacgaaaacaacaagaacggcgtggaccaggaaatcatcttcccacccatcaagaccgatgtgattacaatggaccccaaggacaactgctccaaggacgccaacgataccctgctgctccagctgaccaacaccagcgcctactacatgtacttgttgctgctgctgaagtccgtggtgtacttcgccatcatcacatgctgcctgctgatggctatggtcaagcggaaggacagccgggga

SEQ ID NO: 6504 - DNA, 2601 bp, synthetic construct
  source 1..2601: mol_type = other DNA
atggccttaccagtgaccgccttgctcctgccgctggccttgctgctccacgccgccaggccggaagtgcagctggttgaatctggcggaggactggttcagcctggcggatctctgagactgtcttgtgccgccagcggcttcagcttcagcgacttttggatgagctgggtccgacaggcccctggcaaaggacttgaatgggtcgccacaatcagccaggccggcagcgagaaggactacgtggactctgtgaagggcagattcaccatcagccgggacaacgccaagaagtccctgtacctccagatgaacagcctgagagccgaggacaccgccgtgtactattgtgcctctggcgtgtacagcttcgactacagaggccagggcaccctggtcacagtctcttctggtaccggcggaggcggatctggcggcggaggtagcggtggcggaggatctgaattcgacatcgtcctgacccagtccccagccagcctggcggtgtccctgggtcaacgagctaccatttcctgcagagcctctaagtccgtatccacttccggctatagttacctgcattggtaccaacagaaaccagggcagccacccaagctgctcatctatctggcctcaaacctggagtccggcgtgcccgccagattctccggaagtgggagcggcaccgactttacattgaacatccacccagtcgaagaggaagatgctgccacttattactgtcagcactccagggagctgccatttacatttggctctggcacaaaactggagatcaaactcgagatccagaaccctgatcctgccgtgtaccagctgcgggatagcaagagcagcgacaagagcgtgtgtctgttcaccgacttcgacagccagaccaacgtgtcccagagcaaggactccgacgtgtacatcaccgataagtgcgtgctggacatgcggagcatggacttcaagagcaactccgccgtggcctggtccaacaagtccgatttcgcctgcgccaacgccttcaacaacagcattatccccgaggacacattcttcccaagccccgagagcagcgactccaccgaccacgtgaagcccaaagagacagagaacaccaagcagcccagcaagagctgccacaagcccaaggccatcgtgcacaccgagaaagtgaacatgatgagcctgaccgtgctgggcctgcggatgctgttcgccaaaaccgtggccgtgaacttcctgctgaccgccaagctgttcttcctcctcaccgcccgcgccaagagaagcggatctggcgtgaagcagaccctgaatttcgacctgctgaagctggctggcgacgtggaatccaacccaggccctactagtatggactggatttggcgcatccttttccttgtcggcgctgctaccggcgcgcattccttcgaacaggttcagctggtcgagtccgggggaggtctggtacagccgggtggcagcctcaagctgtcatgtgccgcatctggttttgactttagcaggtattggatgagctgggtccgccaggccccgggcaagggacttgagtggattggagaaataaaccctacttccagcacaatcaacttcacaccttctttgaaagataaggtttttatctctcgggataacgctaaaaacacactgtacttgcagatgtctaaggtgcgaagcgaagacaccgccctctattattgcgcccggggtaattactaccgctatggggatgcgatggactattgggggcaaggtacctccgtcacggtctcaacgcgtgaggacctgaagaacgtgttcccacctgaggtggccgtgttcgagcctagcgaggccgagatcagccacacccagaaagccaccctcgtgtgcctggctaccggcttctaccccgaccatgtggaactgtcttggtgggtcaacggcaaagaggtgcacagcggcgtgtgtaccgacccccagccactgaaagaacagcccgccctgaacgacagccggtactgcctgagcagcagactgagagtgtccgccaccttctggcagaacccccggaaccacttcagatgccaggtgcagttctacggcctgagcgagaacgacgagtggacccaggacagagccaagcccgtgacccagatcgtgtctgccgaagcctggggcagagccgatgatgtgattaagatccactggcaggaaaagaagtccaacaccatcctgggcagccaggaaggcaacaccatgaagaccaacgacacctacatgaagttcagctggctgaccgtgcccgagaagtccctggacaaagaacacagatgcatcgtgcggcacgaaaacaacaagaacggcgtggaccaggaaatcatcttcccacccatcaagaccgatgtgattacaatggaccccaaggacaactgctccaaggacgccaacgataccctgctgctccagctgaccaacaccagcgcctactacatgtacttgttgctgctgctgaagtccgtggtgtacttcgccatcatcacatgctgcctgctgatggctatggtcaagcggaaggacagccgggga

SEQ ID NO: 6505 - DNA, 2595 bp, synthetic construct
  source 1..2595: mol_type = other DNA
atggccttaccagtgaccgccttgctcctgccgctggccttgctgctccacgccgccaggccggaagtgcagctggttgaatctggcggaggactggttcagcctggcggatctctgagactgtcttgtgccgccagcggcttcagcttcagcgacttttggatgagctgggtccgacaggcccctggcaaaggacttgaatgggtcgccacaatcagccaggccggcagcgagaaggactacgtggactctgtgaagggcagattcaccatcagccgggacaacgccaagaagtccctgtacctccagatgaacagcctgagagccgaggacaccgccgtgtactattgtgcctctggcgtgtacagcttcgactacagaggccagggcaccctggtcacagtctcttctggtaccggcggaggcggatctggcggcggaggtagcggtggcggaggatctgaattcgacatccagatgacccagagccctagctcactgagcgccagcgtgggcgacagggtgaccattacctgctccgccagccaggacatcagcaactacctgaactggtaccagcagaagcccggcaaggcccccaagctgctgatctactacacctccaacctgcactccggcgtgcccagcaggttcagcggaagcggcagcggcaccgatttcaccctgaccatctccagcctgcagcccgaggacttcgccacctactactgccagcagtacaggaagctcccctggactttcggccagggcaccaaactggagatcaagcgtctcgagatccagaaccctgatcctgccgtgtaccagctgcgggatagcaagagcagcgacaagagcgtgtgtctgttcaccgacttcgacagccagaccaacgtgtcccagagcaaggactccgacgtgtacatcaccgataagtgcgtgctggacatgcggagcatggacttcaagagcaactccgccgtggcctggtccaacaagtccgatttcgcctgcgccaacgccttcaacaacagcattatccccgaggacacattcttcccaagccccgagagcagcgactccaccgaccacgtgaagcccaaagagacagagaacaccaagcagcccagcaagagctgccacaagcccaaggccatcgtgcacaccgagaaagtgaacatgatgagcctgaccgtgctgggcctgcggatgctgttcgccaaaaccgtggccgtgaacttcctgctgaccgccaagctgttcttcctcctcaccgcccgcgccaagagaagcggatctggcgtgaagcagaccctgaatttcgacctgctgaagctggctggcgacgtggaatccaacccaggccctactagtatggactggatttggcgcatccttttccttgtcggcgctgctaccggcgcgcattccttcgaacaggtgcagctggtccagagcggcgccgaagtgaagaagcccggcagctccgtgaaagtgagctgcaaggccagcggcggcaccttcagcaactactggatgcactgggtgaggcaggcccccggacagggcctggagtggatgggcgccacctacaggggccacagcgacacctactacaaccagaagttcaagggccgggtgaccatcaccgccgacaagagcaccagcaccgcctacatggaactgagcagcctcaggagcgaggacaccgctgtgtattactgcgccaggggcgccatctacgacggctacgacgtgctggacaactggggccagggcacactggtgaccgtgtccagcacgcgtgaggacctgaagaacgtgttcccacctgaggtggccgtgttcgagcctagcgaggccgagatcagccacacccagaaagccaccctcgtgtgcctggctaccggcttctaccccgaccatgtggaactgtcttggtgggtcaacggcaaagaggtgcacagcggcgtgtgtaccgacccccagccactgaaagaacagcccgccctgaacgacagccggtactgcctgagcagcagactgagagtgtccgccaccttctggcagaacccccggaaccacttcagatgccaggtgcagttctacggcctgagcgagaacgacgagtggacccaggacagagccaagcccgtgacccagatcgtgtctgccgaagcctggggcagagccgatgatgtgattaagatccactggcaggaaaagaagtccaacaccatcctgggcagccaggaaggcaacaccatgaagaccaacgacacctacatgaagttcagctggctgaccgtgcccgagaagtccctggacaaagaacacagatgcatcgtgcggcacgaaaacaacaagaacggcgtggaccaggaaatcatcttcccacccatcaagaccgatgtgattacaatggaccccaaggacaactgctccaaggacgccaacgataccctgctgctccagctgaccaacaccagcgcctactacatgtacttgttgctgctgctgaagtccgtggtgtacttcgccatcatcacatgctgcctgctgatggctatggtcaagcggaaggacagccgggga

SEQ ID NO: 6506 - DNA, 2595 bp, synthetic construct
  source 1..2595: mol_type = other DNA
atggccttaccagtgaccgccttgctcctgccgctggccttgctgctccacgccgccaggccggaagtgcagctggttgaatctggcggaggactggttcagcctggcggatctctgagactgtcttgtgccgccagcggcttcagcttcagcgacttttggatgagctgggtccgacaggcccctggcaaaggacttgaatgggtcgccacaatcagccaggccggcagcgagaaggactacgtggactctgtgaagggcagattcaccatcagccgggacaacgccaagaagtccctgtacctccagatgaacagcctgagagccgaggacaccgccgtgtactattgtgcctctggcgtgtacagcttcgactacagaggccagggcaccctggtcacagtctcttctggtaccggcggaggcggatctggcggcggaggtagcggtggcggaggatctgaattcgacatcgtgctgacacagagccctgccaccctgtctctgagccctggcgatagagccaccatcagctgtagagccagcgagagcgtgaccatcctgggcagccacctgatctactggtatcagcagaagcccggccagccccccagactgctgattcagctggcctccaatgtgcagaccggcgtgccagccagattttccggcagcggcagcagaaccgacttcaccctgaccatcagcagcgtggaacccgaggacttcgccgtgtactactgcctccagagccggaccatccccagaacattcggccagggcaccaagctggaaatcaagagactcgagatccagaaccctgatcctgccgtgtaccagctgcgggatagcaagagcagcgacaagagcgtgtgtctgttcaccgacttcgacagccagaccaacgtgtcccagagcaaggactccgacgtgtacatcaccgataagtgcgtgctggacatgcggagcatggacttcaagagcaactccgccgtggcctggtccaacaagtccgatttcgcctgcgccaacgccttcaacaacagcattatccccgaggacacattcttcccaagccccgagagcagcgactccaccgaccacgtgaagcccaaagagacagagaacaccaagcagcccagcaagagctgccacaagcccaaggccatcgtgcacaccgagaaagtgaacatgatgagcctgaccgtgctgggcctgcggatgctgttcgccaaaaccgtggccgtgaacttcctgctgaccgccaagctgttcttcctcctcaccgcccgcgccaagagaagcggatctggcgtgaagcagaccctgaatttcgacctgctgaagctggctggcgacgtggaatccaacccaggccctactagtatggactggatttggcgcatccttttccttgtcggcgctgctaccggcgcgcattccttcgaacaggtgcagctggtgcagtctggccccgaagtgaagaaacccggcgagtccgtgaagatcagctgcaaggccagcggctacaccttccggcactacagcatgaactgggtcaagcaggccccaggccagggcctgaagtggatgggcagaatcaacaccgagagcggcgtgcccatctacgccgacgacttcaagggccggttcagcttcaccgtggacaccagcgccagcaccgcctacctggaaatctccagcctgaccagcgaggataccgccgtgtatttctgctccaacgactacctgtacagcctggatttctggggccagggaaccaccctgacagtgtcctctacgcgtgaggacctgaagaacgtgttcccacctgaggtggccgtgttcgagcctagcgaggccgagatcagccacacccagaaagccaccctcgtgtgcctggctaccggcttctaccccgaccatgtggaactgtcttggtgggtcaacggcaaagaggtgcacagcggcgtgtgtaccgacccccagccactgaaagaacagcccgccctgaacgacagccggtactgcctgagcagcagactgagagtgtccgccaccttctggcagaacccccggaaccacttcagatgccaggtgcagttctacggcctgagcgagaacgacgagtggacccaggacagagccaagcccgtgacccagatcgtgtctgccgaagcctggggcagagccgatgatgtgattaagatccactggcaggaaaagaagtccaacaccatcctgggcagccaggaaggcaacaccatgaagaccaacgacacctacatgaagttcagctggctgaccgtgcccgagaagtccctggacaaagaacacagatgcatcgtgcggcacgaaaacaacaagaacggcgtggaccaggaaatcatcttcccacccatcaagaccgatgtgattacaatggaccccaaggacaactgctccaaggacgccaacgataccctgctgctccagctgaccaacaccagcgcctactacatgtacttgttgctgctgctgaagtccgtggtgtacttcgccatcatcacatgctgcctgctgatggctatggtcaagcggaaggacagccgggga

SEQ ID NO: 6507 - DNA, 2598 bp, synthetic construct
  source 1..2598: mol_type = other DNA
atggccttaccagtgaccgccttgctcctgccgctggccttgctgctccacgccgccaggccggaagtgcagctggttgaatctggcggaggactggttcagcctggcggatctctgagactgtcttgtgccgccagcggcttcagcttcagcgacttttggatgagctgggtccgacaggcccctggcaaaggacttgaatgggtcgccacaatcagccaggccggcagcgagaaggactacgtggactctgtgaagggcagattcaccatcagccgggacaacgccaagaagtccctgtacctccagatgaacagcctgagagccgaggacaccgccgtgtactattgtgcctctggcgtgtacagcttcgactacagaggccagggcaccctggtcacagtctcttctggtaccggcggaggcggatctggcggcggaggtagcggtggcggaggatctgaattccagtctgtgctgacacagcctcctagtgtgtctggcgctcctggacagagagtgaccatcagctgtacaggcagcagcagcaatatcggagccggctttgacgtgcactggtatcagcagctgcctggcacagcccctaaactgctgatctacggcaacagcaacagacccagcggcgtgcccgatagattttccggctctaagagcggcacaagcgccagcctggctattactggactccaggccgaggacgaggccgactactactgtcagagctacgacagcagcctgagcggctacgttttcggcaccggcaccaaagtgacagtgcttggtctcgagatccagaaccctgatcctgccgtgtaccagctgcgggatagcaagagcagcgacaagagcgtgtgtctgttcaccgacttcgacagccagaccaacgtgtcccagagcaaggactccgacgtgtacatcaccgataagtgcgtgctggacatgcggagcatggacttcaagagcaactccgccgtggcctggtccaacaagtccgatttcgcctgcgccaacgccttcaacaacagcattatccccgaggacacattcttcccaagccccgagagcagcgactccaccgaccacgtgaagcccaaagagacagagaacaccaagcagcccagcaagagctgccacaagcccaaggccatcgtgcacaccgagaaagtgaacatgatgagcctgaccgtgctgggcctgcggatgctgttcgccaaaaccgtggccgtgaacttcctgctgaccgccaagctgttcttcctcctcaccgcccgcgccaagagaagcggatctggcgtgaagcagaccctgaatttcgacctgctgaagctggctggcgacgtggaatccaacccaggccctactagtatggactggatttggcgcatccttttccttgtcggcgctgctaccggcgcgcattccttcgaacaagttcagctggttcagagcggagccgaagtgaagaaacctggggcctctgtgaaggtgtcctgcaaggcttccggctacacctttaccgattactacatgcactgggtccgacaggctcccggccaaagacttgaatggatgggctggatcaaccccaacagcggcggcacaaattacgcccagaagttccaggaccggatcaccgtgaccagagacaccagctccaacaccggctacatggaactgacccggctgagatccgatgacaccgccgtgtactactgcgctagaagcccttactccggcgtgctggataagtggggacagggcacactggtcaccgtgtcatctacgcgtgaggacctgaagaacgtgttcccacctgaggtggccgtgttcgagcctagcgaggccgagatcagccacacccagaaagccaccctcgtgtgcctggctaccggcttctaccccgaccatgtggaactgtcttggtgggtcaacggcaaagaggtgcacagcggcgtgtgtaccgacccccagccactgaaagaacagcccgccctgaacgacagccggtactgcctgagcagcagactgagagtgtccgccaccttctggcagaacccccggaaccacttcagatgccaggtgcagttctacggcctgagcgagaacgacgagtggacccaggacagagccaagcccgtgacccagatcgtgtctgccgaagcctggggcagagccgatgatgtgattaagatccactggcaggaaaagaagtccaacaccatcctgggcagccaggaaggcaacaccatgaagaccaacgacacctacatgaagttcagctggctgaccgtgcccgagaagtccctggacaaagaacacagatgcatcgtgcggcacgaaaacaacaagaacggcgtggaccaggaaatcatcttcccacccatcaagaccgatgtgattacaatggaccccaaggacaactgctccaaggacgccaacgataccctgctgctccagctgaccaacaccagcgcctactacatgtacttgttgctgctgctgaagtccgtggtgtacttcgccatcatcacatgctgcctgctgatggctatggtcaagcggaaggacagccgggga

SEQ ID NO: 6508 - DNA, 2589 bp, synthetic construct
  source 1..2589: mol_type = other DNA
atggccttaccagtgaccgccttgctcctgccgctggccttgctgctccacgccgccaggccggaagtgcagctggttgaatctggcggaggactggttcagcctggcggatctctgagactgtcttgtgccgccagcggcttcagcttcagcgacttttggatgagctgggtccgacaggcccctggcaaaggacttgaatgggtcgccacaatcagccaggccggcagcgagaaggactacgtggactctgtgaagggcagattcaccatcagccgggacaacgccaagaagtccctgtacctccagatgaacagcctgagagccgaggacaccgccgtgtactattgtgcctctggcgtgtacagcttcgactacagaggccagggcaccctggtcacagtctcttctggtaccggcggaggcggatctggcggcggaggtagcggtggcggaggatctgaattccaggctgttctgacacagcctccatctgcctctggcacacctggacagagagtgaccatctcctgtagcggcagcagcagcaacatcggcagctacaccgtgtcctggtatcagcagctccctggaacagcccctaagttcctgatctacagcaacaaccagcggcctagcggcgtgcccgatagattttctggcagcaagagcggcacaagcgccagcctggctatttctggactccagtctgaggacgaggccgactactattgtgccgcctgggacgatagcctgaacggctatgtgtttggcaccggcaccaaagtgacagtgcttggtctcgagatccagaaccctgatcctgccgtgtaccagctgcgggatagcaagagcagcgacaagagcgtgtgtctgttcaccgacttcgacagccagaccaacgtgtcccagagcaaggactccgacgtgtacatcaccgataagtgcgtgctggacatgcggagcatggacttcaagagcaactccgccgtggcctggtccaacaagtccgatttcgcctgcgccaacgccttcaacaacagcattatccccgaggacacattcttcccaagccccgagagcagcgactccaccgaccacgtgaagcccaaagagacagagaacaccaagcagcccagcaagagctgccacaagcccaaggccatcgtgcacaccgagaaagtgaacatgatgagcctgaccgtgctgggcctgcggatgctgttcgccaaaaccgtggccgtgaacttcctgctgaccgccaagctgttcttcctcctcaccgcccgcgccaagagaagcggatctggcgtgaagcagaccctgaatttcgacctgctgaagctggctggcgacgtggaatccaacccaggccctactagtatggactggatttggcgcatccttttccttgtcggcgctgctaccggcgcgcattccttcgaagttcaactggttcagagcggagccgaagtgaagaagcctggcgagagcctgaagattagctgcaaaggcagcggctacgacttcaccacctactggatcggctgggtccgacagatgcctggcaaaggactggaatggatgggcatcatctaccccggcgacagcgacaccagatacagccctagcgttagaggccgcgtgaccatcagcgccgacaagtctatcaacaccgcctacctccagtggtccagcctggaagcctctgacaccgccatgtactactgcgccagaatgtggaccttcagccaggatggatggggccagggaacactggtcacagtgtcatctacgcgtgaggacctgaagaacgtgttcccacctgaggtggccgtgttcgagcctagcgaggccgagatcagccacacccagaaagccaccctcgtgtgcctggctaccggcttctaccccgaccatgtggaactgtcttggtgggtcaacggcaaagaggtgcacagcggcgtgtgtaccgacccccagccactgaaagaacagcccgccctgaacgacagccggtactgcctgagcagcagactgagagtgtccgccaccttctggcagaacccccggaaccacttcagatgccaggtgcagttctacggcctgagcgagaacgacgagtggacccaggacagagccaagcccgtgacccagatcgtgtctgccgaagcctggggcagagccgatgatgtgattaagatccactggcaggaaaagaagtccaacaccatcctgggcagccaggaaggcaacaccatgaagaccaacgacacctacatgaagttcagctggctgaccgtgcccgagaagtccctggacaaagaacacagatgcatcgtgcggcacgaaaacaacaagaacggcgtggaccaggaaatcatcttcccacccatcaagaccgatgtgattacaatggaccccaaggacaactgctccaaggacgccaacgataccctgctgctccagctgaccaacaccagcgcctactacatgtacttgttgctgctgctgaagtccgtggtgtacttcgccatcatcacatgctgcctgctgatggctatggtcaagcggaaggacagccgggga

SEQ ID NO: 6509 - DNA, 2598 bp, synthetic construct
  source 1..2598: mol_type = other DNA
atggccttaccagtgaccgccttgctcctgccgctggccttgctgctccacgccgccaggccggaagtgcagctggttgaatctggcggaggactggttcagcctggcggatctctgagactgtcttgtgccgccagcggcttcagcttcagcgacttttggatgagctgggtccgacaggcccctggcaaaggacttgaatgggtcgccacaatcagccaggccggcagcgagaaggactacgtggactctgtgaagggcagattcaccatcagccgggacaacgccaagaagtccctgtacctccagatgaacagcctgagagccgaggacaccgccgtgtactattgtgcctctggcgtgtacagcttcgactacagaggccagggcaccctggtcacagtctcttctggtaccggcggaggcggatctggcggcggaggtagcggtggcggaggatctgaattcgacatcgtgatgacccagagccccgatagcctggccgtgtctctgggagagagagccaccatcaactgcaagagcagccagagcatcctgtacagcagcaaccagaagaactacctggcctggtatcagcagaagcccggccagagccctaagctgctgatctactgggccagcaccagagaaagcggcgtgcccgatagattcagcggcagcggctctggcaccgacttcaccctgaccatcagttctcttcaggccgaggacgtggccgtgtactactgccaccagtacatcagctcctacaccttcggccagggcaccaagctggaaatcaagctcgagatccagaaccctgatcctgccgtgtaccagctgcgggatagcaagagcagcgacaagagcgtgtgtctgttcaccgacttcgacagccagaccaacgtgtcccagagcaaggactccgacgtgtacatcaccgataagtgcgtgctggacatgcggagcatggacttcaagagcaactccgccgtggcctggtccaacaagtccgatttcgcctgcgccaacgccttcaacaacagcattatccccgaggacacattcttcccaagccccgagagcagcgactccaccgaccacgtgaagcccaaagagacagagaacaccaagcagcccagcaagagctgccacaagcccaaggccatcgtgcacaccgagaaagtgaacatgatgagcctgaccgtgctgggcctgcggatgctgttcgccaaaaccgtggccgtgaacttcctgctgaccgccaagctgttcttcctcctcaccgcccgcgccaagagaagcggatctggcgtgaagcagaccctgaatttcgacctgctgaagctggctggcgacgtggaatccaacccaggccctactagtatggactggatttggcgcatccttttccttgtcggcgctgctaccggcgcgcattccttcgaacaggtgcagctggtgcagtctggcgctgaagtgaagaaacctggggccagcgtgaaggtgtcctgcaaggccagcggctacacctttgccagccagtggatgcactggatgagacaggcccctggacagggcctggaatggatcggctggatcaaccccggcaacgtgaacaccaagtacaacgagaagttcaagggcagagccaccctgacagtggacaccagcaccaacaccgcctacatggaactgagcagcctgcggagcgaggacaccgccgtgtattattgcgccagaagcacctggtacagacccctggattattggggccagggaacccttgtgaccgtgtcctctacgcgtgaggacctgaagaacgtgttcccacctgaggtggccgtgttcgagcctagcgaggccgagatcagccacacccagaaagccaccctcgtgtgcctggctaccggcttctaccccgaccatgtggaactgtcttggtgggtcaacggcaaagaggtgcacagcggcgtgtgtaccgacccccagccactgaaagaacagcccgccctgaacgacagccggtactgcctgagcagcagactgagagtgtccgccaccttctggcagaacccccggaaccacttcagatgccaggtgcagttctacggcctgagcgagaacgacgagtggacccaggacagagccaagcccgtgacccagatcgtgtctgccgaagcctggggcagagccgatgatgtgattaagatccactggcaggaaaagaagtccaacaccatcctgggcagccaggaaggcaacaccatgaagaccaacgacacctacatgaagttcagctggctgaccgtgcccgagaagtccctggacaaagaacacagatgcatcgtgcggcacgaaaacaacaagaacggcgtggaccaggaaatcatcttcccacccatcaagaccgatgtgattacaatggaccccaaggacaactgctccaaggacgccaacgataccctgctgctccagctgaccaacaccagcgcctactacatgtacttgttgctgctgctgaagtccgtggtgtacttcgccatcatcacatgctgcctgctgatggctatggtcaagcggaaggacagccgggga

SEQ ID NO: 6510 - DNA, 2598 bp, synthetic construct
  source 1..2598: mol_type = other DNA
atggccttaccagtgaccgccttgctcctgccgctggccttgctgctccacgccgccaggccggaagtgcagctggttgaatctggcggaggactggttcagcctggcggatctctgagactgtcttgtgccgccagcggcttcagcttcagcgacttttggatgagctgggtccgacaggcccctggcaaaggacttgaatgggtcgccacaatcagccaggccggcagcgagaaggactacgtggactctgtgaagggcagattcaccatcagccgggacaacgccaagaagtccctgtacctccagatgaacagcctgagagccgaggacaccgccgtgtactattgtgcctctggcgtgtacagcttcgactacagaggccagggcaccctggtcacagtctcttctggtaccggcggaggcggatctggcggcggaggtagcggtggcggaggatctgaattcgaccacatcgtgctgacccagagccctagcagcctgtctgccagcctgggcgacagagtgaccatcagctgtagagccagccaggacatcagcacctacctgaactggtatcagcagaaacccgacggcaccgtgaagctgctgatcttctacaccagcagactgcacgccggggtgcccagcagattttctggcagcggctctggcacccaccacagcctgaccatctccaacctggaacaggaagatattgctacctacttctgtcagcaaggcaacagcctgcccttcaccttcggcagcggcaccaagctggaaatcaagagactcgagatccagaaccctgatcctgccgtgtaccagctgcgggatagcaagagcagcgacaagagcgtgtgtctgttcaccgacttcgacagccagaccaacgtgtcccagagcaaggactccgacgtgtacatcaccgataagtgcgtgctggacatgcggagcatggacttcaagagcaactccgccgtggcctggtccaacaagtccgatttcgcctgcgccaacgccttcaacaacagcattatccccgaggacacattcttcccaagccccgagagcagcgactccaccgaccacgtgaagcccaaagagacagagaacaccaagcagcccagcaagagctgccacaagcccaaggccatcgtgcacaccgagaaagtgaacatgatgagcctgaccgtgctgggcctgcggatgctgttcgccaaaaccgtggccgtgaacttcctgctgaccgccaagctgttcttcctcctcaccgcccgcgccaagagaagcggatctggcgtgaagcagaccctgaatttcgacctgctgaagctggctggcgacgtggaatccaacccaggccctactagtatggactggatttggcgcatccttttccttgtcggcgctgctaccggcgcgcattccttcgaacaggtgcagctgaaagagagcggccctgagctggaaaagcctggggccagcgtgaagattagctgcaaggccagcggctacagcttcaccgcctacagcatgaactgggtcaagcagaacaacggcatgagcctggaatggatcggcagcatcgacccctactacggcgacaccaaatacgcccagaagttcaagggcaaggccaccctgaccgtggataaggccagcagcaccgcctacctccagctgaagtctctgaccagcgaggacagcgccgtgtactactgcgccagacggatgattaccaccggcgactggtacttcgacgtgtggggagccggaaccaccgtgacagtgtctagcacgcgtgaggacctgaagaacgtgttcccacctgaggtggccgtgttcgagcctagcgaggccgagatcagccacacccagaaagccaccctcgtgtgcctggctaccggcttctaccccgaccatgtggaactgtcttggtgggtcaacggcaaagaggtgcacagcggcgtgtgtaccgacccccagccactgaaagaacagcccgccctgaacgacagccggtactgcctgagcagcagactgagagtgtccgccaccttctggcagaacccccggaaccacttcagatgccaggtgcagttctacggcctgagcgagaacgacgagtggacccaggacagagccaagcccgtgacccagatcgtgtctgccgaagcctggggcagagccgatgatgtgattaagatccactggcaggaaaagaagtccaacaccatcctgggcagccaggaaggcaacaccatgaagaccaacgacacctacatgaagttcagctggctgaccgtgcccgagaagtccctggacaaagaacacagatgcatcgtgcggcacgaaaacaacaagaacggcgtggaccaggaaatcatcttcccacccatcaagaccgatgtgattacaatggaccccaaggacaactgctccaaggacgccaacgataccctgctgctccagctgaccaacaccagcgcctactacatgtacttgttgctgctgctgaagtccgtggtgtacttcgccatcatcacatgctgcctgctgatggctatggtcaagcggaaggacagccgggga

SEQ ID NO: 6511 - DNA, 2598 bp, synthetic construct; identical to SEQ ID NO: 6510
  source 1..2598: mol_type = other DNA

SEQ ID NO: 6512 - DNA, 2598 bp, synthetic construct
  source 1..2598: mol_type = other DNA
atggccttaccagtgaccgccttgctcctgccgctggccttgctgctccacgccgccaggccggaagtgcagctggttgaatctggcggaggactggttcagcctggcggatctctgagactgtcttgtgccgccagcggcttcagcttcagcgacttttggatgagctgggtccgacaggcccctggcaaaggacttgaatgggtcgccacaatcagccaggccggcagcgagaaggactacgtggactctgtgaagggcagattcaccatcagccgggacaacgccaagaagtccctgtacctccagatgaacagcctgagagccgaggacaccgccgtgtactattgtgcctctggcgtgtacagcttcgactacagaggccagggcaccctggtcacagtctcttctggtaccggcggaggcggatctggcggcggaggtagcggtggcggaggatctgaattcgacgagatcgtgctgacacagagccctgccaccctgtctctgagccctggcgaaagagccaccctgagctgtagagccagccagagcgtgtccagctacctggcctggtatcagcagaagcccggccaggctccccggctgctgatctacgatgccagcaatagagccaccggcatccccgccagattttccggctctggcagcggcaccgacttcaccctgaccatcagctccctggaacccgaggacttcgccgtgtactactgccagcagcggagcaactggcccatcacattcggccagggcacccggctggaaatcaaactcgagatccagaaccctgatcctgccgtgtaccagctgcgggatagcaagagcagcgacaagagcgtgtgtctgttcaccgacttcgacagccagaccaacgtgtcccagagcaaggactccgacgtgtacatcaccgataagtgcgtgctggacatgcggagcatggacttcaagagcaactccgccgtggcctggtccaacaagtccgatttcgcctgcgccaacgccttcaacaacagcattatccccgaggacacattcttcccaagccccgagagcagcgactccaccgaccacgtgaagcccaaagagacagagaacaccaagcagcccagcaagagctgccacaagcccaaggccatcgtgcacaccgagaaagtgaacatgatgagcctgaccgtgctgggcctgcggatgctgttcgccaaaaccgtggccgtgaacttcctgctgaccgccaagctgttcttcctcctcaccgcccgcgccaagagaagcggatctggcgtgaagcagaccctgaatttcgacctgctgaagctggctggcgacgtggaatccaacccaggccctactagtatggactggatttggcgcatccttttccttgtcggcgctgctaccggcgcgcattccttcgaagaagtgcagctggtggaatcaggcggcggactggtgcagcctggcagaagcctgagactgagctgtgccgccagcggcttcaccttcaacgactacgccatgcactgggtgcgccaggcccctggaaaaggactggaatgggtgtccacaatcagctggaacagcggcagcatcggctacgccgatagcgtgaagggccggttcaccatcagccgggacaacgccaagaagtccctgtacctccagatgaacagcctgcgggccgaggacacagccctgtactattgcgccaaggacatccagtacggcaactactactacggcatggacgtgtggggccagggaaccaccgtgaccgtgtcatctacgcgtgaggacctgaagaacgtgttcccacctgaggtggccgtgttcgagcctagcgaggccgagatcagccacacccagaaagccaccctcgtgtgcctggctaccggcttctaccccgaccatgtggaactgtcttggtgggtcaacggcaaagaggtgcacagcggcgtgtgtaccgacccccagccactgaaagaacagcccgccctgaacgacagccggtactgcctgagcagcagactgagagtgtccgccaccttctggcagaacccccggaaccacttcagatgccaggtgcagttctacggcctgagcgagaacgacgagtggacccaggacagagccaagcccgtgacccagatcgtgtctgccgaagcctggggcagagccgatgatgtgattaagatccactggcaggaaaagaagtccaacaccatcctgggcagccaggaaggcaacaccatgaagaccaacgacacctacatgaagttcagctggctgaccgtgcccgagaagtccctggacaaagaacacagatgcatcgtgcggcacgaaaacaacaagaacggcgtggaccaggaaatcatcttcccacccatcaagaccgatgtgattacaatggaccccaaggacaactgctccaaggacgccaacgataccctgctgctccagctgaccaacaccagcgcctactacatgtacttgttgctgctgctgaagtccgtggtgtacttcgccatcatcacatgctgcctgctgatggctatggtcaagcggaaggacagccgggga

SEQ ID NO: 6513 - DNA, 2604 bp, synthetic construct
  source 1..2604: mol_type = other DNA
atggccttaccagtgaccgccttgctcctgccgctggccttgctgctccacgccgccaggccggaagtgcagctggttgaatctggcggaggactggttcagcctggcggatctctgagactgtcttgtgccgccagcggcttcagcttcagcgacttttggatgagctgggtccgacaggcccctggcaaaggacttgaatgggtcgccacaatcagccaggccggcagcgagaaggactacgtggactctgtgaagggcagattcaccatcagccgggacaacgccaagaagtccctgtacctccagatgaacagcctgagagccgaggacaccgccgtgtactattgtgcctctggcgtgtacagcttcgactacagaggccagggcaccctggtcacagtctcttctggtaccggcggaggcggatctggcggcggaggtagcggtggcggaggatctgaattcgacatcgtgatgacccagacccccctgagcctgcctgtgacacctggcgagcctgccagcatctcctgcagaagcagcaagagcctgctgcacagcaacggcatcacctacctgtactggtatctgcagaaacccggccagagcccccaactgctgatctaccagatgagcaacctggtgtccggcgtgcccgacagattttctggcagcggctccggcaccgacttcaccctgaagatcagccgggtggaagccgaggacgtgggcgtgtactactgcgcccagaacctggaactgccctacacctttggcggcggaacaaaggtggaaatcaagcggctcgagatccagaaccctgatcctgccgtgtaccagctgcgggatagcaagagcagcgacaagagcgtgtgtctgttcaccgacttcgacagccagaccaacgtgtcccagagcaaggactccgacgtgtacatcaccgataagtgcgtgctggacatgcggagcatggacttcaagagcaactccgccgtggcctggtccaacaagtccgatttcgcctgcgccaacgccttcaacaacagcattatccccgaggacacattcttcccaagccccgagagcagcgactccaccgaccacgtgaagcccaaagagacagagaacaccaagcagcccagcaagagctgccacaagcccaaggccatcgtgcacaccgagaaagtgaacatgatgagcctgaccgtgctgggcctgcggatgctgttcgccaaaaccgtggccgtgaacttcctgctgaccgccaagctgttcttcctcctcaccgcccgcgccaagagaagcggatctggcgtgaagcagaccctgaatttcgacctgctgaagctggctggcgacgtggaatccaacccaggccctactagtatggactggatttggcgcatccttttccttgtcggcgctgctaccggcgcgcattccttcgaacaggtgcaactggtgcagagcggagccgaagtgaaaaagcccggcagcagcgtgaaggtgtcctgcaaggccagcggctacgccttcagctactcctggatcaactgggtgcgccaggcccctggacagggcctggaatggatgggcagaatcttccccggcgacggcgacaccgactacaacggcaagttcaagggcagagtgaccatcaccgccgacaagagcaccagcaccgcctacatggaactgagcagcctgcggagcgaggataccgccgtgtactattgtgccagaaacgtgttcgacggctactggctggtgtactggggccagggaacacttgtgaccgtgtccagcacgcgtgaggacctgaagaacgtgttcccacctgaggtggccgtgttcgagcctagcgaggccgagatcagccacacccagaaagccaccctcgtgtgcctggctaccggcttctaccccgaccatgtggaactgtcttggtgggtcaacggcaaagaggtgcacagcggcgtgtgtaccgacccccagccactgaaagaacagcccgccctgaacgacagccggtactgcctgagcagcagactgagagtgtccgccaccttctggcagaacccccggaaccacttcagatgccaggtgcagttctacggcctgagcgagaacgacgagtggacccaggacagagccaagcccgtgacccagatcgtgtctgccgaagcctggggcagagccgatgatgtgattaagatccactggcaggaaaagaagtccaacaccatcctgggcagccaggaaggcaacaccatgaagaccaacgacacctacatgaagttcagctggctgaccgtgcccgagaagtccctggacaaagaacacagatgcatcgtgcggcacgaaaacaacaagaacggcgtggaccaggaaatcatcttcccacccatcaagaccgatgtgattacaatggaccccaaggacaactgctccaaggacgccaacgataccctgctgctccagctgaccaacaccagcgcctactacatgtacttgttgctgctgctgaagtccgtggtgtacttcgccatcatcacatgctgcctgctgatggctatggtcaagcggaaggacagccgggga

SEQ ID NO: 6514 - DNA, 2607 bp, synthetic construct
  source 1..2607: mol_type = other DNA
atggccttaccagtgaccgccttgctcctgccgctggccttgctgctccacgccgccaggccggaagtgcagctggttgaatctggcggaggactggttcagcctggcggatctctgagactgtcttgtgccgccagcggcttcagcttcagcgacttttggatgagctgggtccgacaggcccctggcaaaggacttgaatgggtcgccacaatcagccaggccggcagcgagaaggactacgtggactctgtgaagggcagattcaccatcagccgggacaacgccaagaagtccctgtacctccagatgaacagcctgagagccgaggacaccgccgtgtactattgtgcctctggcgtgtacagcttcgactacagaggccagggcaccctggtcacagtctcttctggtaccggcggaggcggatctggcggcggaggtagcggtggcggaggatctgaattcgacatccagatgacccagagccccagcagcctgtctgccagcgtgggcgacagagtgaccatcacctgtcggagcagccagagcatcgtgcactccgtgggcaacaccttcctggaatggtatcagcagaagcccggcaaggcccccaagctgctgatctacaaggtgtccaacagattcagcggcgtgcccagcaggtttagcggctctggcagcggcaccgacttcaccctgaccatctctagcctccagcccgaggacttcgccacctactactgttttcaaggcagccagttcccctacaccttcggccagggaacaaaggtggaaatcaagcggctcgagatccagaaccctgatcctgccgtgtaccagctgcgggatagcaagagcagcgacaagagcgtgtgtctgttcaccgacttcgacagccagaccaacgtgtcccagagcaaggactccgacgtgtacatcaccgataagtgcgtgctggacatgcggagcatggacttcaagagcaactccgccgtggcctggtccaacaagtccgatttcgcctgcgccaacgccttcaacaacagcattatccccgaggacacattcttcccaagccccgagagcagcgactccaccgaccacgtgaagcccaaagagacagagaacaccaagcagcccagcaagagctgccacaagcccaaggccatcgtgcacaccgagaaagtgaacatgatgagcctgaccgtgctgggcctgcggatgctgttcgccaaaaccgtggccgtgaacttcctgctgaccgccaagctgttcttcctcctcaccgcccgcgccaagagaagcggatctggcgtgaagcagaccctgaatttcgacctgctgaagctggctggcgacgtggaatccaacccaggccctactagtatggactggatttggcgcatccttttccttgtcggcgctgctaccggcgcgcattccttcgaagaagtgcaactggtggaaagcggaggcggcctggtgcagcctggcggatctctgagactgagctgtgccgccagcggctacgagttcagccggtcctggatgaactgggtgcgccaggcccctggcaagggactggaatgggtgggaagaatctaccccggcgacggcgacaccaactacagcggcaagttcaagggccggttcaccatcagcgccgacaccagcaagaacaccgcctacctccagatgaacagcctgcgggccgaggataccgccgtgtactactgtgccagagatggcagctcctgggactggtacttcgacgtgtggggacagggaacccttgtgaccgtgtccagcacgcgtgaggacctgaagaacgtgttcccacctgaggtggccgtgttcgagcctagcgaggccgagatcagccacacccagaaagccaccctcgtgtgcctggctaccggcttctaccccgaccatgtggaactgtcttggtgggtcaacggcaaagaggtgcacagcggcgtgtgtaccgacccccagccactgaaagaacagcccgccctgaacgacagccggtactgcctgagcagcagactgagagtgtccgccaccttctggcagaacccccggaaccacttcagatgccaggtgcagttctacggcctgagcgagaacgacgagtggacccaggacagagccaagcccgtgacccagatcgtgtctgccgaagcctggggcagagccgatgatgtgattaagatccactggcaggaaaagaagtccaacaccatcctgggcagccaggaaggcaacaccatgaagaccaacgacacctacatgaagttcagctggctgaccgtgcccgagaagtccctggacaaagaacacagatgcatcgtgcggcacgaaaacaacaagaacggcgtggaccaggaaatcatcttcccacccatcaagaccgatgtgattacaatggaccccaaggacaactgctccaaggacgccaacgataccctgctgctccagctgaccaacaccagcgcctactacatgtacttgttgctgctgctgaagtccgtggtgtacttcgccatcatcacatgctgcctgctgatggctatggtcaagcggaaggacagccgggga

SEQ ID NO: 6515 - DNA, 2601 bp, synthetic construct
  source 1..2601: mol_type = other DNA
atggccttaccagtgaccgccttgctcctgccgctggccttgctgctccacgccgccaggccggaagtgcagctggttgaatctggcggaggactggttcagcctggcggatctctgagactgtcttgtgccgccagcggcttcagcttcagcgacttttggatgagctgggtccgacaggcccctggcaaaggacttgaatgggtcgccacaatcagccaggccggcagcgagaaggactacgtggactctgtgaagggcagattcaccatcagccgggacaacgccaagaagtccctgtacctccagatgaacagcctgagagccgaggacaccgccgtgtactattgtgcctctggcgtgtacagcttcgactacagaggccagggcaccctggtcacagtctcttctggtaccggcggaggcggatctggcggcggaggtagcggtggcggaggatctgaattcgacatccagatgacccagagccccagcagcctgtctgccagcgtgggcgacagagtgaccatcacctgtagagccagccagaccatctggtcctacctgaactggtatcagcagaggcccggcaaggcccccaacctgctgatctatgccgccagctctctccagagcggcgtgcccagcagattttccggcagaggcagcggcaccgacttcaccctgaccatcagttccttgcaggccgaggacttcgccacctactactgccagcagagctacagcatcccccagattttcggccagggcaccaagctggaaatcaagctcgagatccagaaccctgatcctgccgtgtaccagctgcgggatagcaagagcagcgacaagagcgtgtgtctgttcaccgacttcgacagccagaccaacgtgtcccagagcaaggactccgacgtgtacatcaccgataagtgcgtgctggacatgcggagcatggacttcaagagcaactccgccgtggcctggtccaacaagtccgatttcgcctgcgccaacgccttcaacaacagcattatccccgaggacacattcttcccaagccccgagagcagcgactccaccgaccacgtgaagcccaaagagacagagaacaccaagcagcccagcaagagctgccacaagcccaaggccatcgtgcacaccgagaaagtgaacatgatgagcctgaccgtgctgggcctgcggatgctgttcgccaaaaccgtggccgtgaacttcctgctgaccgccaagctgttcttcctcctcaccgcccgcgccaagagaagcggatctggcgtgaagcagaccctgaatttcgacctgctgaagctggctggcgacgtggaatccaacccaggccctactagtatggactggatttggcgcatccttttccttgtcggcgctgctaccggcgcgcattccttcgaacaggtgcagctccagcagtctggacccggcctcgtgaagcctagccagacactgagcctgacctgcgccatcagcggcgatagcgtgtccagcaatagcgccgcctggaactggatcagacagtccccctctcggggcctggaatggctgggccggacctactaccgcagcaagtggtacaacgactacgccgtgtccgtgaagtcccggatcaccatcaaccccgacaccagcaagaaccagttctccttgcaactgaacagcgtgacccccgaggacaccgccgtgtactactgcgccagagaagtgaccggcgacctggaagatgccttcgacatctggggccagggaacaatggtcacagtgtccagcacgcgtgaggacctgaagaacgtgttcccacctgaggtggccgtgttcgagcctagcgaggccgagatcagccacacccagaaagccaccctcgtgtgcctggctaccggcttctaccccgaccatgtggaactgtcttggtgggtcaacggcaaagaggtgcacagcggcgtgtgtaccgacccccagccactgaaagaacagcccgccctgaacgacagccggtactgcctgagcagcagactgagagtgtccgccaccttctggcagaacccccggaaccacttcagatgccaggtgcagttctacggcctgagcgagaacgacgagtggacccaggacagagccaagcccgtgacccagatcgtgtctgccgaagcctggggcagagccgatgatgtgattaagatccactggcaggaaaagaagtccaacaccatcctgggcagccaggaaggcaacaccatgaagaccaacgacacctacatgaagttcagctggctgaccgtgcccgagaagtccctggacaaagaacacagatgcatcgtgcggcacgaaaacaacaagaacggcgtggaccaggaaatcatcttcccacccatcaagaccgatgtgattacaatggaccccaaggacaactgctccaaggacgccaacgataccctgctgctccagctgaccaacaccagcgcctactacatgtacttgttgctgctgctgaagtccgtggtgtacttcgccatcatcacatgctgcctgctgatggctatggtcaagcggaaggacagccgggga

SEQ ID NO: 6516 - DNA, 2580 bp, synthetic construct
  source 1..2580: mol_type = other DNA
atggccttaccagtgaccgccttgctcctgccgctggccttgctgctccacgccgccaggccggaagtgcagctggttgaatctggcggaggactggttcagcctggcggatctctgagactgtcttgtgccgccagcggcttcagcttcagcgacttttggatgagctgggtccgacaggcccctggcaaaggacttgaatgggtcgccacaatcagccaggccggcagcgagaaggactacgtggactctgtgaagggcagattcaccatcagccgggacaacgccaagaagtccctgtacctccagatgaacagcctgagagccgaggacaccgccgtgtactattgtgcctctggcgtgtacagcttcgactacagaggccagggcaccctggtcacagtctcttctggtaccggcggaggcggatctggcggcggaggtagcggtggcggaggatctgaattcgacatccagatgacccagagccccgccaccatcgagaacacaagcctgtctgccagcgtgggcgacagagtgaccatcacctgtagagccagccagggcatcagctcttggctgacctggtatcagcagaagcccgagaaggcccccaagagcctgatctacgccgccagctctctgcagtctggcgtgcccagcagattttccggcagcggctctggcaccgacttcaccctgacaatcagcagcctgcagcccgaggacttcgccacctactactgccagcagtacgacagctaccccatcaccttcggccagggcacccggctggaaatcaagctcgagatccagaaccctgatcctgccgtgtaccagctgcgggatagcaagagcagcgacaagagcgtgtgtctgttcaccgacttcgacagccagaccaacgtgtcccagagcaaggactccgacgtgtacatcaccgataagtgcgtgctggacatgcggagcatggacttcaagagcaactccgccgtggcctggtccaacaagtccgatttcgcctgcgccaacgccttcaacaacagcattatccccgaggacacattcttcccaagccccgagagcagcgactccaccgaccacgtgaagcccaaagagacagagaacaccaagcagcccagcaagagctgccacaagcccaaggccatcgtgcacaccgagaaagtgaacatgatgagcctgaccgtgctgggcctgcggatgctgttcgccaaaaccgtggccgtgaacttcctgctgaccgccaagctgttcttcctcctcaccgcccgcgccaagagaagcggatctggcgtgaagcagaccctgaatttcgacctgctgaagctggctggcgacgtggaatccaacccaggccctactagtatggactggatttggcgcatccttttccttgtcggcgctgctaccggcgcgcattccttcgaacaggtgcaactgcagcagtggggagccggactgctgaagcctagcgagacactgagcctgacctgcgccgtgtacggcggcagcttcagcgcctactattggagctggatcagacagccccctggcaagggcctggaatggatcggcgacatcaatcacggcggaggcaccaactacaaccccagcctgaagtcccgcgtgaccatctccgtggacaccagcaagaaccagttctccctgaagctgaacagcgtgacagccgccgacacagccgtgtactactgtgccagcctgaccgcctattggggccagggatctcttgtgaccgtgtccagcacgcgtgaggacctgaagaacgtgttcccacctgaggtggccgtgttcgagcctagcgaggccgagatcagccacacccagaaagccaccctcgtgtgcctggctaccggcttctaccccgaccatgtggaactgtcttggtgggtcaacggcaaagaggtgcacagcggcgtgtgtaccgacccccagccactgaaagaacagcccgccctgaacgacagccggtactgcctgagcagcagactgagagtgtccgccaccttctggcagaacccccggaaccacttcagatgccaggtgcagttctacggcctgagcgagaacgacgagtggacccaggacagagccaagcccgtgacccagatcgtgtctgccgaagcctggggcagagccgatgatgtgattaagatccactggcaggaaaagaagtccaacaccatcctgggcagccaggaaggcaacaccatgaagaccaacgacacctacatgaagttcagctggctgaccgtgcccgagaagtccctggacaaagaacacagatgcatcgtgcggcacgaaaacaacaagaacggcgtggaccaggaaatcatcttcccacccatcaagaccgatgtgattacaatggaccccaaggacaactgctccaaggacgccaacgataccctgctgctccagctgaccaacaccagcgcctactacatgtacttgttgctgctgctgaagtccgtggtgtacttcgccatcatcacatgctgcctgctgatggctatggtcaagcggaaggacagccgggga

SEQ ID NO: 6517 - DNA, 2595 bp, synthetic construct
  source 1..2595: mol_type = other DNA
atggccttaccagtgaccgccttgctcctgccgctggccttgctgctccacgccgccaggccggaagtgcagctggttgaatctggcggaggactggttcagcctggcggatctctgagactgtcttgtgccgccagcggcttcagcttcagcgacttttggatgagctgggtccgacaggcccctggcaaaggacttgaatgggtcgccacaatcagccaggccggcagcgagaaggactacgtggactctgtgaagggcagattcaccatcagccgggacaacgccaagaagtccctgtacctccagatgaacagcctgagagccgaggacaccgccgtgtactattgtgcctctggcgtgtacagcttcgactacagaggccagggcaccctggtcacagtctcttctggtaccggcggaggcggatctggcggcggaggtagcggtggcggaggatctgaattcgacgagatcgtgctgacccagagccctgatagcctggccgtgtctctgggcgagagagccaccatcaactgcaaggccagccagagcgtggacttcgacggcgacagctacctgaactggtatcagcagaagcccggccagccccccaaggtgctgatctatgccgccagcacactgcagagcggcgtgcccagcagattttctggcagcggctccggcaccgacttcaccctgaccatcaacagcctggaagccgaggacgccgccacctactactgccagcagagcaacgaggacccctggacctttggcggcggaacaaaggtggaaatcaagctcgagatccagaaccctgatcctgccgtgtaccagctgcgggatagcaagagcagcgacaagagcgtgtgtctgttcaccgacttcgacagccagaccaacgtgtcccagagcaaggactccgacgtgtacatcaccgataagtgcgtgctggacatgcggagcatggacttcaagagcaactccgccgtggcctggtccaacaagtccgatttcgcctgcgccaacgccttcaacaacagcattatccccgaggacacattcttcccaagccccgagagcagcgactccaccgaccacgtgaagcccaaagagacagagaacaccaagcagcccagcaagagctgccacaagcccaaggccatcgtgcacaccgagaaagtgaacatgatgagcctgaccgtgctgggcctgcggatgctgttcgccaaaaccgtggccgtgaacttcctgctgaccgccaagctgttcttcctcctcaccgcccgcgccaagagaagcggatctggcgtgaagcagaccctgaatttcgacctgctgaagctggctggcgacgtggaatccaacccaggccctactagtatggactggatttggcgcatccttttccttgtcggcgctgctaccggcgcgcattccttcgaacaggtgcaactggtgcagtccggcgctgaagtgaagaaacctggggccagcgtgaaggtgtcctgcaaggtgtccggctacacctttaccgactactacattacctgggtgcgccaggcccctggacaggccctggaatggatgggctggatctaccccggcagcggcaacaccaagtacagccagaagttccagggcagattcgtgttcagcgtggacaccagcgccagcaccgcctacctgcaactgtctagcctgaaggccgaagataccgccgtgtactactgcgccaactacggcaactattggttcgcctattggggccagggaacccttgtgaccgtgtcctctacgcgtgaggacctgaagaacgtgttcccacctgaggtggccgtgttcgagcctagcgaggccgagatcagccacacccagaaagccaccctcgtgtgcctggctaccggcttctaccccgaccatgtggaactgtcttggtgggtcaacggcaaagaggtgcacagcggcgtgtgtaccgacccccagccactgaaagaacagcccgccctgaacgacagccggtactgcctgagcagcagactgagagtgtccgccaccttctggcagaacccccggaaccacttcagatgccaggtgcagttctacggcctgagcgagaacgacgagtggacccaggacagagccaagcccgtgacccagatcgtgtctgccgaagcctggggcagagccgatgatgtgattaagatccactggcaggaaaagaagtccaacaccatcctgggcagccaggaaggcaacaccatgaagaccaacgacacctacatgaagttcagctggctgaccgtgcccgagaagtccctggacaaagaacacagatgcatcgtgcggcacgaaaacaacaagaacggcgtggaccaggaaatcatcttcccacccatcaagaccgatgtgattacaatggaccccaaggacaactgctccaaggacgccaacgataccctgctgctccagctgaccaacaccagcgcctactacatgtacttgttgctgctgctgaagtccgtggtgtacttcgccatcatcacatgctgcctgctgatggctatggtcaagcggaaggacagccgggga

SEQ ID NO: 6518 - DNA, 2586 bp, synthetic construct
  source 1..2586: mol_type = other DNA
atggccttaccagtgaccgccttgctcctgccgctggccttgctgctccacgccgccaggccggaagtgcagctggttgaatctggcggaggactggttcagcctggcggatctctgagactgtcttgtgccgccagcggcttcagcttcagcgacttttggatgagctgggtccgacaggcccctggcaaaggacttgaatgggtcgccacaatcagccaggccggcagcgagaaggactacgtggactctgtgaagggcagattcaccatcagccgggacaacgccaagaagtccctgtacctccagatgaacagcctgagagccgaggacaccgccgtgtactattgtgcctctggcgtgtacagcttcgactacagaggccagggcaccctggtcacagtctcttctggtaccggcggaggcggatctggcggcggaggtagcggtggcggaggatctgaattcgacatccagatgacccagagccccagcagcctgtctgccagcgtgggcgacagagtgaccatcacctgtagagccagccagggcatcagctcttggctggcctggtatcagcagaagcccgagaaggcccccaagagcctgatctacgccgcctctagtctccagagcggcgtgcccagcagattttctggcagcggctccggcaccgacttcaccctgacaatcagctccctccagcccgaggacttcgccacctactactgccagcagtacaacagctaccctcccacctttggcggaggcaccaaggtggaaatcaagctcgagatccagaaccctgatcctgccgtgtaccagctgcgggatagcaagagcagcgacaagagcgtgtgtctgttcaccgacttcgacagccagaccaacgtgtcccagagcaaggactccgacgtgtacatcaccgataagtgcgtgctggacatgcggagcatggacttcaagagcaactccgccgtggcctggtccaacaagtccgatttcgcctgcgccaacgccttcaacaacagcattatccccgaggacacattcttcccaagccccgagagcagcgactccaccgaccacgtgaagcccaaagagacagagaacaccaagcagcccagcaagagctgccacaagcccaaggccatcgtgcacaccgagaaagtgaacatgatgagcctgaccgtgctgggcctgcggatgctgttcgccaaaaccgtggccgtgaacttcctgctgaccgccaagctgttcttcctcctcaccgcccgcgccaagagaagcggatctggcgtgaagcagaccctgaatttcgacctgctgaagctggctggcgacgtggaatccaacccaggccctactagtatggactggatttggcgcatccttttccttgtcggcgctgctaccggcgcgcattccttcgaagaagtgcaactggtgcagtctggcggagggctggtgcatcctgggggaagcctgagactgagctgtgccggctctggcttcgccttcagcagcagcaccatgcactggatcagacaggcccctggcaagggcctggaatggatcagcctgatcggaagcggagggggcatctactacggcgacagcgtgaagggccggttcaccatcagccgggacaacgccaagaacagcctgtacctccagatgaactccctgcgggccgaggacatggccgtgtactattgtgtgcggggctacttcgactgggtggactacttcgattactggggccagggcaccctcgtgaccgtgtcatctacgcgtgaggacctgaagaacgtgttcccacctgaggtggccgtgttcgagcctagcgaggccgagatcagccacacccagaaagccaccctcgtgtgcctggctaccggcttctaccccgaccatgtggaactgtcttggtgggtcaacggcaaagaggtgcacagcggcgtgtgtaccgacccccagccactgaaagaacagcccgccctgaacgacagccggtactgcctgagcagcagactgagagtgtccgccaccttctggcagaacccccggaaccacttcagatgccaggtgcagttctacggcctgagcgagaacgacgagtggacccaggacagagccaagcccgtgacccagatcgtgtctgccgaagcctggggcagagccgatgatgtgattaagatccactggcaggaaaagaagtccaacaccatcctgggcagccaggaaggcaacaccatgaagaccaacgacacctacatgaagttcagctggctgaccgtgcccgagaagtccctggacaaagaacacagatgcatcgtgcggcacgaaaacaacaagaacggcgtggaccaggaaatcatcttcccacccatcaagaccgatgtgattacaatggaccccaaggacaactgctccaaggacgccaacgataccctgctgctccagctgaccaacaccagcgcctactacatgtacttgttgctgctgctgaagtccgtggtgtacttcgccatcatcacatgctgcctgctgatggctatggtcaagcggaaggacagccgggga

SEQ ID NO: 6519 - DNA, 2616 bp, synthetic construct
  source 1..2616: mol_type = other DNA
atggccttaccagtgaccgccttgctcctgccgctggccttgctgctccacgccgccaggccggaagtgcagctggttgaatctggcggaggactggttcagcctggcggatctctgagactgtcttgtgccgccagcggcttcagcttcagcgacttttggatgagctgggtccgacaggcccctggcaaaggacttgaatgggtcgccacaatcagccaggccggcagcgagaaggactacgtggactctgtgaagggcagattcaccatcagccgggacaacgccaagaagtccctgtacctccagatgaacagcctgagagccgaggacaccgccgtgtactattgtgcctctggcgtgtacagcttcgactacagaggccagggcaccctggtcacagtctcttctggtaccggcggaggcggatctggcggcggaggtagcggtggcggaggatctgaattcgacgacatcgtgatgacacagtcaccagatagcctcaccgtctccctgggggagcggaccaccattaattgtaaatccagccaaagcgtgctggactcaagcaagaacaagaatagcctcgcctggtatcagcagaagcccggtcagcctccaaagctgctgctttcttgggcctccaccagagagtccgggattcctgataggtttagtggttcaggctccggcacagattttactctgaccattgattctctccagccagaggattctgcaacttattactgccagcaaagcgcccactttcctataacttttggccagggaacccgacttgaaatcaagctcgagatccagaaccctgatcctgccgtgtaccagctgcgggatagcaagagcagcgacaagagcgtgtgtctgttcaccgacttcgacagccagaccaacgtgtcccagagcaaggactccgacgtgtacatcaccgataagtgcgtgctggacatgcggagcatggacttcaagagcaactccgccgtggcctggtccaacaagtccgatttcgcctgcgccaacgccttcaacaacagcattatccccgaggacacattcttcccaagccccgagagcagcgactccaccgaccacgtgaagcccaaagagacagagaacaccaagcagcccagcaagagctgccacaagcccaaggccatcgtgcacaccgagaaagtgaacatgatgagcctgaccgtgctgggcctgcggatgctgttcgccaaaaccgtggccgtgaacttcctgctgaccgccaagctgttcttcctcctcaccgcccgcgccaagagaagcggatctggcgtgaagcagaccctgaatttcgacctgctgaagctggctggcgacgtggaatccaacccaggccctactagtatggactggatttggcgcatccttttccttgtcggcgctgctaccggcgcgcattccttcgaacaggtgcagctggtgcagagcggtgccgaagtgaagaaaccaggtgcatccgttaaagtttcatgtaaggctagtggatataccttcaccaattacggaatgaactgggtgaaacaggcccctggccagggactgaagtggatggggtggattaacacctacaccggggagccgacttatgcagacgactttaaggggcgggtcacgatgacctccgacacctccaccagtaccgcctacctggagctgcacaaccttaggtcagacgataccgccgtgtattactgtgcccgatggtcttggtccgacggatactatgtctacttcgactattggggccaggggaccacagttaccgtgtcctctacgcgtgaggacctgaagaacgtgttcccacctgaggtggccgtgttcgagcctagcgaggccgagatcagccacacccagaaagccaccctcgtgtgcctggctaccggcttctaccccgaccatgtggaactgtcttggtgggtcaacggcaaagaggtgcacagcggcgtgtgtaccgacccccagccactgaaagaacagcccgccctgaacgacagccggtactgcctgagcagcagactgagagtgtccgccaccttctggcagaacccccggaaccacttcagatgccaggtgcagttctacggcctgagcgagaacgacgagtggacccaggacagagccaagcccgtgacccagatcgtgtctgccgaagcctggggcagagccgatgatgtgattaagatccactggcaggaaaagaagtccaacaccatcctgggcagccaggaaggcaacaccatgaagaccaacgacacctacatgaagttcagctggctgaccgtgcccgagaagtccctggacaaagaacacagatgcatcgtgcggcacgaaaacaacaagaacggcgtggaccaggaaatcatcttcccacccatcaagaccgatgtgattacaatggaccccaaggacaactgctccaaggacgccaacgataccctgctgctccagctgaccaacaccagcgcctactacatgtacttgttgctgctgctgaagtccgtggtgtacttcgccatcatcacatgctgcctgctgatggctatggtcaagcggaaggacagccgggga

SEQ ID NO: 6520 - DNA, 2604 bp, synthetic construct
  source 1..2604: mol_type = other DNA
atggccttaccagtgaccgccttgctcctgccgctggccttgctgctccacgccgccaggccggaagtgcagctggttgaatctggcggaggactggttcagcctggcggatctctgagactgtcttgtgccgccagcggcttcagcttcagcgacttttggatgagctgggtccgacaggcccctggcaaaggacttgaatgggtcgccacaatcagccaggccggcagcgagaaggactacgtggactctgtgaagggcagattcaccatcagccgggacaacgccaagaagtccctgtacctccagatgaacagcctgagagccgaggacaccgccgtgtactattgtgcctctggcgtgtacagcttcgactacagaggccagggcaccctggtcacagtctcttctggtaccggcggaggcggatctggcggcggaggtagcggtggcggaggatctgaattcgacgagatcgtgctgacacagagccctggaagcctggccgtgtctcctggcgagcgcgtgacaatgagctgcaagagcagccagagcgtgttcttcagcagctcccagaagaactacctggcctggtatcagcagatccccggccagagccccagactgctgatctactgggccagcaccagagaaagcggcgtgcccgatagattcaccggcagcggctctggcaccgacttcaccctgacaatcagcagcgtgcagcccgaggacctggctatctactactgccaccagtacctgagcagccggaccttcggccagggcaccaagctggaaatcaagagactcgagatccagaaccctgatcctgccgtgtaccagctgcgggatagcaagagcagcgacaagagcgtgtgtctgttcaccgacttcgacagccagaccaacgtgtcccagagcaaggactccgacgtgtacatcaccgataagtgcgtgctggacatgcggagcatggacttcaagagcaactccgccgtggcctggtccaacaagtccgatttcgcctgcgccaacgccttcaacaacagcattatccccgaggacacattcttcccaagccccgagagcagcgactccaccgaccacgtgaagcccaaagagacagagaacaccaagcagcccagcaagagctgccacaagcccaaggccatcgtgcacaccgagaaagtgaacatgatgagcctgaccgtgctgggcctgcggatgctgttcgccaaaaccgtggccgtgaacttcctgctgaccgccaagctgttcttcctcctcaccgcccgcgccaagagaagcggatctggcgtgaagcagaccctgaatttcgacctgctgaagctggctggcgacgtggaatccaacccaggccctactagtatggactggatttggcgcatccttttccttgtcggcgctgctaccggcgcgcattccttcgaacaggtgcaactgcagcagcctggcgctgaggtcgtgaagccaggcgcttccgtgaagatgtcctgcaaggccagcggctacaccttcaccagctactacatccactggatcaagcagacccctggacagggcctggaatgggtgggagtgatctaccccggcaacgacgacatcagctacaaccagaagttccagggcaaggccaccctgaccgccgacaagtctagcaccaccgcctacatgcaactgtccagcctgaccagcgaggacagcgccgtgtactactgcgccagagaagtgcggctgcggtacttcgatgtgtggggccagggaaccaccgtgaccgtgtcatctacgcgtgaggacctgaagaacgtgttcccacctgaggtggccgtgttcgagcctagcgaggccgagatcagccacacccagaaagccaccctcgtgtgcctggctaccggcttctaccccgaccatgtggaactgtcttggtgggtcaacggcaaagaggtgcacagcggcgtgtgtaccgacccccagccactgaaagaacagcccgccctgaacgacagccggtactgcctgagcagcagactgagagtgtccgccaccttctggcagaacccccggaaccacttcagatgccaggtgcagttctacggcctgagcgagaacgacgagtggacccaggacagagccaagcccgtgacccagatcgtgtctgccgaagcctggggcagagccgatgatgtgattaagatccactggcaggaaaagaagtccaacaccatcctgggcagccaggaaggcaacaccatgaagaccaacgacacctacatgaagttcagctggctgaccgtgcccgagaagtccctggacaaagaacacagatgcatcgtgcggcacgaaaacaacaagaacggcgtggaccaggaaatcatcttcccacccatcaagaccgatgtgattacaatggaccccaaggacaactgctccaaggacgccaacgataccctgctgctccagctgaccaacaccagcgcctactacatgtacttgttgctgctgctgaagtccgtggtgtacttcgccatcatcacatgctgcctgctgatggctatggtcaagcggaaggacagccgggga

SEQ ID NO: 6521 - DNA, 2616 bp, synthetic construct
  source 1..2616: mol_type = other DNA
atggccttaccagtgaccgccttgctcctgccgctggccttgctgctccacgccgccaggccggaagtgcagctggttgaatctggcggaggactggttcagcctggcggatctctgagactgtcttgtgccgccagcggcttcagcttcagcgacttttggatgagctgggtccgacaggcccctggcaaaggacttgaatgggtcgccacaatcagccaggccggcagcgagaaggactacgtggactctgtgaagggcagattcaccatcagccgggacaacgccaagaagtccctgtacctccagatgaacagcctgagagccgaggacaccgccgtgtactattgtgcctctggcgtgtacagcttcgactacagaggccagggcaccctggtcacagtctcttctggtaccggcggaggcggatctggcggcggaggtagcggtggcggaggatctgaattcgatgtgctgctgacccagagccctctgagcctgcctgtgacactgggacagcctgccagcatctcctgtcggagcagccagaccatcgtgcacagcaacggcaacacctacctggaatggttccagcagcggccaggccagagccccagactgctgatctaccaggtgtccaacagattcagcggcgtgcccgacagattctccggcagcggctctggcaccgacttcaccctgaagatcagccgggtggaagccgaggacgtgggcgtgtactactgttttcaaggcagccacgtgccccggacctttggcggaggaacaaaggtggaaatcaagagagccctcgagatccagaaccctgatcctgccgtgtaccagctgcgggatagcaagagcagcgacaagagcgtgtgtctgttcaccgacttcgacagccagaccaacgtgtcccagagcaaggactccgacgtgtacatcaccgataagtgcgtgctggacatgcggagcatggacttcaagagcaactccgccgtggcctggtccaacaagtccgatttcgcctgcgccaacgccttcaacaacagcattatccccgaggacacattcttcccaagccccgagagcagcgactccaccgaccacgtgaagcccaaagagacagagaacaccaagcagcccagcaagagctgccacaagcccaaggccatcgtgcacaccgagaaagtgaacatgatgagcctgaccgtgctgggcctgcggatgctgttcgccaaaaccgtggccgtgaacttcctgctgaccgccaagctgttcttcctcctcaccgcccgcgccaagagaagcggatctggcgtgaagcagaccctgaatttcgacctgctgaagctggctggcgacgtggaatccaacccaggccctactagtatggactggatttggcgcatccttttccttgtcggcgctgctaccggcgcgcattccttcgaacagatccaactggtgcagagcggcagcgagctgaagaaacctggggccagcgtgaaggtgtcctgcaaggccagcggctacacctttaccaactacggcatgaactgggtgcgccaggcccctggacagggcctgaaatggatgggctggatcaacaccaacaccggcgagcctaagtacgccgaagagttcaagggcagattcgccctgagcctggacaccagcgtgtccacagcctacctccagatcaacagcctgaaggccgaggataccgccgtgtacttctgcgccagaggctacggcaactacgccagaggggcttggctggcctattggggccagggaacactcgtgaccgtgtcctctacgcgtgaggacctgaagaacgtgttcccacctgaggtggccgtgttcgagcctagcgaggccgagatcagccacacccagaaagccaccctcgtgtgcctggctaccggcttctaccccgaccatgtggaactgtcttggtgggtcaacggcaaagaggtgcacagcggcgtgtgtaccgacccccagccactgaaagaacagcccgccctgaacgacagccggtactgcctgagcagcagactgagagtgtccgccaccttctggcagaacccccggaaccacttcagatgccaggtgcagttctacggcctgagcgagaacgacgagtggacccaggacagagccaagcccgtgacccagatcgtgtctgccgaagcctggggcagagccgatgatgtgattaagatccactggcaggaaaagaagtccaacaccatcctgggcagccaggaaggcaacaccatgaagaccaacgacacctacatgaagttcagctggctgaccgtgcccgagaagtccctggacaaagaacacagatgcatcgtgcggcacgaaaacaacaagaacggcgtggaccaggaaatcatcttcccacccatcaagaccgatgtgattacaatggaccccaaggacaactgctccaaggacgccaacgataccctgctgctccagctgaccaacaccagcgcctactacatgtacttgttgctgctgctgaagtccgtggtgtacttcgccatcatcacatgctgcctgctgatggctatggtcaagcggaaggacagccgggga

SEQ ID NO: 6522 - DNA, 2571 bp, synthetic construct
  source 1..2571: mol_type = other DNA
atggccttaccagtgaccgccttgctcctgccgctggccttgctgctccacgccgccaggccggaagtgcagctggttgaatctggcggaggactggttcagcctggcggatctctgagactgtcttgtgccgccagcggcttcagcttcagcgacttttggatgagctgggtccgacaggcccctggcaaaggacttgaatgggtcgccacaatcagccaggccggcagcgagaaggactacgtggactctgtgaagggcagattcaccatcagccgggacaacgccaagaagtccctgtacctccagatgaacagcctgagagccgaggacaccgccgtgtactattgtgcctctggcgtgtacagcttcgactacagaggccagggcaccctggtcacagtctcttctggtaccggcggaggcggatctggcggcggaggtagcggtggcggaggatctgaattcgacgagatcgtgctgacacagagccctgccacactctctctgagccctggcgaaagagccaccctgagctgtagcgccagcagcagcatcaactacatctactggctccagcagaagcccggccaggcccccagaatcctgatctacctgaccagcaacctggcctccggcgtgccagccagattttctggcagcggctccggcaccgacttcaccctgacaatcagcagcctggaacccgaggacttcgccgtgtactactgcctccagtggtccagcaaccccctgacctttggcggaggcaccaaggtggaaatcaagctcgagatccagaaccctgatcctgccgtgtaccagctgcgggatagcaagagcagcgacaagagcgtgtgtctgttcaccgacttcgacagccagaccaacgtgtcccagagcaaggactccgacgtgtacatcaccgataagtgcgtgctggacatgcggagcatggacttcaagagcaactccgccgtggcctggtccaacaagtccgatttcgcctgcgccaacgccttcaacaacagcattatccccgaggacacattcttcccaagccccgagagcagcgactccaccgaccacgtgaagcccaaagagacagagaacaccaagcagcccagcaagagctgccacaagcccaaggccatcgtgcacaccgagaaagtgaacatgatgagcctgaccgtgctgggcctgcggatgctgttcgccaaaaccgtggccgtgaacttcctgctgaccgccaagctgttcttcctcctcaccgcccgcgccaagagaagcggatctggcgtgaagcagaccctgaatttcgacctgctgaagctggctggcgacgtggaatccaacccaggccctactagtatggactggatttggcgcatccttttccttgtcggcgctgctaccggcgcgcattccttcgaagaagtgcaactggtggaaagcgggggaggacttgtgaagcctggcggctctctgagactgagctgtgccgcctctggcttcaccttcagcagctacgacatgagctgggtgcgccaggctcctggcaagggactggaatgggtgtccaccatcagcagcggcggcagctacacctactacctggacagcatcaagggccggttcaccatctccagagacaacgccaagaacagcctgtacctccagatgaactccctgcgggccgaggacacagccgtgtattattgcgccagacagggcctggattactggggcagaggcacccttgtgaccgtgtcctctacgcgtgaggacctgaagaacgtgttcccacctgaggtggccgtgttcgagcctagcgaggccgagatcagccacacccagaaagccaccctcgtgtgcctggctaccggcttctaccccgaccatgtggaactgtcttggtgggtcaacggcaaagaggtgcacagcggcgtgtgtaccgacccccagccactgaaagaacagcccgccctgaacgacagccggtactgcctgagcagcagactgagagtgtccgccaccttctggcagaacccccggaaccacttcagatgccaggtgcagttctacggcctgagcgagaacgacgagtggacccaggacagagccaagcccgtgacccagatcgtgtctgccgaagcctggggcagagccgatgatgtgattaagatccactggcaggaaaagaagtccaacaccatcctgggcagccaggaaggcaacaccatgaagaccaacgacacctacatgaagttcagctggctgaccgtgcccgagaagtccctggacaaagaacacagatgcatcgtgcggcacgaaaacaacaagaacggcgtggaccaggaaatcatcttcccacccatcaagaccgatgtgattacaatggaccccaaggacaactgctccaaggacgccaacgataccctgctgctccagctgaccaacaccagcgcctactacatgtacttgttgctgctgctgaagtccgtggtgtacttcgccatcatcacatgctgcctgctgatggctatggtcaagcggaaggacagccgggga

SEQ ID NO: 6523 - DNA, 2598 bp, synthetic construct
  source 1..2598: mol_type = other DNA
atggccttaccagtgaccgccttgctcctgccgctggccttgctgctccacgccgccaggccggaagtgcagctggttgaatctggcggaggactggttcagcctggcggatctctgagactgtcttgtgccgccagcggcttcagcttcagcgacttttggatgagctgggtccgacaggcccctggcaaaggacttgaatgggtcgccacaatcagccaggccggcagcgagaaggactacgtggactctgtgaagggcagattcaccatcagccgggacaacgccaagaagtccctgtacctccagatgaacagcctgagagccgaggacaccgccgtgtactattgtgcctctggcgtgtacagcttcgactacagaggccagggcaccctggtcacagtctcttctggtaccggcggaggcggatctggcggcggaggtagcggtggcggaggatctgaattcgacatcgtgatgacccagagccccgatagcctggccgtgtctctgggagagagagccaccatcaactgccgggccagcaagagcgtgtccaccagcggctacagcttcatgcactggtatcagcagaagcccggccagccccccaagctgctgatctacctggcctccaacctggaaagcggcgtgcccgatagattcagcggcagcggctctggcaccgacttcaccctgaccatcagttctcttcaggccgaggacgtggccgtgtactactgccagcacagcagagaggtgccctggacattcggccagggcacaaaggtggaaatcaagcggctcgagatccagaaccctgatcctgccgtgtaccagctgcgggatagcaagagcagcgacaagagcgtgtgtctgttcaccgacttcgacagccagaccaacgtgtcccagagcaaggactccgacgtgtacatcaccgataagtgcgtgctggacatgcggagcatggacttcaagagcaactccgccgtggcctggtccaacaagtccgatttcgcctgcgccaacgccttcaacaacagcattatccccgaggacacattcttcccaagccccgagagcagcgactccaccgaccacgtgaagcccaaagagacagagaacaccaagcagcccagcaagagctgccacaagcccaaggccatcgtgcacaccgagaaagtgaacatgatgagcctgaccgtgctgggcctgcggatgctgttcgccaaaaccgtggccgtgaacttcctgctgaccgccaagctgttcttcctcctcaccgcccgcgccaagagaagcggatctggcgtgaagcagaccctgaatttcgacctgctgaagctggctggcgacgtggaatccaacccaggccctactagtatggactggatttggcgcatccttttccttgtcggcgctgctaccggcgcgcattccttcgaacaggtgcagctggtgcagtctggggccgaagtgaagaaacctggggccagcgtgaaggtgtcctgcaaggccagcggatacacctttaccaactacggcatgaactgggtgcgccaggcccctggacagggcctggaatggatgggctggatcaacacctacaccggcgagcccacatacgccgacgccttcaagggcagattcgccttcagcctggacaccagcacctccaccgcctacctccagatcaacagcctgcggagcgacgacaccgccgtgtattattgcgccagagattacggcgactacgggatggactattggggccagggaaccaccgtgaccgtgtcctctacgcgtgaggacctgaagaacgtgttcccacctgaggtggccgtgttcgagcctagcgaggccgagatcagccacacccagaaagccaccctcgtgtgcctggctaccggcttctaccccgaccatgtggaactgtcttggtgggtcaacggcaaagaggtgcacagcggcgtgtgtaccgacccccagccactgaaagaacagcccgccctgaacgacagccggtactgcctgagcagcagactgagagtgtccgccaccttctggcagaacccccggaaccacttcagatgccaggtgcagttctacggcctgagcgagaacgacgagtggacccaggacagagccaagcccgtgacccagatcgtgtctgccgaagcctggggcagagccgatgatgtgattaagatccactggcaggaaaagaagtccaacaccatcctgggcagccaggaaggcaacaccatgaagaccaacgacacctacatgaagttcagctggctgaccgtgcccgagaagtccctggacaaagaacacagatgcatcgtgcggcacgaaaacaacaagaacggcgtggaccaggaaatcatcttcccacccatcaagaccgatgtgattacaatggaccccaaggacaactgctccaaggacgccaacgataccctgctgctccagctgaccaacaccagcgcctactacatgtacttgttgctgctgctgaagtccgtggtgtacttcgccatcatcacatgctgcctgctgatggctatggtcaagcggaaggacagccgggga

SEQ ID NO: 6524 - DNA, 2586 bp, synthetic construct
  source 1..2586: mol_type = other DNA
atggccttaccagtgaccgccttgctcctgccgctggccttgctgctccacgccgccaggccggaagtgcagctggttgaatctggcggaggactggttcagcctggcggatctctgagactgtcttgtgccgccagcggcttcagcttcagcgacttttggatgagctgggtccgacaggcccctggcaaaggacttgaatgggtcgccacaatcagccaggccggcagcgagaaggactacgtggactctgtgaagggcagattcaccatcagccgggacaacgccaagaagtccctgtacctccagatgaacagcctgagagccgaggacaccgccgtgtactattgtgcctctggcgtgtacagcttcgactacagaggccagggcaccctggtcacagtctcttctggtaccggcggaggcggatctggcggcggaggtagcggtggcggaggatctgaattcgacatcgtgatgacccagacccccctgaccctgagcgtgacaatcggacagcctgccagcatctcctgcaagagcagccagagcctgctggacagcgacggcaagacctacctgaactggctgctgcagaggccaggccagagccccgagagactgatctacctggtgtccaagctggactccggcgtgcccgatagattcacaggcagcggctccggcaccgacttcaccctgaagatcagccgggtggaagccgaggacctgggcgtgtactgttgttggcagggcacccacttcccttacaccttcggcggagggaccaaggtggaaatcaagggcctcgagatccagaaccctgatcctgccgtgtaccagctgcgggatagcaagagcagcgacaagagcgtgtgtctgttcaccgacttcgacagccagaccaacgtgtcccagagcaaggactccgacgtgtacatcaccgataagtgcgtgctggacatgcggagcatggacttcaagagcaactccgccgtggcctggtccaacaagtccgatttcgcctgcgccaacgccttcaacaacagcattatccccgaggacacattcttcccaagccccgagagcagcgactccaccgaccacgtgaagcccaaagagacagagaacaccaagcagcccagcaagagctgccacaagcccaaggccatcgtgcacaccgagaaagtgaacatgatgagcctgaccgtgctgggcctgcggatgctgttcgccaaaaccgtggccgtgaacttcctgctgaccgccaagctgttcttcctcctcaccgcccgcgccaagagaagcggatctggcgtgaagcagaccctgaatttcgacctgctgaagctggctggcgacgtggaatccaacccaggccctactagtatggactggatttggcgcatccttttccttgtcggcgctgctaccggcgcgcattccttcgaacaggtgcaactgcagcagcctggcgctgaacttgtgcggccaggcgcctctgtgaagctgagctgtaaagccagcggctacaccttcaccagctactggatgaactgggtcaagcagcgcccaggccagggcctggaatggatcggaatgatcgaccccagcgacagcgagacacactacaaccacatcttcaaggacaaggccaccctgaccgtggacaagtccagcagcacagcctacctgcaactgtccagcctgaccagcgaggacagcgccgtgtactactgcgcccggaacctgtatctgtggggccagggaacaagcgtgaccgtgtctagcacgcgtgaggacctgaagaacgtgttcccacctgaggtggccgtgttcgagcctagcgaggccgagatcagccacacccagaaagccaccctcgtgtgcctggctaccggcttctaccccgaccatgtggaactgtcttggtgggtcaacggcaaagaggtgcacagcggcgtgtgtaccgacccccagccactgaaagaacagcccgccctgaacgacagccggtactgcctgagcagcagactgagagtgtccgccaccttctggcagaacccccggaaccacttcagatgccaggtgcagttctacggcctgagcgagaacgacgagtggacccaggacagagccaagcccgtgacccagatcgtgtctgccgaagcctggggcagagccgatgatgtgattaagatccactggcaggaaaagaagtccaacaccatcctgggcagccaggaaggcaacaccatgaagaccaacgacacctacatgaagttcagctggctgaccgtgcccgagaagtccctggacaaagaacacagatgcatcgtgcggcacgaaaacaacaagaacggcgtggaccaggaaatcatcttcccacccatcaagaccgatgtgattacaatggaccccaaggacaactgctccaaggacgccaacgataccctgctgctccagctgaccaacaccagcgcctactacatgtacttgttgctgctgctgaagtccgtggtgtacttcgccatcatcacatgctgcctgctgatggctatggtcaagcggaaggacagccgggga

SEQ ID NO: 6525 - DNA, 2610 bp, synthetic construct
  source 1..2610: mol_type = other DNA
atggccttaccagtgaccgccttgctcctgccgctggccttgctgctccacgccgccaggccggaagtgcagctggttgaatctggcggaggactggttcagcctggcggatctctgagactgtcttgtgccgccagcggcttcagcttcagcgacttttggatgagctgggtccgacaggcccctggcaaaggacttgaatgggtcgccacaatcagccaggccggcagcgagaaggactacgtggactctgtgaagggcagattcaccatcagccgggacaacgccaagaagtccctgtacctccagatgaacagcctgagagccgaggacaccgccgtgtactattgtgcctctggcgtgtacagcttcgactacagaggccagggcaccctggtcacagtctcttctggtaccggcggaggcggatctggcggcggaggtagcggtggcggaggatctgaattcgacatcgtgatgacccagagccccgatagcctggccgtgtctctgggagagagagccaccatcaactgcgagagcagccagagcctgctgaacagcggcaaccagaagaactacctgacctggtatcagcagaagcccggccagccccccaagcccctgatctattgggccagcaccagagaaagcggcgtgcccgatagattcagcggcagcggaagcggcaccgacttcaccctgaccatcagttctcttcaggccgaggacgtggccgtgtactactgccagaacgactacagctacccctacaccttcggccagggcaccaagctggaaatcaagagactcgagatccagaaccctgatcctgccgtgtaccagctgcgggatagcaagagcagcgacaagagcgtgtgtctgttcaccgacttcgacagccagaccaacgtgtcccagagcaaggactccgacgtgtacatcaccgataagtgcgtgctggacatgcggagcatggacttcaagagcaactccgccgtggcctggtccaacaagtccgatttcgcctgcgccaacgccttcaacaacagcattatccccgaggacacattcttcccaagccccgagagcagcgactccaccgaccacgtgaagcccaaagagacagagaacaccaagcagcccagcaagagctgccacaagcccaaggccatcgtgcacaccgagaaagtgaacatgatgagcctgaccgtgctgggcctgcggatgctgttcgccaaaaccgtggccgtgaacttcctgctgaccgccaagctgttcttcctcctcaccgcccgcgccaagagaagcggatctggcgtgaagcagaccctgaatttcgacctgctgaagctggctggcgacgtggaatccaacccaggccctactagtatggactggatttggcgcatccttttccttgtcggcgctgctaccggcgcgcattccttcgaagaagtgcagctggtgcagtctggggccgaagtgaagaagcctggcgagagcctgaagatcagctgcaagggcagcggctacagcttcaccgactactacatgaagtgggccagacagatgcccggcaagggcctggaatggatgggcgacatcatccccagcaacggggccaccttctacaaccagaaattcaagggccaagtgaccatctccgccgacaagagcatcagcaccacctacctccagtggtccagcctgaaggccagcgacaccgccatgtactattgcgccagaagccatctgctgcgggccagttggttcgcctattggggccagggaacaatggtcacagtgtccagcacgcgtgaggacctgaagaacgtgttcccacctgaggtggccgtgttcgagcctagcgaggccgagatcagccacacccagaaagccaccctcgtgtgcctggctaccggcttctaccccgaccatgtggaactgtcttggtgggtcaacggcaaagaggtgcacagcggcgtgtgtaccgacccccagccactgaaagaacagcccgccctgaacgacagccggtactgcctgagcagcagactgagagtgtccgccaccttctggcagaacccccggaaccacttcagatgccaggtgcagttctacggcctgagcgagaacgacgagtggacccaggacagagccaagcccgtgacccagatcgtgtctgccgaagcctggggcagagccgatgatgtgattaagatccactggcaggaaaagaagtccaacaccatcctgggcagccaggaaggcaacaccatgaagaccaacgacacctacatgaagttcagctggctgaccgtgcccgagaagtccctggacaaagaacacagatgcatcgtgcggcacgaaaacaacaagaacggcgtggaccaggaaatcatcttcccacccatcaagaccgatgtgattacaatggaccccaaggacaactgctccaaggacgccaacgataccctgctgctccagctgaccaacaccagcgcctactacatgtacttgttgctgctgctgaagtccgtggtgtacttcgccatcatcacatgctgcctgctgatggctatggtcaagcggaaggacagccgggga

SEQ ID NO: 6526 - DNA, 2595 bp, synthetic construct
  source 1..2595: mol_type = other DNA
atggccttaccagtgaccgccttgctcctgccgctggccttgctgctccacgccgccaggccggaagtgcagctggttgaatctggcggaggactggttcagcctggcggatctctgagactgtcttgtgccgccagcggcttcagcttcagcgacttttggatgagctgggtccgacaggcccctggcaaaggacttgaatgggtcgccacaatcagccaggccggcagcgagaaggactacgtggactctgtgaagggcagattcaccatcagccgggacaacgccaagaagtccctgtacctccagatgaacagcctgagagccgaggacaccgccgtgtactattgtgcctctggcgtgtacagcttcgactacagaggccagggcaccctggtcacagtctcttctggtaccggcggaggcggatctggcggcggaggtagcggtggcggaggatctgaattcgacatccagatgacccagtctaccagttccctgagtgcatccctcggagacagggtgacgatcagttgcagcgcaagccaagggatcaataactatctgaactggtatcagcagaaaccggacggaacagtcgaactcctgatttattacaccagcacccttcagagtggcgtcccttcccggttcagtggctccggaagcgggaccgattactccctgaccatttctaatctggagccagaggacataggaacgtattattgccagcagtatagtaaactgccacgaacttttggaggggggacgaaactggagatcaaactcgagatccagaaccctgatcctgccgtgtaccagctgcgggatagcaagagcagcgacaagagcgtgtgtctgttcaccgacttcgacagccagaccaacgtgtcccagagcaaggactccgacgtgtacatcaccgataagtgcgtgctggacatgcggagcatggacttcaagagcaactccgccgtggcctggtccaacaagtccgatttcgcctgcgccaacgccttcaacaacagcattatccccgaggacacattcttcccaagccccgagagcagcgactccaccgaccacgtgaagcccaaagagacagagaacaccaagcagcccagcaagagctgccacaagcccaaggccatcgtgcacaccgagaaagtgaacatgatgagcctgaccgtgctgggcctgcggatgctgttcgccaaaaccgtggccgtgaacttcctgctgaccgccaagctgttcttcctcctcaccgcccgcgccaagagaagcggatctggcgtgaagcagaccctgaatttcgacctgctgaagctggctggcgacgtggaatccaacccaggccctactagtatggactggatttggcgcatccttttccttgtcggcgctgctaccggcgcgcattccttcgaacaggtgcaactccagcagtccggaagcgagcttatgatgccaggggcatcagtgaagatcagctgcaaggctactggctacaccttctctaattactggatagagtgggttaaacaaaggccagggcacggcctggaatggatcggcgagatcctgcctgggacaggccgaaccatttataacgagaagttcaaaggcaaggctactttcaccgcagatataagctctaatacagtgcaaatgcagctctcttccctgacaagtgaggatagtgccgtgtattattgcgcacgaagagattactatggaaatttttattacgctatggattattggggtcaaggaacaagtgtgaccgttagcagcacgcgtgaggacctgaagaacgtgttcccacctgaggtggccgtgttcgagcctagcgaggccgagatcagccacacccagaaagccaccctcgtgtgcctggctaccggcttctaccccgaccatgtggaactgtcttggtgggtcaacggcaaagaggtgcacagcggcgtgtgtaccgacccccagccactgaaagaacagcccgccctgaacgacagccggtactgcctgagcagcagactgagagtgtccgccaccttctggcagaacccccggaaccacttcagatgccaggtgcagttctacggcctgagcgagaacgacgagtggacccaggacagagccaagcccgtgacccagatcgtgtctgccgaagcctggggcagagccgatgatgtgattaagatccactggcaggaaaagaagtccaacaccatcctgggcagccaggaaggcaacaccatgaagaccaacgacacctacatgaagttcagctggctgaccgtgcccgagaagtccctggacaaagaacacagatgcatcgtgcggcacgaaaacaacaagaacggcgtggaccaggaaatcatcttcccacccatcaagaccgatgtgattacaatggaccccaaggacaactgctccaaggacgccaacgataccctgctgctccagctgaccaacaccagcgcctactacatgtacttgttgctgctgctgaagtccgtggtgtacttcgccatcatcacatgctgcctgctgatggctatggtcaagcggaaggacagccgggga

SEQ ID NO: 6527 - DNA, 2580 bp, synthetic construct
  source 1..2580: mol_type = other DNA
atggccttaccagtgaccgccttgctcctgccgctggccttgctgctccacgccgccaggccggaagtgcagctggttgaatctggcggaggactggttcagcctggcggatctctgagactgtcttgtgccgccagcggcttcagcttcagcgacttttggatgagctgggtccgacaggcccctggcaaaggacttgaatgggtcgccacaatcagccaggccggcagcgagaaggactacgtggactctgtgaagggcagattcaccatcagccgggacaacgccaagaagtccctgtacctccagatgaacagcctgagagccgaggacaccgccgtgtactattgtgcctctggcgtgtacagcttcgactacagaggccagggcaccctggtcacagtctcttctggtaccggcggaggcggatctggcggcggaggtagcggtggcggaggatctgaattcgacatccagatgacccagagccctgccagcctgtccgtgtctgtgggcgagacagtgaccatcacctgtcgggccagcgagaacatctacagcaacctggcctggtatcagcagaagcagggcaagagcccccaactgctggtgtacgccgccaccaatctggccgatggcgtgcccagcagattttccggctctggcagcggcacccagtacagcctgaagatcaacagcctccagagcgaggacttcggcagctactactgccagcacttctggggcacctggacctttggaggaggcaccaccctggaaatcaagctcgagatccagaaccctgatcctgccgtgtaccagctgcgggatagcaagagcagcgacaagagcgtgtgtctgttcaccgacttcgacagccagaccaacgtgtcccagagcaaggactccgacgtgtacatcaccgataagtgcgtgctggacatgcggagcatggacttcaagagcaactccgccgtggcctggtccaacaagtccgatttcgcctgcgccaacgccttcaacaacagcattatccccgaggacacattcttcccaagccccgagagcagcgactccaccgaccacgtgaagcccaaagagacagagaacaccaagcagcccagcaagagctgccacaagcccaaggccatcgtgcacaccgagaaagtgaacatgatgagcctgaccgtgctgggcctgcggatgctgttcgccaaaaccgtggccgtgaacttcctgctgaccgccaagctgttcttcctcctcaccgcccgcgccaagagaagcggatctggcgtgaagcagaccctgaatttcgacctgctgaagctggctggcgacgtggaatccaacccaggccctactagtatggactggatttggcgcatccttttccttgtcggcgctgctaccggcgcgcattccttcgaagaagtgcaactccagcagagcggccctgagcttgtgaagcctggcgcttccgtgaagatgagctgcaaggccagcggctacaccttcaccgactactacatgaagtggatgaagcagagccacggcaagtccctggaatggatcggcgacatcaaccccaacaacggcggcaccacctacaaccagaagttcaagggcaaggccaccctgaccgtggacaagagcagcagcaccgcctacatgcaactgaacagcctgaccagcgaggacagcgccgtgtactactgcgccagagactacggctacggctatttcgactactggggccagggcacaaccctgacagtgtcctctacgcgtgaggacctgaagaacgtgttcccacctgaggtggccgtgttcgagcctagcgaggccgagatcagccacacccagaaagccaccctcgtgtgcctggctaccggcttctaccccgaccatgtggaactgtcttggtgggtcaacggcaaagaggtgcacagcggcgtgtgtaccgacccccagccactgaaagaacagcccgccctgaacgacagccggtactgcctgagcagcagactgagagtgtccgccaccttctggcagaacccccggaaccacttcagatgccaggtgcagttctacggcctgagcgagaacgacgagtggacccaggacagagccaagcccgtgacccagatcgtgtctgccgaagcctggggcagagccgatgatgtgattaagatccactggcaggaaaagaagtccaacaccatcctgggcagccaggaaggcaacaccatgaagaccaacgacacctacatgaagttcagctggctgaccgtgcccgagaagtccctggacaaagaacacagatgcatcgtgcggcacgaaaacaacaagaacggcgtggaccaggaaatcatcttcccacccatcaagaccgatgtgattacaatggaccccaaggacaactgctccaaggacgccaacgataccctgctgctccagctgaccaacaccagcgcctactacatgtacttgttgctgctgctgaagtccgtggtgtacttcgccatcatcacatgctgcctgctgatggctatggtcaagcggaaggacagccgggga

SEQ ID NO: 6528 - DNA, 2589 bp, synthetic construct
  source 1..2589: mol_type = other DNA
atggccttaccagtgaccgccttgctcctgccgctggccttgctgctccacgccgccaggccggaagtgcagctggttgaatctggcggaggactggttcagcctggcggatctctgagactgtcttgtgccgccagcggcttcagcttcagcgacttttggatgagctgggtccgacaggcccctggcaaaggacttgaatgggtcgccacaatcagccaggccggcagcgagaaggactacgtggactctgtgaagggcagattcaccatcagccgggacaacgccaagaagtccctgtacctccagatgaacagcctgagagccgaggacaccgccgtgtactattgtgcctctggcgtgtacagcttcgactacagaggccagggcaccctggtcacagtctcttctggtaccggcggaggcggatctggcggcggaggtagcggtggcggaggatctgaattcgagatcgtgctgacacagagccctggcaccctgagcctgtctccaggcgaaagagccacactgagctgtcgggcctctcagagcgtgggaggctacctggcttggtatcagcagaagccaggccaggcccccagactgctgatctacgacgccagcaatcgggccacaggcatccccgccagattttctggcagcggctccggcaccgacttcaccctgacaatcagcagcctggaacccgaggacttcgccgtgtactactgccagcagcggaacaactggccccccatgtacacattcggccagggcaccaagctggaaatcaagagactcgagatccagaaccctgatcctgccgtgtaccagctgcgggatagcaagagcagcgacaagagcgtgtgtctgttcaccgacttcgacagccagaccaacgtgtcccagagcaaggactccgacgtgtacatcaccgataagtgcgtgctggacatgcggagcatggacttcaagagcaactccgccgtggcctggtccaacaagtccgatttcgcctgcgccaacgccttcaacaacagcattatccccgaggacacattcttcccaagccccgagagcagcgactccaccgaccacgtgaagcccaaagagacagagaacaccaagcagcccagcaagagctgccacaagcccaaggccatcgtgcacaccgagaaagtgaacatgatgagcctgaccgtgctgggcctgcggatgctgttcgccaaaaccgtggccgtgaacttcctgctgaccgccaagctgttcttcctcctcaccgcccgcgccaagagaagcggatctggcgtgaagcagaccctgaatttcgacctgctgaagctggctggcgacgtggaatccaacccaggccctactagtatggactggatttggcgcatccttttccttgtcggcgctgctaccggcgcgcattccttcgaacaggtgcaactggtgcagagcggagccgaagtgaagaaacccggcagcagcgtgaaggtgtcctgcaaggcttccggcggcaccttcagcagctacgccatttcttgggtgcgccaggctcctggacagggcctggaatggatgggcggcatcatccctatcctgggcaccgccaactacgcccagaaattccagggcagagtgaccatcaccgccgacgagagcaccagcaccgcctacatggaactgagcagcctgcggagcgaggacacagccgtgtattattgcgccagatggggcggaggggccttcgacatttggggccagggaacaatggtcaccgtgtccagcacgcgtgaggacctgaagaacgtgttcccacctgaggtggccgtgttcgagcctagcgaggccgagatcagccacacccagaaagccaccctcgtgtgcctggctaccggcttctaccccgaccatgtggaactgtcttggtgggtcaacggcaaagaggtgcacagcggcgtgtgtaccgacccccagccactgaaagaacagcccgccctgaacgacagccggtactgcctgagcagcagactgagagtgtccgccaccttctggcagaacccccggaaccacttcagatgccaggtgcagttctacggcctgagcgagaacgacgagtggacccaggacagagccaagcccgtgacccagatcgtgtctgccgaagcctggggcagagccgatgatgtgattaagatccactggcaggaaaagaagtccaacaccatcctgggcagccaggaaggcaacaccatgaagaccaacgacacctacatgaagttcagctggctgaccgtgcccgagaagtccctggacaaagaacacagatgcatcgtgcggcacgaaaacaacaagaacggcgtggaccaggaaatcatcttcccacccatcaagaccgatgtgattacaatggaccccaaggacaactgctccaaggacgccaacgataccctgctgctccagctgaccaacaccagcgcctactacatgtacttgttgctgctgctgaagtccgtggtgtacttcgccatcatcacatgctgcctgctgatggctatggtcaagcggaaggacagccgggga

SEQ ID NO: 6529 - DNA, 2574 bp, synthetic construct
  source 1..2574: mol_type = other DNA
atggccttaccagtgaccgccttgctcctgccgctggccttgctgctccacgccgccaggccggaagtgcagctggttgaatctggcggaggactggttcagcctggcggatctctgagactgtcttgtgccgccagcggcttcagcttcagcgacttttggatgagctgggtccgacaggcccctggcaaaggacttgaatgggtcgccacaatcagccaggccggcagcgagaaggactacgtggactctgtgaagggcagattcaccatcagccgggacaacgccaagaagtccctgtacctccagatgaacagcctgagagccgaggacaccgccgtgtactattgtgcctctggcgtgtacagcttcgactacagaggccagggcaccctggtcacagtctcttctggtaccggcggaggcggatctggcggcggaggtagcggtggcggaggatctgaattccagatcgtgctgacacagagccctgccctgatgagcgccagccctggcgagaaagtgaccatgacctgtagcgccagcagcagcgtgcgctacatgtactggtatcagcagaagcccagaagcagccccaagccctggattcacctgaccagcaatctggcctctggcgtgcccgctagattttccggctctggcagcggcaccagctacagcctgaccatcagcagcatggaagccgaggacgccgccacctactactgccagcagtggtccagccaccccttcacatttggctccggcaccaagctggaaatcaagctcgagatccagaaccctgatcctgccgtgtaccagctgcgggatagcaagagcagcgacaagagcgtgtgtctgttcaccgacttcgacagccagaccaacgtgtcccagagcaaggactccgacgtgtacatcaccgataagtgcgtgctggacatgcggagcatggacttcaagagcaactccgccgtggcctggtccaacaagtccgatttcgcctgcgccaacgccttcaacaacagcattatccccgaggacacattcttcccaagccccgagagcagcgactccaccgaccacgtgaagcccaaagagacagagaacaccaagcagcccagcaagagctgccacaagcccaaggccatcgtgcacaccgagaaagtgaacatgatgagcctgaccgtgctgggcctgcggatgctgttcgccaaaaccgtggccgtgaacttcctgctgaccgccaagctgttcttcctcctcaccgcccgcgccaagagaagcggatctggcgtgaagcagaccctgaatttcgacctgctgaagctggctggcgacgtggaatccaacccaggccctactagtatggactggatttggcgcatccttttccttgtcggcgctgctaccggcgcgcattccttcgaagatgtgcaactccaggaaagcggccctggccttgtgaagcctagccagagcctgtccctgacctgtaccgtgaccggcttcagcatcaccagcgactactcttggaactggatcagacagttccctggcaacaaactggaatggatgggctacatcagctactccggccacacctcctacaaccccagcctggaaagccggatctccatcaccagagacaccagcaagaaccagttcttcttgcaactgaacagcgtgaccaccgaggataccgccacatattactgtaccagaggcaactgggacgtggtgtactggggccagggcacacttgtgaccgtgtctgctacgcgtgaggacctgaagaacgtgttcccacctgaggtggccgtgttcgagcctagcgaggccgagatcagccacacccagaaagccaccctcgtgtgcctggctaccggcttctaccccgaccatgtggaactgtcttggtgggtcaacggcaaagaggtgcacagcggcgtgtgtaccgacccccagccactgaaagaacagcccgccctgaacgacagccggtactgcctgagcagcagactgagagtgtccgccaccttctggcagaacccccggaaccacttcagatgccaggtgcagttctacggcctgagcgagaacgacgagtggacccaggacagagccaagcccgtgacccagatcgtgtctgccgaagcctggggcagagccgatgatgtgattaagatccactggcaggaaaagaagtccaacaccatcctgggcagccaggaaggcaacaccatgaagaccaacgacacctacatgaagttcagctggctgaccgtgcccgagaagtccctggacaaagaacacagatgcatcgtgcggcacgaaaacaacaagaacggcgtggaccaggaaatcatcttcccacccatcaagaccgatgtgattacaatggaccccaaggacaactgctccaaggacgccaacgataccctgctgctccagctgaccaacaccagcgcctactacatgtacttgttgctgctgctgaagtccgtggtgtacttcgccatcatcacatgctgcctgctgatggctatggtcaagcggaaggacagccgggga

SEQ ID NO: 6530 - DNA, 2604 bp, synthetic construct
  source 1..2604: mol_type = other DNA
atggccttaccagtgaccgccttgctcctgccgctggccttgctgctccacgccgccaggccggaagtgcagctggttgaatctggcggaggactggttcagcctggcggatctctgagactgtcttgtgccgccagcggcttcagcttcagcgacttttggatgagctgggtccgacaggcccctggcaaaggacttgaatgggtcgccacaatcagccaggccggcagcgagaaggactacgtggactctgtgaagggcagattcaccatcagccgggacaacgccaagaagtccctgtacctccagatgaacagcctgagagccgaggacaccgccgtgtactattgtgcctctggcgtgtacagcttcgactacagaggccagggcaccctggtcacagtctcttctggtaccggcggaggcggatctggcggcggaggtagcggtggcggaggatctgaattcgacgtcgtgatgacccagagccctctgagcctgcctgtgacactgggacagcctgccagcatctcctgtcggagcagccagagcatcgtgcacagcgacggcaacacctacctggaatggtatcagcagcggccaggccagagccccagacggctgatctacaaggtgtccaacagattcagcggcgtgcccgacagattctccggcagcggctctggcaccgacttcaccctgaagatcagcagagtggaagccgaggacgtgggcgtgtactactgttttcaaggcagccacgccccctggacctttggcggaggaacaaaggtggaaatcaagctcgagatccagaaccctgatcctgccgtgtaccagctgcgggatagcaagagcagcgacaagagcgtgtgtctgttcaccgacttcgacagccagaccaacgtgtcccagagcaaggactccgacgtgtacatcaccgataagtgcgtgctggacatgcggagcatggacttcaagagcaactccgccgtggcctggtccaacaagtccgatttcgcctgcgccaacgccttcaacaacagcattatccccgaggacacattcttcccaagccccgagagcagcgactccaccgaccacgtgaagcccaaagagacagagaacaccaagcagcccagcaagagctgccacaagcccaaggccatcgtgcacaccgagaaagtgaacatgatgagcctgaccgtgctgggcctgcggatgctgttcgccaaaaccgtggccgtgaacttcctgctgaccgccaagctgttcttcctcctcaccgcccgcgccaagagaagcggatctggcgtgaagcagaccctgaatttcgacctgctgaagctggctggcgacgtggaatccaacccaggccctactagtatggactggatttggcgcatccttttccttgtcggcgctgctaccggcgcgcattccttcgaagaagtgcaactggtggaatcaggcggcggactggtgcagcctggcggatctctgagactgagctgtgccgccagcggcttcaccttcagcagctacggaatgcactgggtgcgccaggcccctggcaaaggactggaatgggtggcctacatcaccaccagaagcagcaccatctactacgccgacagcgtgaagggccggttcaccatctccagagacaacgccaagaacagcctgtacctccagatgaactccctgcgggccgaggacaccgccgtgtactattgcaccagagagcccctgaccggctactacgctatggactattggggccagggcaccagcgtgaccgtgtctagtacgcgtgaggacctgaagaacgtgttcccacctgaggtggccgtgttcgagcctagcgaggccgagatcagccacacccagaaagccaccctcgtgtgcctggctaccggcttctaccccgaccatgtggaactgtcttggtgggtcaacggcaaagaggtgcacagcggcgtgtgtaccgacccccagccactgaaagaacagcccgccctgaacgacagccggtactgcctgagcagcagactgagagtgtccgccaccttctggcagaacccccggaaccacttcagatgccaggtgcagttctacggcctgagcgagaacgacgagtggacccaggacagagccaagcccgtgacccagatcgtgtctgccgaagcctggggcagagccgatgatgtgattaagatccactggcaggaaaagaagtccaacaccatcctgggcagccaggaaggcaacaccatgaagaccaacgacacctacatgaagttcagctggctgaccgtgcccgagaagtccctggacaaagaacacagatgcatcgtgcggcacgaaaacaacaagaacggcgtggaccaggaaatcatcttcccacccatcaagaccgatgtgattacaatggaccccaaggacaactgctccaaggacgccaacgataccctgctgctccagctgaccaacaccagcgcctactacatgtacttgttgctgctgctgaagtccgtggtgtacttcgccatcatcacatgctgcctgctgatggctatggtcaagcggaaggacagccgggga

SEQ ID NO: 6531 - DNA, 2580 bp, synthetic construct
  source 1..2580: mol_type = other DNA
atggccttaccagtgaccgccttgctcctgccgctggccttgctgctccacgccgccaggccggaagtgcagctggttgaatctggcggaggactggttcagcctggcggatctctgagactgtcttgtgccgccagcggcttcagcttcagcgacttttggatgagctgggtccgacaggcccctggcaaaggacttgaatgggtcgccacaatcagccaggccggcagcgagaaggactacgtggactctgtgaagggcagattcaccatcagccgggacaacgccaagaagtccctgtacctccagatgaacagcctgagagccgaggacaccgccgtgtactattgtgcctctggcgtgtacagcttcgactacagaggccagggcaccctggtcacagtctcttctggtaccggcggaggcggatctggcggcggaggtagcggtggcggaggatctgaattcgacatccagatgacccagagccccagcagcctgtctgccagcgtgggcgacagagtgaccatcacctgtagagccagccagagcatcagcctgtggctgaactggtatcagcagaagcccggcaaggcccccaagctgctgatctacgccgccagcacactccagagcggcgtgccaagcagattttccggcagcggctccggcaccgacttcaccctgacaatcagctccctccagcccgaggacttcgccacctactactgccagcagtactacaccagcccctacaccttcggccagggcaccaaggtggaaatcaagagactcgagatccagaaccctgatcctgccgtgtaccagctgcgggatagcaagagcagcgacaagagcgtgtgtctgttcaccgacttcgacagccagaccaacgtgtcccagagcaaggactccgacgtgtacatcaccgataagtgcgtgctggacatgcggagcatggacttcaagagcaactccgccgtggcctggtccaacaagtccgatttcgcctgcgccaacgccttcaacaacagcattatccccgaggacacattcttcccaagccccgagagcagcgactccaccgaccacgtgaagcccaaagagacagagaacaccaagcagcccagcaagagctgccacaagcccaaggccatcgtgcacaccgagaaagtgaacatgatgagcctgaccgtgctgggcctgcggatgctgttcgccaaaaccgtggccgtgaacttcctgctgaccgccaagctgttcttcctcctcaccgcccgcgccaagagaagcggatctggcgtgaagcagaccctgaatttcgacctgctgaagctggctggcgacgtggaatccaacccaggccctactagtatggactggatttggcgcatccttttccttgtcggcgctgctaccggcgcgcattccttcgaacaggtgcaactgctggaatctggcggcggactggtgcagcctggcggatctctgagactgagctgtgccgccagcggcttcaccttcagcagctacgccatgagctgggtgcgccaggcccctggaaaaggactggaatgggtgtccgtgatccggtccagcggcagcagcacctattacgccgatagcgtgaagggccggttcaccatcagccgggacaacagcaagaacaccctgtacctccagatgaacagcctgcgggccgaggacaccgccgtgtactattgtgctaggggaggcggctacttcgactactggggccagggaacactcgtgaccgtgtcctctacgcgtgaggacctgaagaacgtgttcccacctgaggtggccgtgttcgagcctagcgaggccgagatcagccacacccagaaagccaccctcgtgtgcctggctaccggcttctaccccgaccatgtggaactgtcttggtgggtcaacggcaaagaggtgcacagcggcgtgtgtaccgacccccagccactgaaagaacagcccgccctgaacgacagccggtactgcctgagcagcagactgagagtgtccgccaccttctggcagaacccccggaaccacttcagatgccaggtgcagttctacggcctgagcgagaacgacgagtggacccaggacagagccaagcccgtgacccagatcgtgtctgccgaagcctggggcagagccgatgatgtgattaagatccactggcaggaaaagaagtccaacaccatcctgggcagccaggaaggcaacaccatgaagaccaacgacacctacatgaagttcagctggctgaccgtgcccgagaagtccctggacaaagaacacagatgcatcgtgcggcacgaaaacaacaagaacggcgtggaccaggaaatcatcttcccacccatcaagaccgatgtgattacaatggaccccaaggacaactgctccaaggacgccaacgataccctgctgctccagctgaccaacaccagcgcctactacatgtacttgttgctgctgctgaagtccgtggtgtacttcgccatcatcacatgctgcctgctgatggctatggtcaagcggaaggacagccgggga

SEQ ID NO: 6532 - DNA, 2589 bp, synthetic construct
  source 1..2589: mol_type = other DNA
atggccttaccagtgaccgccttgctcctgccgctggccttgctgctccacgccgccaggccggaagtgcagctggttgaatctggcggaggactggttcagcctggcggatctctgagactgtcttgtgccgccagcggcttcagcttcagcgacttttggatgagctgggtccgacaggcccctggcaaaggacttgaatgggtcgccacaatcagccaggccggcagcgagaaggactacgtggactctgtgaagggcagattcaccatcagccgggacaacgccaagaagtccctgtacctccagatgaacagcctgagagccgaggacaccgccgtgtactattgtgcctctggcgtgtacagcttcgactacagaggccagggcaccctggtcacagtctcttctggtaccggcggaggcggatctggcggcggaggtagcggtggcggaggatctgaattcgacatccagatgacccagagccccagcagcctgtctgccagcgtgggcgacagagtgaccatcacctgtagagccagccagagcatcagcagctacctgaactggtatcagcagaagcccggcaaggcccccaaactgctgatctacgccgtgtccacactccagagcggcgtgcccagcagattttctggcagcggctccggcaccgacttcaccctgacaatcagctccctccagcccgaggacttcgccacctactactgtcagcagagcggcaccttccctcccaccacatttggacagggcaccaaggtggaaatcaagagactcgagatccagaaccctgatcctgccgtgtaccagctgcgggatagcaagagcagcgacaagagcgtgtgtctgttcaccgacttcgacagccagaccaacgtgtcccagagcaaggactccgacgtgtacatcaccgataagtgcgtgctggacatgcggagcatggacttcaagagcaactccgccgtggcctggtccaacaagtccgatttcgcctgcgccaacgccttcaacaacagcattatccccgaggacacattcttcccaagccccgagagcagcgactccaccgaccacgtgaagcccaaagagacagagaacaccaagcagcccagcaagagctgccacaagcccaaggccatcgtgcacaccgagaaagtgaacatgatgagcctgaccgtgctgggcctgcggatgctgttcgccaaaaccgtggccgtgaacttcctgctgaccgccaagctgttcttcctcctcaccgcccgcgccaagagaagcggatctggcgtgaagcagaccctgaatttcgacctgctgaagctggctggcgacgtggaatccaacccaggccctactagtatggactggatttggcgcatccttttccttgtcggcgctgctaccggcgcgcattccttcgaacaggtgcaactgctggaatctggcggcggactggtgcagcctggcggatctctgagactgagctgtgccgccagcggcttcaccttcagcagccacggaatgcactgggtgcgccaggcccctggaaagggactggaatgggtgtccgtgatctccggcagcggcagcaataccggctacgccgatagcgtgaagggccggttcaccatcagccgggacaacagcaagaacaccctgtacctccagatgaacagcctgcgggccgaggacaccgccgtgtactattgtgccagacagtggggcagctacgccttcgattcttggggccagggcaccctcgtgaccgtgtcatctacgcgtgaggacctgaagaacgtgttcccacctgaggtggccgtgttcgagcctagcgaggccgagatcagccacacccagaaagccaccctcgtgtgcctggctaccggcttctaccccgaccatgtggaactgtcttggtgggtcaacggcaaagaggtgcacagcggcgtgtgtaccgacccccagccactgaaagaacagcccgccctgaacgacagccggtactgcctgagcagcagactgagagtgtccgccaccttctggcagaacccccggaaccacttcagatgccaggtgcagttctacggcctgagcgagaacgacgagtggacccaggacagagccaagcccgtgacccagatcgtgtctgccgaagcctggggcagagccgatgatgtgattaagatccactggcaggaaaagaagtccaacaccatcctgggcagccaggaaggcaacaccatgaagaccaacgacacctacatgaagttcagctggctgaccgtgcccgagaagtccctggacaaagaacacagatgcatcgtgcggcacgaaaacaacaagaacggcgtggaccaggaaatcatcttcccacccatcaagaccgatgtgattacaatggaccccaaggacaactgctccaaggacgccaacgataccctgctgctccagctgaccaacaccagcgcctactacatgtacttgttgctgctgctgaagtccgtggtgtacttcgccatcatcacatgctgcctgctgatggctatggtcaagcggaaggacagccgggga

SEQ ID NO: 6533 - DNA, 2619 bp, synthetic construct
  source 1..2619: mol_type = other DNA
atggccttaccagtgaccgccttgctcctgccgctggccttgctgctccacgccgccaggccggaagtgcagctggttgaatctggcggaggactggttcagcctggcggatctctgagactgtcttgtgccgccagcggcttcagcttcagcgacttttggatgagctgggtccgacaggcccctggcaaaggacttgaatgggtcgccacaatcagccaggccggcagcgagaaggactacgtggactctgtgaagggcagattcaccatcagccgggacaacgccaagaagtccctgtacctccagatgaacagcctgagagccgaggacaccgccgtgtactattgtgcctctggcgtgtacagcttcgactacagaggccagggcaccctggtcacagtctcttctggtaccggcggaggcggatctggcggcggaggtagcggtggcggaggatctgaattcgacatcgtgatgagccagagccctagcagcctggccgtgtccgtgggcgagaaagtgaccatgagctgcaagagcagccagtccctgctgcacagcagcaaccagaagaactacctggcctggtatcagcagaagcccggccagtcccccaaggtgctgatctactgggccagcaccagagaaagcggcgtgcccgatagattcaccggcagcggctctggcaccgacttcaccctgaccatcaccagcgtgaagtccgaggacctggctgtgtactactgccagcagtattacagctacccctggaccttcggcggaggcacccggctggaaatcaaaagactcgagatccagaaccctgatcctgccgtgtaccagctgcgggatagcaagagcagcgacaagagcgtgtgtctgttcaccgacttcgacagccagaccaacgtgtcccagagcaaggactccgacgtgtacatcaccgataagtgcgtgctggacatgcggagcatggacttcaagagcaactccgccgtggcctggtccaacaagtccgatttcgcctgcgccaacgccttcaacaacagcattatccccgaggacacattcttcccaagccccgagagcagcgactccaccgaccacgtgaagcccaaagagacagagaacaccaagcagcccagcaagagctgccacaagcccaaggccatcgtgcacaccgagaaagtgaacatgatgagcctgaccgtgctgggcctgcggatgctgttcgccaaaaccgtggccgtgaacttcctgctgaccgccaagctgttcttcctcctcaccgcccgcgccaagagaagcggatctggcgtgaagcagaccctgaatttcgacctgctgaagctggctggcgacgtggaatccaacccaggccctactagtatggactggatttggcgcatccttttccttgtcggcgctgctaccggcgcgcattccttcgaagaagtgcaactccagcagagcgtggccgagcttgtgaagcctggcgcttccgtgaagatgtcctgcaaggtgtccggctacaccctgacagaccacaccatccactggatgaagcagcggcctgagcagggcctggaatggatcggctacatctaccccagggacggcatcaccggctacaacgagaagttcaagggcaaggccacactgaccgccgacaccagcagcagcacagcctacatgcaactgaacagcctgaccagcgaggacagcgccgtgtacttctgtgccagatggggctacagctacagaaactacgcctactactacgactactggggccagggcacaaccctgaccgtgtctagtacgcgtgaggacctgaagaacgtgttcccacctgaggtggccgtgttcgagcctagcgaggccgagatcagccacacccagaaagccaccctcgtgtgcctggctaccggcttctaccccgaccatgtggaactgtcttggtgggtcaacggcaaagaggtgcacagcggcgtgtgtaccgacccccagccactgaaagaacagcccgccctgaacgacagccggtactgcctgagcagcagactgagagtgtccgccaccttctggcagaacccccggaaccacttcagatgccaggtgcagttctacggcctgagcgagaacgacgagtggacccaggacagagccaagcccgtgacccagatcgtgtctgccgaagcctggggcagagccgatgatgtgattaagatccactggcaggaaaagaagtccaacaccatcctgggcagccaggaaggcaacaccatgaagaccaacgacacctacatgaagttcagctggctgaccgtgcccgagaagtccctggacaaagaacacagatgcatcgtgcggcacgaaaacaacaagaacggcgtggaccaggaaatcatcttcccacccatcaagaccgatgtgattacaatggaccccaaggacaactgctccaaggacgccaacgataccctgctgctccagctgaccaacaccagcgcctactacatgtacttgttgctgctgctgaagtccgtggtgtacttcgccatcatcacatgctgcctgctgatggctatggtcaagcggaaggacagccgggga
